United States Patent Application Publication US 2018/0126003 A1 - sequence listing, part 33

SEQ ID NO: 54522 - DNA, 3090 bp, Artificial Sequence
  derived and/or modified sequence
atgctcttccgcgccagaggcccagtgagaggtcgaggttgggggagacccgctgaagctcccaggaggggcaggtccccaccttggagtcccgcctggatctgttgctgggccctcgcaggatgccaagcagcttgggcaggcgacttaccaagtagttcaagccgacctctccctccctgtcaggagaaggactaccacttcgaatatacagaatgcgactcatccggttctaggtggcgggtggctatccctaattctgcggtggactgcagtggcttgcctgacccagtccggggtaaagagtgcaccttctcttgcgcctccggcgaatacctggagatgaaaaatcaggtctgttccaaatgtggcgagggcacctattctctgggcagcgggatcaagtttgacgagtgggacgagcttcctgctggttttagtaacatagccacttttatggacacagtcgtggggccatcggatagcaggcctgacggctgcaataattccagttggattccgcggggaaactacatcgaaagcaatagagatgactgtaccgtctccctcatctatgctgtgcacctgaaaaaatccggttacgtgttctttgagtatcaatatgtcgataataatatcttctttgagttttttatccagaacgaccagtgccaggaaatggatacaaccacagacaagtgggtgaaattgaccgacaatggtgaatggggtagccattccgtgatgctgaaatccggcacgaatatcctctattggaggactaccggcatcctcatgggcagcaaggctgtgaagccagtgctagttaagaacatcacaattgagggagtggcatacaccagcgaatgcttcccatgtaagcccgggaccttttcgaacaaaccgggcagctttaattgtcaggtctgtcccaggaacacctacagtgaaaaaggcgcaaaggagtgcattcgttgcaaagacgattcgcagttttctgaagaggggtcatctgagtgcactgagaggcccccctgtactaccaaggactacttccagatccacaccccctgcgatgaggaaggtaagacgcagattatgtacaaatggattgagccaaagatctgtagagaagatttgacggacgctataagattgccaccctccggcgagaagaaggattgtcctccttgtaatccaggcttttacaacaatggaagctcatcttgccacccctgcccccctggcacgttcagtgacgggactaaagaatgtaggccatgcccagccggcacggagcccgctttaggtttcgagtataagtggtggaacgttctgccgggtaacatgaagacgtcctgtttcaatgtggggaactcgaagtgcgatggcatgaacggttgggaggttgccggagaccacattcagtccggcgccggaggctcggataatgactatcttatcctaaacctgcacattcccgggttcaagccgcccaccagcatgaccggggcaacaggttccgaactcggccgaattaccttcgtgtttgagacattatgtagcgcagactgcgtgctctatttcatggtcgatattaataggaaatccaccaatgtcgttgagtcctgggggggcaccaaggaaaaacaggcatacacccacatcatttttaaaaatgctacgtttacgtttacctgggcattccagcgcactaatcagggtcaggacaatcggcggtttattaatgatatggtgaagatttactcaatcacagccacaaatgcagtggacggcgtggcaagttcctgccgagcctgtgcccttgggtctgaacagtcgggatcaagctgtgtgccctgcccccctggtcattacatcgaaaaggaaaccaatcagtgcaaagagtgtcccccggacacctacctctcgatccaccaggtttacggtaaggaagcctgcattccttgcggtcctggctccaaaaataatcaggaccacagtgtatgttacagtgactgctttttctatcatgagaaggagaatcaatcgctgcactacgacttttcaaacctgagttccgtaggtagccttatgaatgggccttctttcacttctaagggcactaaatatttccacttcttcaacattagcttatgtggacatgagggtaaaaagatggcattatgcacaaacaatatcaccgactttacggtcaaggagatagtagccgggtcagatgactatactaacttagtgggagcttttgtctgccaatctactattattccttctgagtcaaagggtttccgtgctgccctgtccagccagagcataattctggcggataccttcatcggagtaactgtcgagactactctgaaaaatattaacatcaaagaggatatgtttcccgttccgacttcccagattccagacgtacacttcttctataaatccagcaccgctactacttcatgtattaatggcaggtcaactgccgtgaaaatgcggtgcaatcccacaaaatctggtgcgggtgtcatcagtgtgccctcaaaatgtccagccgggacatgcgacggatgtactttctatttcttatgggaaagtgctgaggcctgtcctctgtgtacagaacatgacttccacgaaatcgaaggagcttgtaaacgcggttttcaggagacactctacgtatggaacgaaccaaaatggtgcatcaagggaatctctcttccggagaaaaaactcgccacttgcgagaccgtcgacttttggctaaaggtgggcgccggagtgggggcttttacagccgtcttgcttgtggcccttacatgctacttctggaaaaagaatcaaaagctcgaatataaatattctaaacttgtgatgacgacaaatagcaaggagtgtgaacttcccgccgccgactcttgcgctatcatggaaggtgaggacaacgaggaggaggtggtgtactcaaataaacagagcctcctcggcaagctgaagagccttgctaccaaagagaaagaggaccacttcgagtcggttcaactgaaaacgtctcgcagccccaacatatag

SEQ ID NO: 54523 - DNA, 3090 bp, Artificial Sequence
  derived and/or modified sequence
atgctgttccgggcccggggccctgtgcggggccggggctggggccggcctgctgaggccccccggcggggccgcagccccccctggagccctgcctggatctgctgctgggccctggccggctgccaggccgcctgggccggggacctgcccagcagcagcagccggcccctgcccccctgccaggagaaggactaccactttgagtacacagaatgtgacagcagcggcagccgctggagggtggccatccccaacagcgctgtggactgcagcggcctgcctgaccctgtgcggggcaaggagtgcaccttcagctgtgccagcggggagtacctggagatgaagaaccaggtgtgcagcaaatgtggggagggcacctacagcctgggcagcggcatcaagtttgatgagtgggatgagctgcctgctggcttcagcaacatcgccaccttcatggacacagtggtgggccccagcgacagcaggccagatggctgcaacaacagctcctggatcccccggggcaactacatcgagagcaacagagatgactgcaccgtgtccctcatctatgctgtgcacctgaagaagagcggctacgtgttctttgagtaccagtatgtggacaacaacatcttctttgagttcttcatccagaatgaccagtgccaggagatggacaccaccacagacaagtgggtgaagctgacagacaacggggagtggggcagccacagcgtgatgctgaagagcggcaccaacatcctgtactggaggaccaccggcatcctgatgggcagcaaggctgtgaagcctgtgctggtgaagaacatcaccattgaaggagtggcctacaccagcgagtgcttcccctgcaagccaggcaccttcagcaacaagccaggcagcttcaactgccaggtgtgccccaggaacacctacagcgagaagggggccaaggagtgcatccgctgcaaggatgacagccagttcagcgaggagggcagcagtgaatgtacagagcggcccccctgcaccaccaaggactacttccagatccacaccccctgtgatgaggagggcaagacccagatcatgtacaagtggattgagcccaagatctgccgggaggacctgacagatgccatccggctgcccccatctggagagaagaaggactgccccccctgcaaccctggcttctacaacaacggcagcagcagctgccacccctgccccccaggcaccttcagtgatggcaccaaggagtgccggccctgcccagctggaacagagcccgccctgggctttgagtacaagtggtggaatgtgctgcccggcaacatgaagaccagctgcttcaacgtgggcaacagcaaatgtgatggcatgaatggctgggaggtggccggggaccacatccagagcggggccggcggcagtgacaatgactacctgatcctgaacctgcacatccctggcttcaagccacccacctccatgactggagccaccggcagcgagctgggccgcatcacctttgtgtttgagaccctgtgcagcgctgactgtgtgctgtacttcatggtggacatcaacaggaagagcaccaacgtggtggagagctggggcggcaccaaggagaagcaggcctacacccacatcatcttcaagaatgccaccttcaccttcacctgggccttccagaggaccaaccagggccaggacaacagacgcttcatcaatgacatggtgaagatctacagcatcacagccaccaatgctgtggatggagtggccagcagctgccgggcctgtgccctgggcagcgagcagagcggcagcagctgtgtgccctgccccccaggccactacatcgagaaggagaccaaccagtgcaaggagtgccccccagacacctacctgagcatccaccaggtgtatggcaaggaggcctgcatcccctgtggccctggcagcaagaacaaccaggaccacagcgtgtgctacagcgactgcttcttctaccacgagaaggagaaccagagcctgcactatgacttcagcaacctgagctctgtgggcagcctgatgaatggccccagcttcaccagcaagggcaccaagtacttccacttcttcaacatcagcctgtgtggccacgagggcaagaagatggccctgtgcaccaacaacatcacagacttcaccgtgaaggagatcgtggccggcagtgatgactacaccaacctggtgggcgcctttgtgtgccagagcaccatcatccccagcgagagcaagggcttccgggccgccctgagcagccagagcatcatcctggccgacaccttcatcggcgtgacagtggagaccaccctgaagaacatcaacatcaaggaggacatgtttcctgtgcccaccagccagatcccagatgtgcacttcttctacaagagcagcacagccaccaccagctgcatcaatggccgcagcacagctgtgaagatgcgctgcaaccccaccaagagcggggccggggtcatctctgtgcccagcaagtgcccagctggcacctgtgatggctgcaccttctacttcctgtgggagagcgctgaggcctgccccctgtgcacagaacatgacttccacgagattgagggcgcctgcaagaggggcttccaggagaccctgtatgtgtggaatgagcccaagtggtgcatcaagggcatcagcctgcctgagaagaagctggccacctgtgaaacagtggacttctggctgaaggtgggcgctggggtgggcgccttcaccgctgtgctgctggtggccctgacctgctacttctggaagaagaaccagaagctggagtacaagtacagcaagctggtgatgaccaccaacagcaaagaatgtgagctgcctgctgctgacagctgtgccatcatggagggggaggacaatgaggaggaggtggtgtacagcaacaagcagagcctgctgggcaagctgaagagcctggccaccaaggagaaggaggaccactttgagagcgtgcagctgaagaccagccgcagccccaacatctag

SEQ ID NO: 54524 - DNA, 3090 bp, Artificial Sequence
  derived and/or modified sequence
atgctgttccgggcccggggccccgtgcggggccggggctggggccgccccgctgaagcccccaggagggggcgtagtcccccatggtctcctgcttggatatgttgttgggcactggcaggatgccaagcagcttgggcaggtgacctgcccagcagcagcagcaggcccctgcctccttgtcaggagaaggactatcactttgagtacaccgaatgcgattctagcggaagcaggtggagagtggccatccctaacagcgcagtggattgcagcggactccccgatccagtgagaggaaaagagtgcaccttctcgtgcgcttctggcgagtatctcgaaatgaaaaaccaagtttgctccaaatgtggggagggtacttacagcctgggttcaggtatcaagttcgatgaatgggatgaactgcccgccgggtttagcaatatcgctacattcatggataccgtcgtgggcccttcggattcccggcctgatggctgtaataatagctcttggatcccacggggtaattacatcgaatccaaccgagacgactgcaccgtttccctgatctatgccgttcacctgaagaagtccgggtatgtgttcttcgagtatcaatacgtggataacaacatattctttgaattttttattcaaaacgaccaatgccaagagatggacacgaccaccgataagtgggtgaagctgactgataacggggagtggggctcacactccgtgatgctgaaaagcgggacaaatatcctctactggaggacaacggggatcctcatgggcagtaaagccgttaagccagtcctcgtgaaaaacataaccatagaaggcgtcgcttatacgagcgaatgtttcccatgtaaacccggaaccttctccaacaaaccaggttcatttaactgtcaggtctgcccacgcaacacttatagtgaaaaaggagccaaggaatgcatccggtgtaaggacgacagccagttttcagaagaggggtcatctgaatgcactgagcgccccccttgtaccactaaggactacttccaaatacacaccccatgcgatgaggaaggcaaaacccagattatgtacaaatggatagagcctaaaatctgccgcgaggaccttacagacgcgattcgcctgccgccgagtggtgagaaaaaggattgccctccatgtaaccctggcttttacaataatggctcgagctcatgccacccctgcccccccggcacgtttagcgatggaaccaaagaatgccggccttgcccagctgggaccgagccagctctcggcttcgaatataaatggtggaacgtgctcccgggaaacatgaaaactagctgtttcaatgttggtaactccaagtgcgacggaatgaatggctgggaggtggccggagatcacattcagagcggtgcgggaggctcggataacgattacttaattctaaacctgcatataccggggttcaaaccacctacatccatgaccggcgcaactggtagcgagctggggcggatcacattcgtgttcgaaacactctgttctgctgactgtgttctttactttatggtggatatcaaccggaagagcactaacgtcgtggagtcatggggtggaacaaaggagaaacaggcttacacacatattatttttaagaatgccacgttcaccttcacgtgggctttccagagaacgaatcaggggcaggataatagaagattcatcaatgatatggtgaaaatttactctatcactgccacaaatgccgtggatggcgtggccagctcgtgcagagcttgtgcccttggctccgagcagagcggctcatcatgtgtgccttgtccaccaggccactatatcgagaaggagaccaatcagtgcaaagaatgcccacctgacacatatctcagcattcatcaggtctacggaaaggaagcttgtatcccctgcggaccagggagtaagaacaatcaggaccactccgtctgctacagtgattgcttcttctaccacgagaaggagaatcagtccctccattacgatttttcaaacttgagcagcgttggcagcctaatgaatggtccatctttcacatccaagggtacaaagtactttcatttctttaacatctctctgtgtggacatgagggaaaaaagatggccctctgcaccaataacatcaccgatttcaccgtgaaagaaattgtcgcaggcagcgacgattataccaatctggtgggcgcatttgtatgtcagtcaacaatcatcccttccgagtccaagggatttcgggctgccttgtcatcacagagcattatcctggccgacacattcattggagtgacggtggagactaccttgaaaaacatcaacattaaggaagatatgtttccagtgccgacatcccagatcccagatgtacattttttttacaaaagctccaccgccacaaccagctgtatcaacggacggtcaacagccgtcaagatgagatgcaaccctaccaagtcaggggcaggagttattagcgttccctcaaagtgtcctgcggggacatgcgatggctgcaccttctactttctctgggagagtgctgaggcctgtcccttatgcactgagcacgactttcacgagattgagggagcttgcaagagaggatttcaggagactctctacgtttggaatgaacctaaatggtgtatcaaagggattagtctgcccgaaaagaagttggccacgtgcgaaaccgtggatttttggctgaaggtaggggctggcgtaggcgcttttaccgctgtcttgcttgtggctttaacctgctacttctggaaaaagaaccagaaactcgaatataaatatagcaagcttgtgatgaccaccaacagcaaagaatgtgagctgcccgccgccgattcttgcgccataatggagggcgaggacaatgaggaggaggtggtgtacagcaataaacagtcccttctcggaaagctaaaatcccttgccaccaaggaaaaagaagaccattttgagagcgtgcagctgaagacgtcaaggagccctaacatttag

SEQ ID NO: 54525 - DNA, 3090 bp, Artificial Sequence
  derived and/or modified sequence
atgctgttcagagccaggggcccagtcaggggaaggggctggggacgtcccgctgaggcgccaaggagaggacggtcacctccctggagtccggcttggatatgctgctgggctttagccggatgccaggcagcctgggccggagatctcccctctagttccagcagacccctgcccccttgtcaagagaaagactaccactttgaatacaccgagtgcgattcctctggaagtcgctggcgggtcgccatcccaaacagcgccgtggactgttctggcctgccggacccagtgcggggaaaggagtgcaccttctcttgtgcctctggtgaatatctggagatgaaaaaccaggtgtgctccaaatgcggtgagggaacgtattcgttaggttccggcattaagtttgacgagtgggacgaactgccggctggcttcagtaatatcgcgacctttatggacacagtggtgggcccaagcgattcacgccctgatgggtgtaataactccagttggatacctcgagggaattatatcgaatctaatcgagacgactgcactgttagcctgatctacgcagtacacctgaaaaaatctggctatgtgtttttcgagtaccagtacgtagataacaatattttctttgaattcttcatccagaacgatcagtgccaggagatggacacgacaacagacaagtgggtgaagttaacggataacggcgaatggggctcacactctgtaatgctcaagtcaggtacaaatattttgtactggagaaccaccggtattttgatgggaagcaaggctgtgaagccagttctggtgaagaatatcactatcgagggcgttgcatacacatccgagtgtttcccatgtaaaccgggaacattttcaaacaagcctggttcgtttaattgccaggtgtgtcctcgaaatacctactcagaaaagggtgcaaaggaatgtattcgctgtaaggatgatagtcagttctccgaagaggggtccagcgaatgcactgagcgtcccccttgtactactaaggattatttccagattcacacaccctgtgatgaagaagggaagacccagatcatgtacaagtggatcgaaccgaagatttgccgtgaggatctaaccgacgcaatcagactccctcccagcggtgagaaaaaagattgtccaccatgtaatcctggcttttacaacaacgggagttccagttgtcatccctgccctcccggaactttttccgacggaacaaaagaatgccgaccttgccccgcaggtacggagccagcccttggattcgaatataagtggtggaacgttctgcctggcaacatgaagaccagttgcttcaatgtcggcaactctaaatgcgatggaatgaacgggtgggaagtagcaggtgaccacatccagtctggtgccggaggctccgataatgattatttaattcttaacttgcacatccctggctttaagcccccaacctcaatgacgggtgctacaggatccgagctcggcagaatcacttttgtctttgaaacgctctgctccgcagactgcgtcctatactttatggttgatatcaaccggaagtctacaaacgtcgtggaatcctggggcggaaccaaggagaagcaagcatatacgcacataattttcaaaaatgcgacgtttacatttacctgggcatttcagcgaacaaaccaaggacaggataatcgcagattcatcaacgatatggtgaagatttactcgatcaccgctaccaacgcagtggatggagtagcatctagctgccgcgcatgtgctctcgggagtgaacagagtggatctagttgcgtgccatgccctcccggacactacatagaaaaggaaaccaaccagtgcaaagagtgtcccccagacacttatctttccatccatcaggtgtatggtaaggaagcctgcatcccatgcggaccaggcagtaagaacaaccaggatcattcggtttgctactctgattgttttttctaccacgagaaagagaatcagagtctccattacgatttctctaacctgtcctcagttggatccttgatgaatggaccaagcttcacctccaagggcacgaagtattttcactttttcaatatcagtctctgtggccacgagggtaagaaaatggcactgtgcaccaataacatcaccgactttactgtgaaggaaatagtagcgggttctgatgactacacaaacctggtgggggcttttgtgtgccagagcacaatcataccctccgagtccaaggggttcagagccgctcttagctctcagagcattattctggctgatacgttcataggtgtcacagtcgagactactctcaagaatattaatattaaggaggacatgtttcctgttccgacgagtcaaattcctgacgtacattttttttacaaatctagcacagctacaacatcctgcatcaatgggaggtctacagcagtcaaaatgaggtgtaaccccaccaagtcgggggctggggtcatttccgtaccttctaagtgtcccgcaggcacctgtgatgggtgtaccttctactttctgtgggagtctgctgaagcttgtccactttgtacagagcacgattttcacgagatcgagggtgcttgtaagcgcggattccaggaaactttatacgtttggaacgagccaaagtggtgtatcaaaggaatctcattgcccgagaagaagctcgctacttgtgaaacagtggatttttggctgaaagtgggggctggcgttggagcatttaccgccgtgttactagtcgccctgacctgttatttctggaaaaagaatcagaagctggaatataagtattctaaactcgtgatgacaactaactctaaagaatgcgagctgcccgctgcggattcctgtgctattatggagggagaagataacgaggaggaagtagtgtacagtaataagcagtccttgttaggaaagctgaaatctctggctacaaaggaaaaagaagaccatttcgagtccgtgcagctgaaaacctcacggtctcctaatatctag

SEQ ID NO: 54526 - DNA, 6841 bp, Artificial Sequence
  derived and/or modified sequence
cgtgacgggagcatcggcgctggctgcccgggccgcgagcgcagcagagctgtcagcgggcggacgggcagcgggtgacggagcggcgagacgagcgcacagcagtcgcggcccgggagccggagctgccgccgcaccccgggaaggctgccttgccgccggcccgccgaccgcggccggacgaagatgctgttccgcgcccgggggccggtacggggcaggggctgggggcggccggcggaggctccccgccgcgggcgctcgccgccctggagccccgcctggatttgctgctgggcgctcgccggctgccaggcggcctgggctggggacctgccctcctcctccagccgcccgcttcctccttgccaggagaaagattatcactttgaatatacggaatgtgatagcagtggctccaggtggagagttgccattccaaattctgcagtggactgctctggcctgcctgacccagtgagaggcaaagaatgcactttctcctgtgcttctggagagtatctagaaatgaagaaccaggtatgcagtaagtgtggtgaaggcacctattccttgggcagtggcatcaaatttgatgaatgggatgaattgccggcaggattttctaacatcgcaacattcatggacactgtggtgggcccttctgacagcaggccagacggctgtaacaactcttcttggatccctcgtggaaactacatagaatctaatcgtgatgactgcacggtgtctttgatctatgctgtgcaccttaagaagtcaggctatgtcttctttgagtaccagtatgtcgacaacaacatcttctttgagttctttattcaaaatgatcagtgccaggagatggacaccaccactgacaagtgggtaaaacttacagacaatggagaatggggctctcattctgtaatgctgaaatcaggcacaaacatactctactggagaactacaggcatccttatgggttctaaggcggtcaagcctgtgctggtaaaaaatatcacaattgaaggggtggcgtacacatcagaatgttttccttgcaagccaggcacattcagcaacaaaccaggttcattcaactgccaggtgtgtcccagaaacacctattctgagaaaggagccaaagaatgtataaggtgtaaagacgactctcaattttcagaggaaggatccagtgagtgtacagagcgccctccctgtaccacaaaagactatttccagatccatactccatgtgatgaagaaggaaagacacagataatgtacaagtggatagagcccaaaatctgccgggaggatctcacagatgctattagattgcccccttctggagagaagaaggattgtccgccttgcaaccctggattttataacaatggatcatcttcttgccatccctgtcctcctggaacattttcagatggaaccaaagaatgtagaccatgtccagcaggaacggagcctgcacttggctttgaatataaatggtggaatgtccttcctggcaacatgaaaacttcctgcttcaatgttgggaattcaaagtgcgatggaatgaatggttgggaggtggctggagatcatatccagagtggggctggaggttctgacaatgattacctgatcttaaacttgcatatcccaggatttaaaccaccaacatctatgactggagccacgggttctgaactaggaagaataacatttgtctttgagaccctctgttcagctgactgtgttttgtacttcatggtggatattaatagaaaaagtacaaatgtggtagaatcgtggggtggaaccaaagaaaaacaagcttacacccatatcatcttcaagaatgcaacttttacatttacatgggcattccagagaactaatcagggtcaagataatagacggttcatcaatgacatggtgaagatttattctatcacagccactaatgcagttgatggggtggcgtcctcatgccgtgcctgtgccctcggttctgaacagtcgggttcatcgtgtgtcccctgccctccaggccactacattgagaaagaaaccaaccagtgcaaggaatgtccacctgacacctacctgtccatacatcaggtctatggcaaagaggcttgtattccatgcgggcctgggagtaaaaacaatcaggaccattcggtttgctatagtgactgctttttctaccatgaaaaagaaaatcagagtttgcactatgactttagcaacctcagcagtgtgggctcattaatgaatggccccagcttcacctccaaaggaacaaaatacttccatttcttcaatatcagtttatgtgggcatgaggggaagaagatggctctctgtaccaacaatataacagactttacagtaaaagaaatagtggcagggtcagatgattacacaaatttggtaggggcatttgtatgccagtcaacaattattccttctgaaagtaagggtttccgagcagccttatcatcacaatccatcattctggcagatacattcataggagtcacagttgaaaccacattgaaaaatattaatataaaagaagatatgttcccagttccaacaagccaaataccagatgtgcatttcttttataagtcttctacagcaacaacatcttgtattaatggccgatcaactgctgtgaaaatgaggtgtaatcctactaaatctggagcaggagtgatttcagtccccagcaagtgcccagcaggtacctgtgatgggtgtacgttctatttcctgtgggagagtgctgaagcttgccctctgtgtacggagcatgacttccatgagattgagggagcctgcaagagaggatttcaggaaaccttgtatgtgtggaatgaacctaaatggtgcattaaaggaatttctttgcctgagaaaaagttggcaacctgtgaaacggttgacttttggctgaaggtgggagccggtgtgggagcttttactgccgttttgctggtggctctgacctgctacttctggaaaaagaatcaaaaactggaatacaaatattccaagttagtaatgacgactaactcaaaagagtgtgaactcccggctgcagacagttgtgctatcatggaaggagaagataatgaagaggaagttgtatattccaataaacagtcactactaggaaaactcaaatctttggcaaccaaggaaaaagaagaccattttgaatctgttcaactgaaaacctcaagatccccaaatatatgaagagacagtgctgtagccttgagactaatgaacaaagaaacctgctctagttttacaggaccatattttagggtctgtcctcatacctgtcacattggtgatctcacagaggagggccatgccgctgaaaagggaaggagattgaaacatttgattgccttatcacatggtcaagtaccttgccaaataaaggaaagcaaatgatttgggtctcaactgaagatgaagctcaactcaggaagagatttatctgtatatacacataactgaaaaccaagtttaagcccaccaatgcactgctgatgcatgccatataattaatgggtaacttttattctttatgatgtctacataacaagtgtgatttggaaggcacatgtgagcatatgcattatgatccaatttatgttttttctttgtttatattttggggaaaattaaaatttttttaaggtatatttttcccattatttattttcctgaccttaaaacagcttttctactaaaaaatggtgagcaatgaagacaataaatttttcatttttccataggttatcttctcttgatttaaatttcaggaagagttagcatgtgcttgggttatctagatttataattgcctttgaaattccatcctcgttggagctggtaagaagggcttgactgaaagtttgaaggaatctaaaaaacaaaaaagtaagaaaggtaacgagaagccctaattctccattaatgcaaactagctgctagtatcatagaagtcaaatgacttaaaacagtttatgtagtgctagaagtataattaaagtaaataggaaagcttgtcaatcaaatcactggcaaaatcatgaagaagagagtgagaaggtttgtctataagtacagatgactgtatgaaatactggggtaatttcatggtctccagaaaatgtcagtgggacttttgttctttgtcaagcaccagaggttatatggttatttttctgctgcaagactttgaggatgttgactttctcagaaactttttaaaaaaataatccaataaggcaggaattcagttttgaaaaattacatataattgtattcataataagaatgtggttatttcataagcagttatgaaagaattattgttcttattcaaaagtgatccagataattgtgatattttctatggtgggctactggtattagcacgacttggatattatttgttgaaggaagtatgaatgaagttggatttgaccaatttcgtgtaaaccttaattgatttaaaactgggaaagaggggggtttcctggccattgctgatctaaggtgctcttatttgtttccaataaacagtaatctttatagaccttaatgcagatttaaaaaaatagttgtgattggctgagagaggcagggcatatatgtagggaaatgatttgccccaagcattccaatgaagtatgacttgtaacttttgtgtctgaaggtggtgtctttatttttgtggaaaatgggagaaaaatgaataattgtgtttatttggctgattggtaatacactagaccattctgttattattgaatgaatgttttgtgtatatctctgctgttgcacatatgagtataggtgaggttgtcattgtttgctctgggattcagggagggagtcactttgcataaacctttttttgcatttaatttcttgaatgttcttataaagaagacattatgttggcattcttcatttttatcctgccaacagagtgcttatgagcatgtctgcattttgatcaaaatttaaacagaagagtgaaaatacatttgaaatgaaccctttcagaggaaccctggcaaagctgtatagactggacagagtgagaaaacttccacagccacctgtcacctttctcctcatcttccactgtgttcaatatgtatgttccaagccatagagataattgggattttctcccaggtagcttctttcttctcctgtcactggactaaaatctctgacatgtcaaaaatgccttaaattttaatgaactctccgaaaatgtagttgatattggagaatttattttatttctaattttagatattaaatatattttgtcagcacagtcccatctttgggaaggaggtgattttttcccttggattccagtggtttgtcattttatttcaagcactgaagaagtatgacagaaagaatattatggggaaaatatttagaccaatcctggctataaaatttcctttagttttatgcctggcctttgcaaagctcagtgaaatgttgaaaggaataaattaatcatgtttctgtgacttttgattgacacttgttccttttcccccctaagtggtagaagaagttatttgttatttttctaaaaggcacaattttgaagccttaactacttcattaagtcaactgttgcctataacatctcttagcactcgtcaaaacgtatttaaatcaattttccaatggatgagaacatgtcttctgtggataaattatattatgtcatttaacaacattgagcattttgatatgtgttcactgaattaaaaaacctgaatttcattattgttgacttttcccctctttagttactagtaatcacatcctttctaggattaaaaatatttcatagtatttttgtgtagatgtctgtccttattttcttcccaaagaaaaaaggttgtttaaattgattatgtggaagaattacttgggtccagtctttagcatctggggtctccaggtccccaggtgggtcatgattgactgcttcttcaagacccatcttgccaactctcacttgatgtctgtcaatagaactacttcctgtggcacatggttatttctaatgggaggctaatgtgtacataatttctctcttcctcatagaaataaatttctctgggggttgctgtgagaggatgacttcattagccatgtttaaagtgagtgtactgctcacgtttatctttgtacactaagagtatgtagagttgatcttcagagaaactaaacctccctcatatctatttatagtaatcatgaatatgattgcagttgacaggcccaactcctaaactgagtttgcccaaagaaaatgtccttagaggagtaaacttttagaaatctcaacacccgactcattcgttggaagctaaaatggaattcatcttcatactaactggctacagattattctcttgctggattttacttttattttaacatttttacatgagttccttttagaatcataaatgaaagaagtaaaactttaagatgggaatgaataattgaaaagagaattatatttactattataattgatattattcgctattatgattacacttgtctagatcagagcccagcaaacattttttttgtaaagggtcagatagtacatagttttggctttgcagggcatgtgggctctattgcatttactcaactctgccattgtagtatgaaagcaaccacatacaaaatgtaaatggatgggcgtggctgcattccaataaaactttatttatggacactgaaa

SEQ ID NO: 54527 - DNA, 3090 bp, Artificial Sequence
  derived and/or modified sequence
atgctgttcagagccagaggccccgtgagaggcagaggctggggcagacccgccgaggcccccagaagaggcagaagccccccctggagccccgcctggatctgctgctgggccctggccggctgccaggccgcctgggccggcgacctgcccagcagcagcagcagacccctgcccccctgccaggagaaggactaccacttcgagtacaccgagtgcgacagcagcggcagcagatggagagtggccatccccaacagcgccgtggactgcagcggcctgcccgaccccgtgagaggcaaggagtgcaccttcagctgcgccagcggcgagtacctggagatgaagaaccaggtgtgcagcaagtgcggcgagggcacctacagcctgggcagcggcatcaagttcgacgagtgggacgagctgcccgccggcttcagcaacatcgccaccttcatggacaccgtggtgggccccagcgacagcagacccgacggctgcaacaacagcagctggatccccagaggcaactacatcgagagcaacagagacgactgcaccgtgagcctgatctacgccgtgcacctgaagaagagcggctacgtgttcttcgagtaccagtacgtggacaacaacatcttcttcgagttcttcatccagaacgaccagtgccaggagatggacaccaccaccgacaagtgggtgaagctgaccgacaacggcgagtggggcagccacagcgtgatgctgaagagcggcaccaacatcctgtactggagaaccaccggcatcctgatgggcagcaaggccgtgaagcccgtgctggtgaagaacatcaccatcgagggcgtggcctacaccagcgagtgcttcccctgcaagcccggcaccttcagcaacaagcccggcagcttcaactgccaggtgtgccccagaaacacctacagcgagaagggcgccaaggagtgcatcagatgcaaggacgacagccagttcagcgaggagggcagcagcgagtgcaccgagagacccccctgcaccaccaaggactacttccagatccacaccccctgcgacgaggagggcaagacccagatcatgtacaagtggatcgagcccaagatctgcagagaggacctgaccgacgccatcagactgccccccagcggcgagaagaaggactgccccccctgcaaccccggcttctacaacaacggcagcagcagctgccacccctgcccccccggcaccttcagcgacggcaccaaggagtgcagaccctgccccgccggcaccgagcccgccctgggcttcgagtacaagtggtggaacgtgctgcccggcaacatgaagaccagctgcttcaacgtgggcaacagcaagtgcgacggcatgaacggctgggaggtggccggcgaccacatccagagcggcgccggcggcagcgacaacgactacctgatcctgaacctgcacatccccggcttcaagccccccaccagcatgaccggcgccaccggcagcgagctgggcagaatcaccttcgtgttcgagaccctgtgcagcgccgactgcgtgctgtacttcatggtggacatcaacagaaagagcaccaacgtggtggagagctggggcggcaccaaggagaagcaggcctacacccacatcatcttcaagaacgccaccttcaccttcacctgggccttccagagaaccaaccagggccaggacaacagaagattcatcaacgacatggtgaagatctacagcatcaccgccaccaacgccgtggacggcgtggccagcagctgcagagcctgcgccctgggcagcgagcagagcggcagcagctgcgtgccctgcccccccggccactacatcgagaaggagaccaaccagtgcaaggagtgcccccccgacacctacctgagcatccaccaggtgtacggcaaggaggcctgcatcccctgcggccccggcagcaagaacaaccaggaccacagcgtgtgctacagcgactgcttcttctaccacgagaaggagaaccagagcctgcactacgacttcagcaacctgagcagcgtgggcagcctgatgaacggccccagcttcaccagcaagggcaccaagtacttccacttcttcaacatcagcctgtgcggccacgagggcaagaagatggccctgtgcaccaacaacatcaccgacttcaccgtgaaggagatcgtggccggcagcgacgactacaccaacctggtgggcgccttcgtgtgccagagcaccatcatccccagcgagagcaagggcttcagagccgccctgagcagccagagcatcatcctggccgacaccttcatcggcgtgaccgtggagaccaccctgaagaacatcaacatcaaggaggacatgttccccgtgcccaccagccagatccccgacgtgcacttcttctacaagagcagcaccgccaccaccagctgcatcaacggcagaagcaccgccgtgaagatgagatgcaaccccaccaagagcggcgccggcgtgatcagcgtgcccagcaagtgccccgccggcacctgcgacggctgcaccttctacttcctgtgggagagcgccgaggcctgccccctgtgcaccgagcacgacttccacgagatcgagggcgcctgcaagagaggcttccaggagaccctgtacgtgtggaacgagcccaagtggtgcatcaagggcatcagcctgcccgagaagaagctggccacctgcgagaccgtggacttctggctgaaggtgggcgccggcgtgggcgccttcaccgccgtgctgctggtggccctgacctgctacttctggaagaagaaccagaagctggagtacaagtacagcaagctggtgatgaccaccaacagcaaggagtgcgagctgcccgccgccgacagctgcgccatcatggagggcgaggacaacgaggaggaggtggtgtacagcaacaagcagagcctgctgggcaagctgaagagcctggccaccaaggagaaggaggaccacttcgagagcgtgcagctgaagaccagcagaagccccaacatctag

SEQ ID NO: 54528 - protein, 286 aa, Artificial Sequence
  derived and/or modified sequence
MAAPEAPPLDRVFRTTWLSTECDSHPLPPSYRKFLFETQAADLAGGTTVAAGNLLNESEKDCGQDRRAPGVQPCRLVTMTSVVKTVYSLQPPSALSGGQPADTQTRATSKSLLPVRSKEVDVSKQLHSGGPENDVTKITKLRRENGQMKATDTATRRNVRKGYKPLSKQKSEEELKDKNQLLEAVNKQLHQKLTETQGELKDLTQKVELLEKFRDNCLAILESKGLDPALGSETLASRQESTTDHMDSMLLLETLQEELKLFNETAKKQMEELQIAWMNHGILHQM

SEQ ID NO: 54529 - DNA, 861 bp, Artificial Sequence
  derived and/or modified sequence
atggcagctcccgaggctccccccctggatcgagtattcagaacaacatggctgtcgacagagtgcgacagccatcccctgcccccaagttatcgtaaattcttattcgaaacacaggccgcagacctggccggaggcaccacggtagccgccggaaacctcctaaatgagtcggagaaagactgtggtcaggatcggagagcccctggagtgcagccgtgtcgccttgtcaccatgacaagcgtggtaaaaaccgtgtattcgctccagccaccttctgccctctccggcggacaacccgctgatactcagactcgcgctactagtaaatccctccttcccgtccgttctaaggaagtggacgttagcaaacaactgcactctggaggaccagagaatgacgttaccaaaatcactaagttgaggagggaaaatggacaaatgaaggccacggacacagcaacacgtcgtaacgtaagaaaaggttacaaacccctgagcaagcagaagtccgaggaagagctgaaggacaagaatcaactgttggaggcagtgaacaagcagctacatcagaaactgaccgaaacccaaggagagctaaaggacctgactcagaaggtcgagcttctcgagaagtttagagataattgtctggccatactggagagcaagggtttggacccagccttgggtagtgaaacattagcatccagacaggagagtacgactgatcacatggattccatgctattgctcgagactctgcaagaggagctcaaactttttaatgaaactgccaagaagcagatggaggaacttcagatcgcgtggatgaaccatggtattctgcatcagatgtag

SEQ ID NO: 54530 - DNA, 861 bp, Artificial Sequence
  derived and/or modified sequence
atggccgcccctgaggccccacccctggacagagtcttccgcaccacctggctgagcacagaatgtgacagccaccccctgccccccagctacaggaagttcctgtttgagacccaggccgctgacctggccggcggcaccaccgtggccgccggcaacctgctgaatgaaagtgagaaggactgtggccaggaccggcgggcccctggggtgcagccctgccgcctggtgaccatgacctctgtggtgaagacagtgtacagcctgcagcccccatctgccctgagcggcggccagcctgctgacacccagacccgggccaccagcaagagcctgctgcctgtgcgcagcaaggaggtggatgtgtccaagcagctgcacagcggcggcccagaaaatgatgtgaccaagatcaccaagctgcggcgggagaatggccagatgaaggccacagacacagccaccaggagaaatgtgaggaagggctacaagcccctgagcaagcagaagtctgaggaggagctgaaggacaagaaccagctgctggaggccgtgaacaagcagctgcaccagaagctgacagagacccagggcgagctgaaggacctgacccagaaggtggagctgctggagaagttccgggacaactgcctggccatcctggagagcaagggcctggaccctgccctgggcagcgagaccctggccagccggcaggagagcaccacagaccacatggacagcatgctgctgctggagaccctgcaggaggagctgaagctgttcaatgaaacagccaagaagcagatggaggagctgcagatcgcctggatgaaccacggcatcctgcaccagatgtag

SEQ ID NO: 54531 - DNA, 861 bp, Artificial Sequence
  derived and/or modified sequence
atggccgcccccgaggccccccccctggaccgggtgttccggaccacctggctgtcaactgagtgtgattctcatcccctaccaccctcatatagaaaattcttattcgaaacacaggcagccgacctggccggagggaccacagtagctgccggaaacttgctcaatgagagtgaaaaagactgtgggcaagacagacgagcacctggcgtccagccttgccgactggtcacaatgaccagcgtcgttaagaccgtatatagtctacagccgccttctgccctgtcaggcggccagcccgccgatacccagactcgggctacgtccaaatcacttctgccggtgagaagcaaggaggtggacgtctcaaagcaactgcactccggcggccccgaaaatgacgttaccaaaattactaagctcagaagggagaatggacagatgaaagcaacggacacagcaacacgccgcaatgtgcggaaaggctataaacctctgtccaaacaaaagtccgaggaagaactgaaggacaaaaaccaactgctggaggctgttaacaagcagctccaccagaagcttaccgagacccagggagagctcaaggatttgacacaaaaagtcgagttgctcgaaaagttcagagacaactgtctggctattcttgaatccaaaggactggatccagccctcggatctgagactctagcctctaggcaagaaagtacaactgaccatatggactcaatgctacttctcgagacgttacaggaagaactaaaactgttcaatgagactgccaagaagcagatggaagagctgcaaatcgcctggatgaaccacggtattttgcaccagatgtag

SEQ ID NO: 54532 - DNA, 861 bp, Artificial Sequence
  derived and/or modified sequence
atggctgcacccgaggccccaccgctcgatagggttttccggacaacttggttatcaactgagtgcgattcacatcctctgcctcccagctatcgcaaatttctctttgaaactcaagcagcagacttagccggaggcaccacagtggcagccggtaatctgcttaatgaatcagaaaaggattgtggacaggaccgccgtgcacctggggttcagccttgccggctggtcacaatgactagtgtggtcaaaacagtgtactctcttcagcctcctagcgccctgagtgggggtcagccagctgatactcagacccgagccacatctaagtcgctgttgcccgtacgaagcaaggaggtggacgtgtccaagcagttacacagtggtggacctgagaacgacgtgactaagatcactaaactccgtcgagagaacggccagatgaaagccactgatacggcaacgagacgcaatgtgaggaaggggtacaagccacttagtaagcagaaaagcgaagaggagttgaaagataaaaaccagctcctggaggccgtcaataagcagcttcaccagaagctcacagagacgcagggcgaactgaaagacctcacgcaaaaggttgaactgctcgagaaattccgagataattgtctggcaatactcgaatcaaaaggcctcgaccccgctcttggctctgaaacattggccagcagacaagaaagcaccactgatcatatggacagcatgctcctgcttgaaacacttcaagaagaactcaagctgttcaatgaaacagccaagaagcagatggaggagctccagatagcctggatgaaccatggcatcctgcaccaaatgtag

SEQ ID NO: 54533 - DNA, 1899 bp, Artificial Sequence
  derived and/or modified sequence
attagctccattcaagcctacaaattgcatcaccctcctcctctgcccagacctgggggctccaacacctttcgctaggtctggctctggcctctgagcgaaccttccgtacagtatggcggctcccgaagccccgcccctggacagagttttccgtacaacatggctgtctacagagtgcgattcccacccacttccgcctagctaccggaagtttctatttgaaacccaggcggccgacttagccggtggcacgacagttgctgcagggaatcttttaaacgagagcgagaaggactgcgggcaggaccggcgggctcctggggttcagccgtgccgcctcgttacgatgaccagtgtggttaagacagtgtatagcctgcagcccccctctgcgctgagcggcggccagccggcagacacacaaactcgggccacttctaagagtctcttacctgttaggtccaaagaagtcgatgtttccaaacagcttcattcaggaggtccagagaatgatgttacaaaaatcaccaaactgagacgagagaatgggcaaatgaaagctactgacactgccaccagaaggaatgtcagaaaaggctacaaaccactgagtaagcaaaaatcagaggaagagctcaaggacaagaaccagctgttagaagccgtcaacaagcagttgcaccagaagttgactgaaactcagggagagctgaaggacctgacccagaaggtagagctgctggagaagtttcgggacaactgtttggcaattttggagagcaagggccttgatccagctttaggcagtgagaccctggcatcacgacaagaatccactactgatcacatggactctatgttgctgttagaaactttgcaagaggagctgaagctttttaacgaaacagccaaaaagcagatggaggagttacagattgcttggatgaatcatgggatattgcaccaaatgtagaggatttcatcgttccagtttagatacaggagtctagtccctctctactactagagggacaattcctaaaaccagtgcatagaaataaaatctaaaatagaagatacagtctgttgatactccagtggtcttccttagtggaataggagcataatgttctgatgtgggaattgtgtttcctgttagtcaagagttttgtgtatgtgttgttttcttttggaatgtctttccatgcaggccttaaaggtaaagctggagatgaaagaggaaagagtccgattcctagaacagcaaaccttatgtaacaatcaagtaaatgatttaacaacagcccttaaggaaatggagcagctattagaaatgtaagaagaagcaagtggccagatggctccctcttgggcataaaatctcagaggaagctacttaggacatcatcttggccatgatcttctgggactcaccatctccagaatgaaaacaatttctacagtagacttaaggacagtttatgctgaaatggcaattcctcatttaagcaagttttcccaaccttcaggttggtcagccctcctgagcctcacaggtggataattgaggcctacaagagaggggagcctaggagcttggattgaccttctagtcaaccacctgacttcagcacaccattacaatcgggagactaaaccaacaaccagaggatctaaaatgtcacattcagattttcaggaagaaaatcttcattacagtggagcacaaatgttccatacaagacatcattgaggagccatgctgtccccttctaacctgaaacacattctttcccatcctggttgggcttctgtacctccttattaatttatgaacctgaagttgcttgaagtgttttgggcttaataaatggggtgaaagtataggtagcagta

SEQ ID NO: 54534 - DNA, 861 bp, Artificial Sequence
  derived and/or modified sequence
atggccgcccccgaggccccccccctggacagagtgttcagaaccacctggctgagcaccgagtgcgacagccaccccctgccccccagctacagaaagttcctgttcgagacccaggccgccgacctggccggcggcaccaccgtggccgccggcaacctgctgaacgagagcgagaaggactgcggccaggacagaagagcccccggcgtgcagccctgcagactggtgaccatgaccagcgtggtgaagaccgtgtacagcctgcagccccccagcgccctgagcggcggccagcccgccgacacccagaccagagccaccagcaagagcctgctgcccgtgagaagcaaggaggtggacgtgagcaagcagctgcacagcggcggccccgagaacgacgtgaccaagatcaccaagctgagaagagagaacggccagatgaaggccaccgacaccgccaccagaagaaacgtgagaaagggctacaagcccctgagcaagcagaagagcgaggaggagctgaaggacaagaaccagctgctggaggccgtgaacaagcagctgcaccagaagctgaccgagacccagggcgagctgaaggacctgacccagaaggtggagctgctggagaagttcagagacaactgcctggccatcctggagagcaagggcctggaccccgccctgggcagcgagaccctggccagcagacaggagagcaccaccgaccacatggacagcatgctgctgctggagaccctgcaggaggagctgaagctgttcaacgagaccgccaagaagcagatggaggagctgcagatcgcctggatgaaccacggcatcctgcaccagatgtag

SEQ ID NO: 54535 - protein, 241 aa, Artificial Sequence
  derived and/or modified sequence
MAAPEAPPLDRVFRTTWLSTECDSHPLPPSYRKFLFETQAADLAGGTTVAAGNLLNESEKDCGQDRRAPGVQPCRLVTMTSVVKTVYSLQPPSALSGGQPADTQTRATSKSLLPVRSKEVDVSKQLHSGGPENDVTKITKLRRENGQMKATDTATRRNVRKGYKPLSKQKSEEELKDKNQLLEAVNKQLHQKLTETQGELKDLTQKVELLEKFRDNCLAILESKGLDPVAVRNFARGAEAF

SEQ ID NO: 54536 - DNA, 726 bp, Artificial Sequence
  derived and/or modified sequence
atggctgctcctgaggcccctcctctggatcgagtttttcgcaccacttggctttccacagaatgcgactctcaccccttgccccccagctatcgaaagttcctcttcgagactcaggcggctgacctcgcaggtggaacgacagtggcagccggaaatctgctcaacgagtctgagaaagattgtggccaggaccggcgcgcccccggggtgcaaccctgccggctggtcaccatgaccagcgtcgtgaaaactgtatattcattgcagccgccatcagctctttctggcggccagccggcggacacccagaccagggcaaccagcaagtccctcctacctgtgagatcgaaggaagtggacgtttcaaagcagctgcatagcggggggccggaaaatgacgttactaagatcactaaactacgcagggagaacggccaaatgaaagcaactgatactgctactcggagaaatgtcaggaaaggctacaaacccctgtccaaacaaaagtctgaagaggaactcaaggataaaaaccagttgctggaggccgtgaataaacaattgcatcagaaacttaccgaaacccagggggagctgaaggatcttacacagaaagtcgaattactggagaagttccgcgataattgtctggcgatcctggaaagtaagggtctcgatcctgtcgccgtaaggaacttcgcacgcggggcagaggcattctag

SEQ ID NO: 54537 - DNA, 726 bp, Artificial Sequence
  derived and/or modified sequence
atggccgcccctgaggccccacccctggacagagtcttccgcaccacctggctgagcacagaatgtgacagccaccccctgccccccagctacaggaagttcctgtttgagacccaggccgctgacctggccggcggcaccaccgtggccgccggcaacctgctgaatgaaagtgagaaggactgtggccaggaccggcgggcccctggggtgcagccctgccgcctggtgaccatgacctctgtggtgaagacagtgtacagcctgcagcccccatctgccctgagcggcggccagcctgctgacacccagacccgggccaccagcaagagcctgctgcctgtgcgcagcaaggaggtggatgtgtccaagcagctgcacagcggcggcccagaaaatgatgtgaccaagatcaccaagctgcggcgggagaatggccagatgaaggccacagacacagccaccaggagaaatgtgaggaagggctacaagcccctgagcaagcagaagtctgaggaggagctgaaggacaagaaccagctgctggaggccgtgaacaagcagctgcaccagaagctgacagagacccagggcgagctgaaggacctgacccagaaggtggagctgctggagaagttccgggacaactgcctggccatcctggagagcaagggcctggaccctgtggccgtgaggaactttgcccggggagctgaggccttctag

SEQ ID NO: 54538 - DNA, 726 bp, Artificial Sequence
  derived and/or modified sequence
atggccgcccccgaggccccccccctggaccgggtgttccggaccacttggctgagcactgaatgcgacagccacccgctgcctccaagctacaggaagtttctattcgagacacaagcagccgacctggcgggaggaacaacagtggccgccggaaacttgctgaacgagtccgagaaagactgcgggcaggacaggagagctcccggagtccagccttgcaggttagttacaatgactagtgttgtgaaaaccgtctacagccttcagcctccctccgccttgagtggcgggcagcctgcggatacccagacccgagctacctccaagagcctcctgccagtccggagcaaagaagttgacgtctcaaagcagttacactccggtggaccagaaaacgacgtcactaagataacaaaactgcggagggaaaacggccagatgaaagcgactgatactgcaactagaagaaacgtgcgaaaagggtacaagccactctccaaacagaaaagtgaggaagaacttaaagacaaaaaccagctcctggaggccgtgaataagcaactacatcagaaattgacagagacacaaggggaactaaaagatctaactcagaaagtggaacttcttgaaaaattcagagataattgtttggccattctcgaaagcaagggactggacccagttgcagtccgaaactttgcccgaggcgctgaagccttttag

SEQ ID NO: 54539 - DNA, 726 bp, Artificial Sequence
  derived and/or modified sequence
atggccgctcctgaagctccccctctagatcgggtgtttagaacaacctggctaagtacagaatgtgacagccacccactcccccctagttatcgcaagttcctgtttgagacacaggcagctgacttagcagggggtaccaccgttgccgctgggaacctactgaatgaatctgaaaaagactgcgggcaggataggagggctcccggtgtgcagccctgccgactcgtaaccatgaccagcgttgtgaaaactgtctactctctgcaaccccctagtgctctatctgggggtcaacccgctgacacccaaactcgtgcaaccagtaagagcctgctgcctgtgagatctaaggaggtcgacgtcagcaaacaattgcattcagggggacctgagaacgatgtgactaagattaccaaactccgccgagaaaacggccagatgaaagcgacggatactgccacaagacggaatgtccgcaagggctacaaacccctttctaaacagaagtccgaagaagagctgaaagataaaaatcagctgctcgaggcagtgaacaaacaactccaccagaaattaacggaaacgcagggagagctgaaggatctgacacaaaaggtggaactgctagaaaaattccgggataattgtcttgccattctggagagcaaagggctcgatccagtggccgtacgcaacttcgctcggggagcggaagcgttttag

SEQ ID NO: 54540 - DNA, 1464 bp, Artificial Sequence
  derived and/or modified sequence
atggcggctcccgaagccccgcccctggacagagttttccgtacaacatggctgtctacagagtgcgattcccacccacttccgcctagctaccggaagtttctatttgaaacccaggcggccgacttagccggtggcacgacagttgctgcagggaatcttttaaacgagagcgagaaggactgcgggcaggaccggcgggctcctggggttcagccgtgccgcctcgttacgatgaccagtgtggttaagacagtgtatagcctgcagcccccctctgcgctgagcggcggccagccggcagacacacaaactcgggccacttctaagagtctcttacctgttaggtccaaagaagtcgatgtttccaaacagcttcattcaggaggtccagagaatgatgttacaaaaatcaccaaactgagacgagagaatgggcaaatgaaagctactgacactgccaccagaaggaatgtcagaaaaggctacaaaccactgagtaagcaaaaatcagaggaagagctcaaggacaagaaccagctgttagaagccgtcaacaagcagttgcaccagaagttgactgaaactcagggagagctgaaggacctgacccagaaggtagagctgctggagaagtttcgggacaactgtttggcaattttggagagcaagggccttgatccagttgctgttagaaactttgcaagaggagctgaagctttttaacgaaacagccaaaaagcagatggaggagttacaggccttaaaggtaaagctggagatgaaagaggaaagagtccgattcctagaacagcaaaccttatgtaacaatcaagtaaatgatttaacaacagcccttaaggaaatggagcagctattagaaatgtaagaagaagcaagtggccagatggctccctcttgggcataaaatctcagaggaagctacttaggacatcatcttggccatgatcttctgggactcaccatctccagaatgaaaacaatttctacagtagacttaaggacagtttatgctgaaatggcaattcctcatttaagcaagttttcccaaccttcaggttggtcagccctcctgagcctcacaggtggataattgaggcctacaagagaggggagcctaggagcttggattgaccttctagtcaaccacctgacttcagcacaccattacaatcgggagactaaaccaacaaccagaggatctaaaatgtcacattcagattttcaggaagaaaatcttcattacagtggagcacaaatgttccatacaagacatcattgaggagccatgctgtccccttctaacctgaaacacattctttcccatcctggttgggcttctgtacctccttattaatttatgaacctgaagttgcttgaagtgttttgggcttaataaatggggtgaaagtataggtagcagtaacacctacatgaaacaat

SEQ ID NO: 54541 - DNA, 726 bp, Artificial Sequence
  derived and/or modified sequence
atggccgcccccgaggccccccccctggacagagtgttcagaaccacctggctgagcaccgagtgcgacagccaccccctgccccccagctacagaaagttcctgttcgagacccaggccgccgacctggccggcggcaccaccgtggccgccggcaacctgctgaacgagagcgagaaggactgcggccaggacagaagagcccccggcgtgcagccctgcagactggtgaccatgaccagcgtggtgaagaccgtgtacagcctgcagccccccagcgccctgagcggcggccagcccgccgacacccagaccagagccaccagcaagagcctgctgcccgtgagaagcaaggaggtggacgtgagcaagcagctgcacagcggcggccccgagaacgacgtgaccaagatcaccaagctgagaagagagaacggccagatgaaggccaccgacaccgccaccagaagaaacgtgagaaagggctacaagcccctgagcaagcagaagagcgaggaggagctgaaggacaagaaccagctgctggaggccgtgaacaagcagctgcaccagaagctgaccgagacccagggcgagctgaaggacctgacccagaaggtggagctgctggagaagttcagagacaactgcctggccatcctggagagcaagggcctggaccccgtggccgtgagaaacttcgccagaggcgccgaggccttctag

SEQ ID NO: 54542 - protein, 1962 aa, Artificial Sequence
  derived and/or modified sequence
MFRQFYLWTCLASGIILGSLFEICLGQYDDAYSYEDCKLARGGPPATIVAIDEESRNGTILVDNMLIKGTAGGPDPTIELSLKDNVDYWVLMDPVKQMLFLNSTGRVLDRDPPMNIHSIVVQVQCINKKVGTIIYHEVRIVVRDRNDNSPTFKHESYYATVNELTPVGTTIFTGFSGDNGATDIDDGPNGQIEYVIQYNPDDPTSNDTFEIPLMLTGNIVLRKRLNYEDKTRYFVIIQANDRAQNLNERRTTTTTLTVDVLDGDDLGPMFLPCVLVPNTRDCRPLTYQAAIPELRTPEELNPIIVTPPIQAIDQDRNIQPPSDRPGILYSILVGTPEDYPRFFHMHPRTAELSLLEPVNRDFHQKFDLVIKAEQDNGHPLPAFAGLHIEILDENNQSPYFTMPSYQGYILESAPVGATISDSLNLTSPLRIVALDKDIEDTKDPELHLFLNDYTSVFTVTQTGITRYLTLLQPVDREEQQTYTFSITAFDGVQESEPVIVNIQVMDANDNTPTFPEISYDVYVYTDMRPGDSVIQLTAVDADEGSNGEITYEILVGAQGDFIINKTTGLITIAPGVEMIVGRTYALTVQAADNAPPAERRNSICTVYIEVLPPNNQSPPRFPQLMYSLEISEAMRVGAVLLNLQATDREGDSITYAIENGDPQRVFNLSETTGILTLGKALDRESTDRYILIITASDGRPDGTSTATVNIVVTDVNDNAPVFDPYLPRNLSVVEEEANAFVGQVKATDPDAGINGQVHYSLGNFNNLFRITSNGSIYTAVKLNREVRDYYELVVVATDGAVHPRHSTLTLAIKVLDIDDNSPVFTNSTYTVLVEENLPAGTTILQIEAKDVDLGANVSYRIRSPEVKHFFALHPFTGELSLLRSLDYEAFPDQEASITFLVEAFDIYGTMPPGIATVTVIVKDMNDYPPVFSKRIYKGMVAPDAVKGTPITTVYAEDADPPGLPASRVRYRVDDVQFPYPASIFEVEEDSGRVITRVNLNEEPTTIFKLVVVAFDDGEPVMSSSATVKILVLHPGEIPRFTQEEYRPPPVSELATKGTMVGVISAAAINQSIVYSIVSGNEEDTFGINNITGVIYVNGPLDYETRTSYVLRVQADSLEVVLANLRVPSKSNTAKVYIEIQDENNHPPVFQKKFYIGGVSEDARMFTSVLRVKATDKDTGNYSVMAYRLIIPPIKEGKEGFVVETYTGLIKTAMLFHNMRRSYFKFQVIATDDYGKGLSGKADVLVSVVNQLDMQVIVSNVPPTLVEKKIEDLTEILDRYVQEQIPGAKVVVESIGARRHGDAFSLEDYTKCDLTVYAIDPQTNRAIDRNELFKFLDGKLLDINKDFQPYYGEGGRILEIRTPEAVTSIKKRGESLGYTEGALLALAFIIILCCIPAILVVLVSYRHFKRRQAECTKTARIQAALPAAKPAVPAPAPVAAPPPPPPPPPGAHLYEELGDSSMKGLFLLYHFQQSRGNNSVSEDRKHQQVVMPFSSNTIEAHKSAHVDGSLKSNKLKSARKFTFLSDEDDLSAHNPLYKENISQVSTNSDISQRTDFVDPFSPKIQAKSKSLRGPREKIQRLWSQSVSLPRRLMRKVPNRPEIIDLQQWQGTRQKAENENTGICTNKRGSSNPLLTTEEANLTEKEEIRQGETLMIEGTEQLKSLSSDSSFCFPRPHFSFSTLPTVSRTVELKSEPNVISSPAECSLELSPSRPCVLHSSLSRRETPICMLPIETERNIFENFAHPPNISPSACPLPPPPPISPPSPPPAPAPLAPPPDISPFSLFCPPPSPPSIPLPLPPPTFFPLSVSTSGPPTPPLLPPFPTPLPPPPPSIPCPPPPSASFLSTECVCITGVKCTTNLMPAEKIKSSMTQLSTTTVCKTDPQREPKGILRHVKNLAELEKSVANMYSQIEKNYLRTNVSELQTMCPSEVTNMEITSEQNKGSLNNIVEGTEKQSHSQSTSL

SEQ ID NO: 54543 - DNA, 5889 bp, Artificial Sequence
  derived and/or modified sequence
atgttcaggcagttctacctgtggacttgccttgccagcggaattattctggggtctctgttcgagatatgcctcggccagtatgatgacgcatactcttatgaagactgtaaactggctagaggagggcctcctgctacaatcgtcgccatcgacgaagagagtcgcaacggcaccatactagttgacaatatgttgattaaaggtacagccggtgggcccgatcccactatcgagctgtctctcaaagacaatgtggattactgggttctgatggatcctgtgaaacagatgctctttctgaatagtactggacgtgtgttagacagggatccgcctatgaatattcattccatcgttgtgcaggtgcaatgcatcaacaaaaaagttggcactattatttaccacgaagtgcgaattgtcgttcgggacaggaatgataatagccctacctttaagcacgaatcttattacgccacagtgaacgaattaacgccagttggcacgaccatttttactggcttttcaggggacaacggtgccacagatatagacgatggccctaacggacaaattgaatacgtgatccagtacaaccctgacgatccaacatcaaatgatacttttgagatccctttaatgctgactggaaatatcgttctccgcaaacgcctgaattatgaggacaagactaggtacttcgttattattcaagctaatgatagagcccagaacctcaacgaacggcggactaccactaccacactaactgtggatgttctggatggcgacgatctgggccccatgtttctgccctgcgtgctggtcccaaataccagagattgccgcccgctgacatatcaggctgcaatccccgagctgcggacccccgaagagctgaacccgattatcgttactccccctattcaagcaattgatcaggaccgcaacatccagcctcccagcgaccgaccaggaatactgtactctatacttgtcggcacccccgaagattacccccgctttttccatatgcatcccaggacagctgaactgagcctgctggaaccggtcaatcgagacttccaccaaaaattcgatttggtgattaaagccgagcaggacaacggacatccactccctgcgttcgctgggttgcatatagaaattcttgatgaaaataaccaaagtccatatttcacaatgcccagttaccagggctatatccttgagagtgctcccgtcggcgccacaatctctgactccctaaaccttacctcaccactcaggatagtggctctggataaggacatagaggacacgaaggacccagagctgcacctttttcttaatgattacacctctgtgtttaccgtcacccagaccggcatcacaagatacctgacgttgctgcaacccgtcgaccgtgaggaacagcagacatacacttttagcattactgcatttgatggcgtgcaggagtctgagcccgttatagtgaatatccaagtgatggatgccaacgataacacgcccacattccccgagatatcctacgatgtgtatgtgtataccgatatgaggccaggagattccgttattcaactgacagcagtggacgctgatgaggggagcaatggtgagatcacttacgagattctagtcggcgcccaaggagactttattataaacaagaccaccggtctgattacgattgctcccggggtcgagatgattgtggggcgcacttacgcccttaccgttcaagcggcggataacgccccaccagccgaaagacggaacagtatttgtaccgtgtacattgaagtgttacctccaaacaaccagtctcccccccgcttcccccagttgatgtacagtctggaaatcagtgaggccatgagagtcggcgcagtacttctgaatctgcaggcaactgacagagaaggcgactccattacctacgctatcgagaatggcgatcctcagagggtattcaacttatcagaaacaacgggcatccttaccctgggtaaggcgctcgaccgggagtcgacagatagatatatcctgataataactgcctctgacgggcgccctgacggaacgagcacagcaaccgttaacattgtggtcacggacgtcaacgacaacgcccctgtgttcgatccgtatctgccccggaatctgtcagtagtggaagaagaagctaacgcctttgttggccaggtgaaggcgactgaccccgatgccggaattaacggacaggtccactactcactgggtaatttcaacaatctcttccgcatcacgagcaacggctccatttacacagcagtgaaactgaaccgagaagtgagagattactacgaattggttgtggtcgccaccgatggagcggtgcatcccaggcactctaccctcacacttgccatcaaagtgctggatattgacgataattctcccgtttttacgaacagcacctatacagtgctggtggaagagaatctgcccgctggaacaactatcctgcagattgaagcaaaggacgtggacctgggcgctaacgtcagttaccgtatcagatctcccgaagttaaacacttcttcgcattacaccccttcacaggggagctgagtctgctgcgtagtctggattatgaggccttcccagatcaagaagccagcatcacctttctggtggaggccttcgatatttatggaacgatgccaccaggcatcgcgacagtaactgttattgtgaaagatatgaatgactatcctccagtgttttcaaagaggatatacaaaggaatggtcgctcctgatgctgtgaagggtaccccaataaccaccgtttacgccgaggacgccgaccctccgggccttccagcatcaagagtgcgatacagggtcgacgacgtgcaattcccttaccctgcctctatttttgaagtggaggaggacagcggtagagtgatcacaagagtgaatcttaacgaggagcctacaaccattttcaagctagttgtggtagctttcgacgatggtgaacctgtgatgtcctcttccgccaccgttaaaatcctggtgctgcaccctggcgaaattcccagatttacccaagaggagtacagacctccacccgtgtccgagttagccactaagggtaccatggttggtgttatctcagccgccgccatcaatcagtctatcgtgtattctattgtgtcagggaatgaagaggacactttcggcataaataatattaccggcgtgatctacgtaaatggacccctggactacgaaacccgcacaagctacgtcctgagggttcaagccgactcactcgaggtggtcctggcgaatctccgcgtaccaagtaaatccaacacagccaaggtatatattgaaattcaagacgaaaataaccatccacccgtctttcagaagaagttctatattggaggcgtgtctgaagacgctcgtatgtttacgagcgttttacgggtaaaagcaactgacaaagacaccgggaattattccgtgatggcatataggctgattatcccacccataaaggagggaaaagaggggttcgtggtggagacctacactggactgattaagaccgctatgctctttcataatatgcgacggtcatacttcaagttccaggtcatcgccacggatgattacggaaagggtctgtccggcaaggccgacgttctagtttccgtggtgaaccagctggacatgcaggtcattgttagcaatgtgcccccaactctggtggaaaagaagattgaggacctgacggagatcctggatcgctatgtgcaggagcaaattccaggcgctaaggtggtggtggaatctatcggggcacgtcgccacggagacgcgttctccctcgaggattacactaaatgcgaccttaccgtgtatgcaattgatccccagacgaatcgggccatagacagaaacgagttgttcaaatttcttgacggaaaattattagatatcaacaaggactttcagccatattatggcgaagggggtaggatcctggaaatacgcactcctgaagctgtgacatcaattaaaaagagaggagagtccctcggctataccgagggggcattgcttgctcttgcatttatcattatcttatgttgcatccccgccattctggtggtgctggttagttatagacacttcaaacgcaggcaagcggagtgcacaaaaaccgcgaggatccaggcggctctgcccgctgctaagccagcggtccctgctccggcacccgtggccgctcctccaccaccgcctccgccgcccccaggtgctcatctatacgaagaactgggagactcctctatgaaaggcctttttctgctgtaccactttcaacaatcgcgaggcaacaactcggtctcagaagacagaaaacaccaacaggttgtcatgcctttttcaagcaatacaatcgaagcccacaagtcagcccatgtggatggctccctcaagtctaacaagctcaagtctgctaggaaattcaccttcctgtctgacgaggacgacttgagtgctcacaatcccctatacaaagagaatatctcccaagtgtccacaaattccgatatctctcagcgaaccgactttgttgacccgttcagccccaagattcaggcaaaaagtaaatctcttcgcggcccaagagaaaagatccaaaggctctggtctcaatctgtgtcactgccacggcgcctgatgaggaaggtccctaacagacctgaaattatcgatttacaacagtggcagggcaccaggcagaaggcagaaaacgagaacaccggaatatgcaccaataagcgaggttctagcaaccccctgctcaccaccgaagaagccaacttgactgagaaagaagaaatacgacaaggcgaaacgctaatgattgaaggaacagaacagctaaagagtctctcaagcgattcgtccttctgttttcctcggccgcacttttcttttagcaccctccccacagtgtcaagaactgtggaattgaaaagtgagcccaatgtcataagcagtccggcagaatgcagccttgagctctcacctagtaggccttgcgtgctacactctagcctgtcccgaagagagaccccgatctgcatgttgcccatcgaaactgagcggaacattttcgaaaactttgcccatcctccaaacatctccccctcagcttgcccactgcctccccctcctccaatcagcccacccagcccccctcctgcgccagctcccctggctccgccccccgacatcagccccttcagtctgttttgtccccctccttctcctccctccatcccattgccactgccccctcctacctttttccctttgagtgtgtccacctcaggacctccaactccccccctgctaccaccatttccaacccccctgcctccccctcccccctctattccatgccccccccctccctctgcctccttcttaagcacggagtgtgtttgcatcaccggggtgaaatgtaccactaatctgatgcctgctgagaagataaagtccagtatgacacagctgtctacaacaacagtgtgcaagaccgatccgcagcgggagcccaaggggatcctgagacacgtaaaaaatcttgcggagttggagaaaagcgtcgctaacatgtacagtcaaatcgaaaagaattatctccggactaatgtttcggaattgcaaactatgtgcccgagtgaggtcacaaacatggagatcacttcagagcagaacaaaggaagcctaaacaatatcgtggaaggcaccgagaaacagtctcattcacagtccacctctctgtag

SEQ ID NO: 54544 - DNA, 5889 bp, Artificial Sequence
  derived and/or modified sequence
atgttccggcagttctacctgtggacctgcctggccagcggcatcatcctgggcagcctgtttgagatctgcctgggccagtatgatgatgcctacagctatgaggactgcaagctggcccggggcggccccccagccaccatcgtggccattgatgaggagagcagaaatggcaccatcctggtggacaacatgctgatcaagggcacagctgggggccctgaccccaccatcgagctgagcctgaaggacaacgtggactactgggtgctgatggaccctgtgaagcagatgctgttcctgaacagcacaggccgggtgctggaccgggacccccccatgaacatccacagcatcgtggtgcaggtgcagtgcatcaacaagaaggtgggcaccatcatctaccacgaggtgcgcatcgtggtgcgggacagaaatgacaacagccccaccttcaagcatgagagctactatgccaccgtgaatgagctgacccctgtgggcaccaccatcttcaccggcttcagcggggacaatggagccacagacattgatgatggccccaacggccagatcgagtatgtgatccagtacaacccagatgaccccaccagcaatgacacctttgagatccccctgatgctgaccggcaacatcgtgctgaggaagaggctgaactatgaggacaagacccgctacttcgtcatcatccaggccaatgaccgggcccagaacctgaatgaaagaaggaccaccaccaccaccctgactgtggatgtgctggatggagatgacctgggccccatgttcctgccctgtgtgctggtgcccaacacccgggactgccggcccctgacctaccaggccgccatccctgagctgcggaccccagaggagctgaaccccatcatcgtgaccccacccatccaggccatcgaccaggacaggaacatccagccccccagcgacaggcctggcatcctgtacagcatcctggtgggcaccccagaggactacccccgcttcttccacatgcaccccaggacagctgagctgagcctgctggagcctgtgaacagagacttccaccagaagtttgacctggtgatcaaggccgagcaggacaatggccaccccctgcctgcctttgctggcctgcacatcgagatcctggatgagaacaaccagagcccctacttcaccatgcccagctaccagggctacatcctggagagcgcccctgtgggcgccaccatcagtgacagcctgaacctgaccagccccctgagaattgtggccctggacaaggacatcgaggacaccaaggaccctgagctgcacctgttcctgaatgactacacctctgtgttcaccgtgacccagacaggcatcacccgctacctgaccctgctgcagcctgtggaccgggaggagcagcagacctacaccttcagcatcacagcctttgatggagtgcaggagagcgagcctgtgattgtgaacatccaggtgatggatgccaatgacaacacccccaccttccctgagatctcctatgatgtgtatgtgtacacagacatgaggcctggggacagcgtcatccagctgacagctgtggatgctgatgagggcagcaatggagagatcacctatgagatcctggtgggcgcccagggcgacttcatcatcaacaagaccaccggcctcatcaccatcgcccctggggtggagatgattgtgggccgcacctacgccctgactgtgcaggccgctgacaatgcccctcctgctgagaggaggaacagcatctgcaccgtgtacatcgaggtgctgccccccaacaaccagagccccccacgcttcccccagctgatgtacagcctggagatcagcgaggccatgagggtgggcgctgtgctgctgaacctgcaggccacagaccgggagggggacagcatcacctacgccattgaaaatggagacccccagagggtcttcaacctgtctgagaccaccggcatcctgaccctgggcaaggccctggaccgggagagcacagaccgctacatcctgatcatcacagccagtgatggccgcccagatggcaccagcacagccaccgtgaacatcgtggtgacagatgtgaatgacaatgcccctgtgtttgacccctacctgcccaggaacctgtctgtggtggaggaggaggccaatgcctttgtgggccaggtgaaggccacagatcctgatgctggcatcaatggccaggtgcactacagcctgggcaacttcaacaacctcttccgcatcaccagcaatggcagcatctacacagctgtgaagctgaaccgggaggtgcgggactactatgagctggtggtggtggccacagatggagctgtgcaccccaggcacagcaccctgaccctggccatcaaggtgctggacattgatgacaacagccctgtgttcaccaacagcacctacacagtgctggtggaggagaacctgcctgctggcaccaccatcctgcagatcgaggccaaggatgtggacctgggcgccaacgtgtcctaccgcatccgcagccctgaggtgaagcacttctttgccctgcaccccttcaccggggagctgagcctgctgcggagcctggactatgaggccttcccagaccaggaggccagcatcaccttcctggtggaggcctttgacatctacggcaccatgcctcctggcatcgccaccgtgaccgtcatcgtgaaggacatgaatgactacccacctgtgttcagcaagaggatctacaagggcatggtggccccagatgctgtgaagggcacccccatcaccaccgtgtatgcagaagatgctgaccccccaggcctgcctgccagccgggtgcgctacagagtggatgatgtgcagttcccctacccagccagcatctttgaggtggaggaggacagcggccgggtcatcaccagggtgaacctgaatgaggagcccaccaccatcttcaagctggtggtggtggcctttgatgatggagagcctgtgatgagcagcagcgccaccgtgaagatcctggtgctgcaccctggagagatcccccgcttcacccaggaggagtacagacctcctcctgtgtctgagctggccaccaagggcaccatggtgggcgtcatctctgctgctgccatcaaccagagcatcgtgtacagcatcgtgtctggaaatgaggaggacaccttcggcatcaacaacatcactggagtcatctacgtgaatggccccctggactatgagaccaggaccagctatgtgctgcgggtgcaggccgacagcctggaggtggtgctggccaacctgcgggtgcccagcaagagcaacacagccaaggtgtacatcgagatccaggatgagaacaaccacccccctgtgttccagaagaagttctacatcggcggcgtgtctgaagatgccaggatgttcacctctgtgctgcgggtgaaggccacagacaaggacaccggcaactacagcgtgatggcctaccgcctcatcatcccccccatcaaggagggcaaggagggctttgtggtggagacctacacaggcctcatcaagacagccatgctgttccacaacatgagaagaagctacttcaagttccaggtgattgccacagatgattatggcaagggcctgagcggcaaggcagatgtgctggtgtctgtggtgaaccagctggacatgcaggtgattgtgtccaatgtgccccccaccctggtggagaagaagattgaggacctgacagagatcctggacagatatgtgcaggagcagatccctggggccaaggtggtggtggagagcatcggggccaggagacatggagatgccttcagcctggaggactacaccaagtgtgacctgactgtgtatgccatcgacccccagaccaacagagccatcgacagaaatgaactcttcaagttcctggatggcaagctgctggacatcaacaaggacttccagccctactacggggagggcggccgcatcctggagatccgcaccccagaggccgtgaccagcatcaagaagagaggagagagcctgggctacacagagggcgccctgctggccctggccttcatcatcatcctgtgctgcatcccagccatcctggtggtgctggtgtcctaccgccacttcaagaggcggcaggctgaatgtaccaagacagcccgcatccaggccgccctgcctgctgccaagccagctgtgcctgccccagcccctgtggccgcccctcctcctcctcctcctcctcctcctggggcccacctgtatgaggagctgggggacagctccatgaagggcctcttcctgctgtaccacttccagcagagccggggcaacaacagcgtgtctgaggacaggaagcaccagcaggtggtgatgcccttcagcagcaacaccatcgaggcccacaagagcgcccacgtggatggcagcctgaagagcaacaagctgaagagcgccaggaagttcaccttcctgagtgatgaagatgacctgagcgcccacaaccccctgtacaaggagaacatcagccaggtgtccaccaacagcgacatcagccagaggacagactttgtggaccccttcagccccaagatccaggccaagagcaagagcctgcggggcccccgggagaagatccagaggctgtggagccagagcgtgtccctgccccggcggctgatgaggaaggtgcccaacagacctgagatcatcgacctgcagcagtggcagggcacccggcagaaggcagaaaatgaaaatacaggcatctgcaccaacaagaggggcagcagcaaccccctgctgaccacagaggaggccaacctgacagagaaggaggagatccggcagggcgagaccctgatgattgagggcacagagcagctgaagagcctgagcagtgacagcagcttctgcttcccccggccccacttctccttcagcaccctgcccaccgtgtccaggacagtggagctgaagtctgagcccaacgtcatcagcagccctgctgagtgcagcctggagctgagccccagccggccctgtgtgctgcacagcagcctgagcagaagagagacccccatctgcatgctgcccattgaaacagaaagaaacatctttgaaaattttgcccacccccccaacatcagccccagcgcctgccccctgcccccacctccacccatcagcccccccagccccccaccagccccagcccccctggcccctcctccagacatcagccccttcagcctcttctgccccccacccagcccccccagcatccccctgcccctgcccccacccaccttcttccccctgtctgtgtccaccagcggcccccccaccccacccctgctgccccccttccccacccccctgcccccacctcctccttccatcccctgccccccacctccttctgccagcttcctgagcacagaatgtgtgtgcatcactggagtgaagtgcaccaccaacctgatgcctgctgagaagatcaagagctccatgacccagctgagcaccaccaccgtgtgcaagacagacccccagcgggagcccaagggcatcctgcggcacgtgaagaacctggccgagctggagaagtctgtggccaacatgtacagccagatcgagaagaactacctgcggaccaacgtgtctgagctgcagaccatgtgccccagcgaggtgaccaacatggagatcaccagcgagcagaacaagggcagcctgaacaacatcgtggagggcacagagaagcagagccacagccagagcaccagcctgtag

SEQ ID NO: 54545 - DNA, 5889 bp, Artificial Sequence
  derived and/or modified sequence
atgttccggcagttctacctgtggacctgcctggccagcggcatcatcttaggcagtctgtttgagatttgcttaggccagtacgatgacgcatatagctacgaggattgcaagttggctcggggtggccccccagccacgatcgtagctatagacgaggagtcaagaaacggcacgatcctggtcgataatatgcttataaaggggacagctgggggaccagatcctacgatagagctgagccttaaagacaacgtagactattgggtccttatggacccagtgaagcagatgctatttttgaattccacaggccgggtgctggatcgcgacccaccaatgaacatacacagtatagtagtccaggtgcagtgcatcaacaaaaaggtcggtaccatcatctatcacgaggtgagaatcgtcgtgcgagatcggaatgataattcacccacgttcaaacacgaaagttattatgctaccgtgaacgaactgacccctgtggggaccacaatcttcacagggttctccggagataacggcgcaaccgacatcgacgatgggcccaacggacagatagagtacgttattcaatacaatcctgatgaccccactagcaacgatacatttgagatcccactaatgttaacaggaaatatcgtcttacgtaagcgcttaaactatgaagataagacaagatatttcgtgatcatccaggcgaacgatcgcgcccagaaccttaacgagcgacgaacaaccacaacaactctgactgtggatgtgttggatggagatgatctcggccctatgtttctaccttgcgtcctcgtgcccaatactcgggactgcagaccgttaacctatcaggctgctatccctgagctgcggacccctgaggagttaaatcccatcattgtcaccccccctatacaagcaatagatcaggatcgaaatattcagcctccatccgacaggcccggcattctgtacagtattctcgttggaaccccagaagactatccccgattctttcatatgcacccaagaacggcagagttatccttactggagcccgtgaatcgggatttccaccagaagttcgaccttgtgattaaggctgagcaggataatggtcaccccttgcccgcctttgcgggactacacatagaaattcttgacgaaaacaaccaatccccatacttcacaatgcccagttatcagggctatattctggaatctgctcccgtcggtgccacgatttctgactccctgaaccttactagccctctccggattgttgcgttggacaaggacattgaggataccaaggatccagagcttcatttgttcctgaacgattacactagtgtgtttacggtgactcaaacaggcatcacccggtacctgaccctgctgcagccagtcgaccgcgaagagcagcagacctacaccttcagcatcacggcttttgatggcgtgcaggagtctgagcctgtgatcgtgaacatacaggttatggatgccaacgataacacacctactttcccggaaatttcctacgatgtgtacgtctacaccgacatgcggcctggcgactccgttatacagctcactgctgtagacgcagacgaaggctccaatggtgagataacttacgagattctggttggggcacagggcgacttcataatcaataaaacaacgggcttgattactattgccccaggggtcgagatgattgttggaaggacctacgcgcttacggttcaggcggccgacaatgcccccccagccgagaggagaaactcaatctgtaccgtctatatcgaggttctgccccccaacaatcagtccccccctcggtttcctcaactgatgtactccctagagatcagtgaagctatgcgcgtgggggccgtgctgctaaacttacaagcaacagacagagaaggggattccatcacctatgctatcgagaacggcgacccccaacgcgtgttcaatctcagcgagaccacaggaatcctgacccttggcaaagccttagacagggagtctacggacaggtacatcctgattatcactgccagcgacgggcggcctgatggtacaagtacagcaaccgtcaacatcgtagttacagacgtgaatgataacgcacctgtattcgacccttacttacccagaaatctctcagtggtggaagaagaggcgaacgctttcgtcggacaggttaaggccaccgaccccgatgcgggcataaatggtcaggtccattattccctggggaatttcaacaatctctttcgcattacctcaaatgggagcatctacaccgcggtgaagttgaaccgcgaagtccgtgactattacgagcttgtggtagtggccacagatggagcggtccaccctcggcattccacacttacacttgccatcaaagtcttggacatcgacgataactcccccgtattcactaattccacatacacagtactggtagaggaaaacctaccagcgggtaccacaatcctgcagatcgaggcgaaggacgtcgatctgggcgccaacgtaagctaccgcatcaggagtcccgaggtgaagcacttcttcgctctgcacccctttaccggcgagctttccttgttaagaagccttgattacgaggcttttcctgatcaggaagcctccatcacctttctggtggaggcattcgatatttatggcacaatgcctcccggaatcgctaccgtaactgttatcgtgaaagatatgaacgactaccccccagttttctccaagcggatctacaagggcatggttgcccccgatgccgttaagggaacacccatcactaccgtgtacgcagaggacgccgatccgcctggcttacccgcatcacgagtgaggtacagagtcgacgacgtacagttcccctacccagcctcaatttttgaagtggaggaagatagcggaagagtcatcacccgcgtgaacctgaatgaggagcccactactatctttaagctggtagtcgtagccttcgatgatggagaacctgtgatgtccagctctgcaactgtaaaaattctggtgctacacccaggcgagattccaagatttactcaggaggaataccgaccgccacctgtctccgaactcgccaccaagggcactatggtgggtgttatctcggctgctgctataaatcaatccattgtttattccatcgtgagtggcaacgaggaagacacatttgggataaacaatatcacaggcgtcatttacgtaaacggtccactagactacgagacacgaacaagctacgtcctgagggtacaggccgattccctcgaggtggtgctagctaatctgcgcgtgcccagcaaaagtaacactgctaaggtgtatatagagattcaagacgaaaataaccatccacccgtgtttcaaaagaaattctatattggtggcgtgtctgaggacgcaaggatgttcacaagtgttctgcgagttaaagcgactgacaaggatacaggtaactactcagtaatggcataccggctcatcatcccacccatcaaagagggcaaagaaggattcgtggtggaaacctatactggtctgataaagaccgcaatgttgttccacaacatgcggcgttcatactttaaatttcaggtgattgccactgacgactacggcaaggggttatccggtaaagccgatgttctcgtctccgtggtgaatcagctcgacatgcaggtcatcgtgtccaacgtgcctccgacgctagtcgagaagaagattgaggatctgacggagatcttggatcgctatgtgcaggaacaaatcccaggtgccaaggtggtcgtcgaaagcatcggagcccggaggcacggtgacgcattttccctggaagactacaccaagtgcgacctgaccgtgtacgcaattgacccgcagacaaaccgagctatcgaccgaaacgagttgttcaagtttctggatggaaagcttctggacatcaacaaagacttccagccctactacggcgaaggtggaagaatcctggagatcagaacgcccgaggccgtcacatccatcaagaaacggggcgagtctctggggtatacagagggagccttgcttgcccttgcgtttatcatcatcctttgttgcatccctgccatcctggtcgtgttggtcagctaccggcacttcaagcgccgccaggcggaatgcactaagaccgctagaatccaggcagctctgcccgcagctaagcctgccgtgcctgctccagcaccagtggctgcgccacccccccccccacctcctccacctggggctcatttgtacgaggaactgggggacagctctatgaaggggctcttcctcctgtatcacttccagcaatcaagaggtaataactccgtatctgaagaccgtaagcatcagcaggttgtgatgccattttccagcaatactatcgaggcacataagtcagcccatgtcgatggttcactgaaaagtaacaagctcaaatctgccaggaagttcaccttcctctccgatgaggacgatctttctgcgcataatccattatacaaggagaacatctcccaggtatccaccaactctgacatctcccagcgaactgactttgttgaccccttctccccaaaaatccaagcgaagtccaaatcactgcgcggccctagagaaaagatccagcgactgtggtctcagagtgtttctcttccccgacgcttaatgaggaaagtacctaatcgccctgagataattgacctccaacagtggcagggcacccggcagaaggcagaaaacgagaacacagggatttgtaccaacaaacgtggaagcagtaaccctctccttaccactgaagaggccaacctgacggaaaaggaagagattcggcagggagaaacactgatgattgaaggtaccgaacagcttaagtctttgagctcagatagttcgttctgttttccacgcccgcactttagcttctctacacttcctactgtgagcagaacggttgaacttaaatctgagcctaacgtgatctcttctccagcagagtgtagcctggaactcagcccctccaggccttgcgtccttcacagtagcctatctaggagggagactcctatctgcatgttgccaattgagaccgagcggaatatcttcgagaatttcgctcatcccccgaatatctccccttccgcctgcccgcttcctcctcccccccctatctcacccccttcaccgccgcccgcccctgcacccctggctcccccaccggacatttccccattcagtttattctgtcctcccccatccccgccctcgattcccttgccattgccaccccctaccttttttcctctcagcgtgagcacgtccggacccccgacccccccgctgctgcctccttttcccacccctctgcctccaccgcctcccagtattccatgcccccccccgccctccgcgtcattcctgagcaccgaatgtgtctgtattaccggtgtaaagtgtactaccaatctcatgcccgctgagaagattaagtcctctatgactcaactcagcaccacaactgtgtgtaagactgatcctcagagagagccaaaaggcattttaaggcatgtgaagaatttagcagagctcgagaaatctgtggccaacatgtattcccagatcgaaaagaattacttgcggaccaacgtgtccgaactgcagacaatgtgtccttctgaggtgacaaatatggaaatcacttcggaacagaacaagggatccctcaataacatcgtcgaaggaaccgagaagcagtcccacagccaaagtacttccctgtag

SEQ ID NO: 54546 - DNA, 5888 bp, Artificial Sequence
  derived and/or modified sequence
atgttccgccaattttatctctggacgtgcctggcgtccggcatcatccttggatctttatttgagatttgtctcggacaatatgatgacgcatacagctacgaagactgcaagctcgctcggggaggaccaccagccaccattgtcgccattgatgaggagtcccgcaacggcacgatcctggtcgacaacatgctgatcaagggaacggctggaggccctgaccctactatcgagctgagtctcaaagataatgtggactactgggtcctgatggatccagtgaagcagatgttgttcctgaactctaccgggcgagtgttggatagagatcccccaatgaatattcattcaatagtggtccaagttcagtgcataaataagaaagtaggaactattatttatcatgaggtccggatcgttgtacgcgatagaaatgataattcgcccacattcaaacacgaaagctactacgccactgtcaatgagttgacccccgtgggtactactatttttacggggttcagcggcgacaacggagcgaccgatatcgatgatggtcccaatggccagattgaatacgtcattcagtataaccccgacgaccccaccagcaatgacaccttcgagatcccgctaatgcttactgggaacatcgttttgcgcaaacggctgaactacgaagacaaaaccaggtacttcgtaattattcaggccaatgaccgagctcagaatcttaacgagagacgtacaacgactactacactgaccgtcgacgtcctcgacggcgatgatctcggcccaatgtttttgccctgcgtgctcgtcccgaatacccgcgattgccgaccgctgacatatcaggccgcaatccctgaactcagaacacctgaagagctgaatcccattattgtcacgcccccaattcaagctatagaccaggaccgaaacatccagccgccatccgaccggcctggcatcctttactctatactcgtaggcacacctgaggattaccccaggttctttcacatgcatcccagaactgcagaactcagccttttagaacctgtgaaccgggactttcatcagaaatttgatttagtgatcaaggccgaacaagataacgggcaccccttaccagcttttgcagggctccacattgagatcctagatgagaacaatcagagcccatacttcacaatgccgagctaccaggggtatatcctggagtctgccccagtgggtgccaccatatctgactcccttaatcttactagccctctccgcatcgtggcgctcgacaaagatatcgaggatacgaaagaccccgaactacacttgttcctaaacgactacaccagcgtttttacggtgacccaaaccggtattacgaggtacctgactctcttgcagccagtggatcgcgaggagcaacagacctataccttcagcattacagcgtttgatggcgtacaggagagcgaacctgtgatagtgaacattcaggtgatggacgccaatgataatactccaacattccccgagatcagctacgatgtatacgtgtataccgacatgagacctggagatagtgtgattcagctcacagctgtagacgccgacgaaggcagtaatggagagatcacctatgagatcctagtcggcgctcagggcgatttcattatcaacaaaacaaccgggttgatcacgatcgcacctggcgttgagatgatcgtcggaaggacttatgccctcactgttcaggccgctgataatgcccctcctgcagagcgccgaaactccatctgtactgtctatattgaggttctcccaccaaataaccagtcacctcctaggtttccccagttaatgtattccctggaaattagcgaagctatgcgggtgggagccgtgctgcttaatctgcaagccactgaccgtgagggagacagcatcacttacgcaatagagaacggcgaccctcagagggtcttcaacctgtctgaaacgaccggcattctgaccctgggtaaggcacttgatagagagtccactgataggtatattctgatcatcactgcaagcgatgggcgtcctgatggaactagcaccgccactgttaatattgtggtgactgacgtcaacgacaacgccccagtctttgacccatacctgccacgcaatctgtccgtggtagaagaagaggccaacgcattcgtcggtcaggtaaaggccacagaccctgacgccggaataaacggacaggtgcactactctctgggcaatttcaataacttatttcgtatcacttccaacggatccatctacacagcagtgaagttgaatcgcgaggtcagggattattatgagctggttgttgtggcaacagacggcgcagtccatcccaggcactccacactgacactggcgattaaagtgctggacatcgatgacaatagccccgtgtttactaacagtacctacacagtgctggtggaggaaaatcttccagccggaacgacgatccttcagatagaggcgaaggatgttgacctgggggctaatgtgagctacagaatccggtcacctgaagtgaagcactttttcgcactgcacccctttaccggggagctctcactcctgcgttcccttgattatgaagctttccctgaccaagaagcaagcattacattcctcgtagaggccttcgacatctatggaaccatgccgcctggaatagccacagtcacagtgatagtcaaagatatgaatgactatccaccagtttttagcaagcgaatctataaagggatggttgctcccgacgctgttaagggcacccctataaccacagtgtacgccgaagatgctgaccctcccggattgccagcaagcagggttcgctacagagtggacgatgtccagttcccttaccctgcctctatttttgaggtcgaggaagactccggcagagtaatcacccgggtgaatttgaacgaggaacctaccaccattttcaagctggtagtggtcgcatttgacgacggagaacctgtaatgagctcaagcgctacggtgaaaatcctcgtgcttcatcccggagaaatccctaggtttacacaggaggagtaccgtccgcctcctgtctcggaattagcaaccaagggtaccatggtcggagtgattagcgcagctgcgatcaaccagagcatagtgtactctatagttagcggcaacgaagaggacacctttgggataaataatataaccggtgttatctatgtaaatggcccactggattatgaaacacgaacaagttacgttcttagagtgcaagcagatagcttagaggtggtgctagccaacctcagggtgccctcaaagagtaataccgctaaagtgtacattgagattcaggacgaaaacaaccacccccctgttttccagaaaaagttttacatcggcggtgtgtcagaggacgccagaatgtttacatctgtgctaagagtgaaggctaccgataaagacacaggcaactattctgtaatggcttataggttgatcattccaccaatcaaagaagggaaggaaggtttcgtcgtcgagacttatacaggcttaattaagacagccatgctctttcacaacatgcggcgttcctattttaaattccaggtaattgccaccgacgattacgggaaaggccttagtggaaaggctgacgttctggtgagtgttgttaaccagctggacatgcaagtcatcgtgtctaatgtgcctcctacgctcgtggagaaaaaaatagaggatctgacggagattctggacagatatgtgcaggaacagatccctggggctaaggtcgtcgtggagtctattggagcaagacgccatggggacgccttctccctggaagattacacaaaatgtgacctcaccgtatatgccattgacccacaaaccaacagggccattgacaggaatgaactgttcaaattcctcgacgggaagctgctggacataaataaggattttcaaccttactatggggagggcggtcggatccttgagatcaggaccccagaagccgtcacttctattaaaaaacggggtgagtccctggggtatacggaaggtgcgctactggctttggcattcattatcattctttgctgtatccctgctatcctggtggtcctcgttagctatcgccatttcaagcgccgacaggctgaatgcaccaagaccgctcgcattcaggcagcgttacccgctgcaaaacctgccgtgcctgccccagctccagtggcggctcctcccccacccccaccacctcccccaggagctcacctgtacgaggaactaggcgattcgagtatgaaaggcctcttccttctttatcatttccagcagtcaagaggaaacaactctgtgtccgaagaccggaagcatcagcaggtcgtcatgccatttagctccaacacaattgaagcacacaagtccgcccacgtggacggatctctgaagtcgaataagctgaagtccgcgaggaaatttacttttctctctgacgaggacgacctgtcggcccacaaccccctgtacaaggagaacatcagtcaggtgtctaccaactcagacatcagtcaacgaacggacttcgtggaccctttttcacccaaaatccaggctaaatccaaatccctgcggggtccgagggagaaaattcagcggctgtggtcccagagtgtaagccttcctagacggttgatgagaaaggttcccaaccgacccgaaataattgatctccagcagtggcaggggacccgtcagaaagccgagaacgagaacactgggatttgtaccaacaagaggggcagcagcaatccactgctaactaccgaagaggccaacctgactgagaaggaagaaattcgtcagggggaaactcttatgattgaaggaaccgaacagctgaagtccctgtcttctgatagttcattttgtttcccacgccctcacttcagctttagcacattgcctaccgtaagccggacggtggagctgaagtctgaaccaaatgtcatctcttcacctgccgagtgcagtctcgagctgagcccgtcccgcccatgcgtgttacatagtagcctgagcagacgggagacacccatatgtatgttacctatcgagaccgagaggaacattttcgagaatttcgcgcatcctcctaacattagcccgtctgcgtgcccactgccacctccccctcccatttctccaccgtctcctcccccagctccagcccctttagctccaccccctgacatttccccattctcattattttgcccccctccatctcccccttccatcccattgcctctgcctccgcctacattcttcccactttctgtgagtacatctggcccacccactccacctctgctgcctcctttccccacgccactccctccgccaccaccttcgattccctgtcctccccctccttccgcctccttcctttcaacagaatgtgtctgcatcacgggagtgaagtgcactacaaacctcatgcccgctgagaaaattaaaagcagcatgactcagctcagcacgaccaccgtctgtaaaaccgacccccagagagagcccaagggcatcctgagacatgtgaagaatctggccgaactggagaagtcggttgcaaatatgtactcccaaattgagaagaattacctgaggactaacgtgagtgagctgcagaccatgtgtcccagtgaggtcactaacatggagatcacgtcagaacaaaataaggggagcctaaataatattgttgaaggaactgaaaagcagagccactctcaaagcacttccctcta

SEQ ID NO: 54547 - DNA, 6284 bp, Artificial Sequence
  derived and/or modified sequence
caacgtgctgagctaatagcgacagatagagggcagacagattcctgctagcagcttagtgttagttgcttgtggtaactaaggcaggtggcatacatctcagaacgtggagaatgatggtatgctttctgagttaacatgttgaactgttttgcttttctaaaaattttcctagtaacattttcttgatgatatgagagtggatatcaatgcctcacagaaacaagaggtggaacatgtgaatgaatcgtcttggaactagattatgagcactggttctttttaaagggatgtgcaagaggcagccttggcaagaaaacttgctgcataatcttacatggactaaagatgaaactttaaaccgcaaatcagctttgagtgaactttgacagaagatgtttcgacagttttatctctggacatgtttagcttcagggatcatcctgggctctctctttgaaatctgcttgggccagtatgatgatgcctacagctatgaagattgcaaactagctaggggaggaccaccagctaccatagttgctattgatgaagaaagtcggaatggtacaattctggtggacaacatgctgatcaaagggactgctggaggaccagaccccaccatagaactttctttaaaggataatgtggattactgggtgttgatggatcctgttaagcaaatgcttttcctgaacagcaccggaagagttctggatagagatccaccgatgaacatacactccattgtggtgcaggtccagtgcatcaacaaaaaagtgggcactattatctaccatgaagtgcgaatagtggtgagagacaggaatgacaactcacccactttcaagcatgaaagctactatgccacagtgaatgagctcactccagttggtaccacaatattcacaggattttcaggagacaatggagctacagatatagatgatggaccaaatggacagatagagtatgttattcagtataatccagatgatccgacatccaatgacacctttgaaattcccctaatgttgactggaaatatagtgttaaggaagaggctcaactatgaagataagactcgctactttgtcataatccaagctaatgaccgtgcccaaaatctgaatgagaggcgaaccaccaccaccactctcacagtggatgttctggatggagatgacttgggtccaatgtttcttccttgtgtccttgtgccaaacactcgtgattgccgtccactcacttatcaagctgccatacctgagttgagaactccggaagaactgaaccccattattgttacgccaccaatccaagccattgatcaggaccggaatattcaaccgccatcagataggccaggaatcctctattccatccttgttgggactcctgaggattacccacgatttttccatatgcatcctaggacagcagaacttagtctcctggagccagtaaacagagactttcaccagaaatttgatttggttattaaggctgaacaagacaatggtcatcctcttcctgcctttgccggtctacacattgaaatactggatgaaaacaatcaaagtccatattttacaatgcccagttatcaaggctatatcctggaatctgccccagtgggagcaaccatttcggacagtctcaatttgacttcacctttaagaatagtagctctggacaaggacatagaagatacaaaagacccagagcttcacctttttctgaatgactacacctcagtcttcaccgtcacacagactggtattactcgctacctcaccttacttcaaccagtggacagggaagaacagcaaacttacaccttttcgataacagcatttgatggtgtacaagaaagtgagccagtcatcgtcaatattcaagtgatggatgcaaatgataacacgccaaccttccctgaaatatcctatgatgtgtatgtttatacagacatgagacctggggacagtgtcatacagctcactgcagtcgacgcagacgaagggtcaaatggggagatcacatatgaaatccttgttggggctcagggagacttcatcatcaataaaacaacagggcttatcaccatcgctccaggggtggaaatgatagtcgggcggacttacgcactcacggtccaagcagcggataatgctcctcctgcagagcgaaggaactccatctgcactgtgtatattgaagtgcttccaccaaataatcaaagccctcctcgcttcccacagctgatgtatagccttgaaattagtgaagccatgagggttggtgctgttttattaaatctacaggcaactgatcgagagggagactcaataacatatgccattgagaatggagatcctcagagagtttttaatctttcagaaaccacggggattctaaccttagggaaagcactggacagggaaagcactgatcgctacattctgatcatcacagcttcagatggcaggccagatgggacctcaactgccacagtaaacatagtggtgacagatgtcaatgacaatgctccagtgtttgatccttatctgccaagaaatttatctgtggtggaagaagaagccaatgcctttgtgggtcaagtaaaagcaacagaccctgatgctggaataaatggtcaagtgcactacagtttgggtaactttaataatctttttcgtatcacatccaatgggagcatttacacagcagtgaagcttaacagagaagtcagggactactatgaacttgttgttgtggcaacagatggagcagtacaccctcgtcattcaactctaaccttggccatcaaggttttggacattgatgataacagtcctgtgttcaccaattcaacatacactgtccttgttgaagagaatttgccagctgggactaccatccttcaaatagaggccaaagatgtcgaccttggagcaaatgtgtcttaccggataagaagcccagaagtgaagcacttttttgcactacatccatttacaggagaactatcgcttttaaggagtttagattatgaggcatttccagaccaagaagcaagtatcacttttctggtagaggcctttgatatttatggaacaatgccacctggtattgctactgtcacagtgattgtaaaggatatgaatgattatcctcctgtctttagtaaacgaatatacaaagggatggtggctccggatgcagtcaagggtacacctatcacaacagtttatgctgaagatgcagaccctcctggattacctgcaagtcgtgtgaggtatagagtagatgatgtacagtttccttaccctgccagtatttttgaagtggaagaagattctggaagagtaataacacgagtcaatcttaatgaagaacctacaacaatttttaagttggtggtggttgcttttgatgatggggagcctgtgatgtccagcagtgccacagtgaagattcttgtcttacatcctggtgagatcccacgcttcacacaggaggaatatagacctcctccagtaagtgaacttgccaccaaagggaccatggttggtgtaatttctgctgctgccattaatcaaagtattgtgtactccattgtttcaggaaatgaagaagatacatttggaattaataacatcacaggtgttatctatgtgaatggacctctggattatgagaccaggacaagctatgtacttcgagtccaagctgattccctggaagtggtccttgccaatctccgagttccttcaaaaagcaatacagctaaagtatacattgagattcaggatgaaaataatcatcccccagtgtttcagaaaaaattctacatcggaggtgtatctgaagatgcaagaatgtttacttctgtactcagagtgaaggctactgataaagatactggcaattatagtgtcatggcctacagactcataataccaccaattaaagagggaaaagaaggatttgtagtggaaacatatacagggcttatcaaaactgctatgctcttccataatatgaggagatcctacttcaagtttcaagttattgcaactgacgactatgggaagggactgagcggcaaagccgatgtactcgtctccgtggtcaatcagctggatatgcaagtcattgtttccaatgtgcctcctactctagtggaaaaaaagatagaagatcttacagagatcttggatcgctatgttcaggaacaaattcctggtgccaaggtcgtagtggagtccattggagctcgccggcatggagatgccttttccctagaagattacaccaaatgtgacttgactgtctatgcaattgacccccaaaccaacagagccatcgatagaaatgagctttttaaatttttggatggcaaactacttgatatcaataaagactttcagccgtattatggggaaggaggacgcattctggagatccggactccagaggcagtgaccagcattaaaaagagaggagaaagtctaggatacacagaaggggccttgttggctctggccttcatcatcatcctctgctgcattcctgccatcttggtggttttggtcagctacagacacttcaaaagacgtcaagctgagtgtacaaagactgcacgaattcaggccgcattacccgcggctaaaccagcagtgccggctcctgcaccagtggcagcgcccccgccgccgccgccgcctccgccaggtgcgcatctctatgaagaacttggagacagctcaatgaaaggtcttttccttctctaccattttcaacaaagcaggggaaataactcagtctcagaagacaggaaacatcaacaagttgtgatgcccttttcttccaatactattgaggctcacaagtcagctcatgtagacggatcacttaagagcaacaaactgaagtctgcaagaaaattcacatttctatctgatgaggatgacttaagtgcccataatcccctttataaggaaaacataagtcaagtatcaacaaattcagacatttcacagagaacagattttgtagacccattttcacccaaaatacaagccaagagtaagtctctgaggggcccaagagaaaagattcagaggctgtggagtcagtcagtcagcttacccaggaggctgatgaggaaagttccaaatagaccagagatcatagatctgcagcagtggcaaggcaccaggcagaaagctgaaaatgaaaacactggaatctgtacaaacaaaagaggtagcagcaatccattgcttacaactgaagaggcaaatttgacagagaaagaggaaataaggcaaggtgaaacactgatgatagaaggaacagaacagttgaaatctctctcttcagactcttcattttgctttcccaggcctcacttctcattctccactttgccaactgtttcaagaactgtggaactcaaatcagaacctaatgtcatcagttctcctgctgagtgttccttggaactttctccttcaaggccttgtgttttacattcttcactctctaggagagagacacctatttgtatgttacctattgaaaccgaaagaaatatttttgaaaattttgcccatccaccaaacatctctccttctgcctgtccccttccccctcctcctcctatttctcctccttctcctcctcctgctcctgctcctcttgctcctcctcctgacatttctcctttttctcttttttgtcctcctccctctcctccttctatccctcttcctcttcctcctcctacattttttccactttccgtttcaacgtctggtcccccaacaccacctcttctacctccatttccaactcctcttcctccaccacctccttctattccttgccctccacctccttcagcttcatttctgtccacagagtgtgtctgtataacaggtgttaaatgcacgaccaacttgatgcctgccgagaaaattaagtcctctatgacacagctatcaacaacgacagtgtgtaaaacagaccctcagagagaaccaaaaggcatcctcagacacgttaaaaacttagcagaacttgaaaaatcagtagctaacatgtacagtcaaatagaaaaaaactatctacgcacaaatgtttcagaacttcaaactatgtgcccttcagaagtaacaaatatggaaatcacatctgaacaaaacaaggggagtttgaacaatattgtcgagggaactgaaaaacaatctcacagtcaatctacttcactgtaa

SEQ ID NO: 54548 - DNA, 5889 bp, Artificial Sequence
  derived and/or modified sequence
atgttcagacagttctacctgtggacctgcctggccagcggcatcatcctgggcagcctgttcgagatctgcctgggccagtacgacgacgcctacagctacgaggactgcaagctggccagaggcggcccccccgccaccatcgtggccatcgacgaggagagcagaaacggcaccatcctggtggacaacatgctgatcaagggcaccgccggcggccccgaccccaccatcgagctgagcctgaaggacaacgtggactactgggtgctgatggaccccgtgaagcagatgctgttcctgaacagcaccggcagagtgctggacagagacccccccatgaacatccacagcatcgtggtgcaggtgcagtgcatcaacaagaaggtgggcaccatcatctaccacgaggtgagaatcgtggtgagagacagaaacgacaacagccccaccttcaagcacgagagctactacgccaccgtgaacgagctgacccccgtgggcaccaccatcttcaccggcttcagcggcgacaacggcgccaccgacatcgacgacggccccaacggccagatcgagtacgtgatccagtacaaccccgacgaccccaccagcaacgacaccttcgagatccccctgatgctgaccggcaacatcgtgctgagaaagagactgaactacgaggacaagaccagatacttcgtgatcatccaggccaacgacagagcccagaacctgaacgagagaagaaccaccaccaccaccctgaccgtggacgtgctggacggcgacgacctgggccccatgttcctgccctgcgtgctggtgcccaacaccagagactgcagacccctgacctaccaggccgccatccccgagctgagaacccccgaggagctgaaccccatcatcgtgaccccccccatccaggccatcgaccaggacagaaacatccagccccccagcgacagacccggcatcctgtacagcatcctggtgggcacccccgaggactaccccagattcttccacatgcaccccagaaccgccgagctgagcctgctggagcccgtgaacagagacttccaccagaagttcgacctggtgatcaaggccgagcaggacaacggccaccccctgcccgccttcgccggcctgcacatcgagatcctggacgagaacaaccagagcccctacttcaccatgcccagctaccagggctacatcctggagagcgcccccgtgggcgccaccatcagcgacagcctgaacctgaccagccccctgagaatcgtggccctggacaaggacatcgaggacaccaaggaccccgagctgcacctgttcctgaacgactacaccagcgtgttcaccgtgacccagaccggcatcaccagatacctgaccctgctgcagcccgtggacagagaggagcagcagacctacaccttcagcatcaccgccttcgacggcgtgcaggagagcgagcccgtgatcgtgaacatccaggtgatggacgccaacgacaacacccccaccttccccgagatcagctacgacgtgtacgtgtacaccgacatgagacccggcgacagcgtgatccagctgaccgccgtggacgccgacgagggcagcaacggcgagatcacctacgagatcctggtgggcgcccagggcgacttcatcatcaacaagaccaccggcctgatcaccatcgcccccggcgtggagatgatcgtgggcagaacctacgccctgaccgtgcaggccgccgacaacgccccccccgccgagagaagaaacagcatctgcaccgtgtacatcgaggtgctgccccccaacaaccagagcccccccagattcccccagctgatgtacagcctggagatcagcgaggccatgagagtgggcgccgtgctgctgaacctgcaggccaccgacagagagggcgacagcatcacctacgccatcgagaacggcgacccccagagagtgttcaacctgagcgagaccaccggcatcctgaccctgggcaaggccctggacagagagagcaccgacagatacatcctgatcatcaccgccagcgacggcagacccgacggcaccagcaccgccaccgtgaacatcgtggtgaccgacgtgaacgacaacgcccccgtgttcgacccctacctgcccagaaacctgagcgtggtggaggaggaggccaacgccttcgtgggccaggtgaaggccaccgaccccgacgccggcatcaacggccaggtgcactacagcctgggcaacttcaacaacctgttcagaatcaccagcaacggcagcatctacaccgccgtgaagctgaacagagaggtgagagactactacgagctggtggtggtggccaccgacggcgccgtgcaccccagacacagcaccctgaccctggccatcaaggtgctggacatcgacgacaacagccccgtgttcaccaacagcacctacaccgtgctggtggaggagaacctgcccgccggcaccaccatcctgcagatcgaggccaaggacgtggacctgggcgccaacgtgagctacagaatcagaagccccgaggtgaagcacttcttcgccctgcaccccttcaccggcgagctgagcctgctgagaagcctggactacgaggccttccccgaccaggaggccagcatcaccttcctggtggaggccttcgacatctacggcaccatgccccccggcatcgccaccgtgaccgtgatcgtgaaggacatgaacgactacccccccgtgttcagcaagagaatctacaagggcatggtggcccccgacgccgtgaagggcacccccatcaccaccgtgtacgccgaggacgccgacccccccggcctgcccgccagcagagtgagatacagagtggacgacgtgcagttcccctaccccgccagcatcttcgaggtggaggaggacagcggcagagtgatcaccagagtgaacctgaacgaggagcccaccaccatcttcaagctggtggtggtggccttcgacgacggcgagcccgtgatgagcagcagcgccaccgtgaagatcctggtgctgcaccccggcgagatccccagattcacccaggaggagtacagacccccccccgtgagcgagctggccaccaagggcaccatggtgggcgtgatcagcgccgccgccatcaaccagagcatcgtgtacagcatcgtgagcggcaacgaggaggacaccttcggcatcaacaacatcaccggcgtgatctacgtgaacggccccctggactacgagaccagaaccagctacgtgctgagagtgcaggccgacagcctggaggtggtgctggccaacctgagagtgcccagcaagagcaacaccgccaaggtgtacatcgagatccaggacgagaacaaccacccccccgtgttccagaagaagttctacatcggcggcgtgagcgaggacgccagaatgttcaccagcgtgctgagagtgaaggccaccgacaaggacaccggcaactacagcgtgatggcctacagactgatcatcccccccatcaaggagggcaaggagggcttcgtggtggagacctacaccggcctgatcaagaccgccatgctgttccacaacatgagaagaagctacttcaagttccaggtgatcgccaccgacgactacggcaagggcctgagcggcaaggccgacgtgctggtgagcgtggtgaaccagctggacatgcaggtgatcgtgagcaacgtgccccccaccctggtggagaagaagatcgaggacctgaccgagatcctggacagatacgtgcaggagcagatccccggcgccaaggtggtggtggagagcatcggcgccagaagacacggcgacgccttcagcctggaggactacaccaagtgcgacctgaccgtgtacgccatcgacccccagaccaacagagccatcgacagaaacgagctgttcaagttcctggacggcaagctgctggacatcaacaaggacttccagccctactacggcgagggcggcagaatcctggagatcagaacccccgaggccgtgaccagcatcaagaagagaggcgagagcctgggctacaccgagggcgccctgctggccctggccttcatcatcatcctgtgctgcatccccgccatcctggtggtgctggtgagctacagacacttcaagagaagacaggccgagtgcaccaagaccgccagaatccaggccgccctgcccgccgccaagcccgccgtgcccgcccccgcccccgtggccgcccccccccccccccccccccccccccccggcgcccacctgtacgaggagctgggcgacagcagcatgaagggcctgttcctgctgtaccacttccagcagagcagaggcaacaacagcgtgagcgaggacagaaagcaccagcaggtggtgatgcccttcagcagcaacaccatcgaggcccacaagagcgcccacgtggacggcagcctgaagagcaacaagctgaagagcgccagaaagttcaccttcctgagcgacgaggacgacctgagcgcccacaaccccctgtacaaggagaacatcagccaggtgagcaccaacagcgacatcagccagagaaccgacttcgtggaccccttcagccccaagatccaggccaagagcaagagcctgagaggccccagagagaagatccagagactgtggagccagagcgtgagcctgcccagaagactgatgagaaaggtgcccaacagacccgagatcatcgacctgcagcagtggcagggcaccagacagaaggccgagaacgagaacaccggcatctgcaccaacaagagaggcagcagcaaccccctgctgaccaccgaggaggccaacctgaccgagaaggaggagatcagacagggcgagaccctgatgatcgagggcaccgagcagctgaagagcctgagcagcgacagcagcttctgcttccccagaccccacttcagcttcagcaccctgcccaccgtgagcagaaccgtggagctgaagagcgagcccaacgtgatcagcagccccgccgagtgcagcctggagctgagccccagcagaccctgcgtgctgcacagcagcctgagcagaagagagacccccatctgcatgctgcccatcgagaccgagagaaacatcttcgagaacttcgcccacccccccaacatcagccccagcgcctgccccctgcccccccccccccccatcagcccccccagccccccccccgcccccgcccccctggcccccccccccgacatcagccccttcagcctgttctgccccccccccagcccccccagcatccccctgcccctgcccccccccaccttcttccccctgagcgtgagcaccagcggcccccccaccccccccctgctgccccccttccccacccccctgcccccccccccccccagcatcccctgcccccccccccccagcgccagcttcctgagcaccgagtgcgtgtgcatcaccggcgtgaagtgcaccaccaacctgatgcccgccgagaagatcaagagcagcatgacccagctgagcaccaccaccgtgtgcaagaccgacccccagagagagcccaagggcatcctgagacacgtgaagaacctggccgagctggagaagagcgtggccaacatgtacagccagatcgagaagaactacctgagaaccaacgtgagcgagctgcagaccatgtgccccagcgaggtgaccaacatggagatcaccagcgagcagaacaagggcagcctgaacaacatcgtggagggcaccgagaagcagagccacagccagagcaccagcctgtag

SEQ ID NO: 54549 - protein, 1957 aa, Artificial Sequence
  derived and/or modified sequence
MFRQFYLWTCLASGIILGSLFEICLGQYDDDCKLARGGPPATIVAIDEESRNGTILVDNMLIKGTAGGPDPTIELSLKDNVDYWVLMDPVKQMLFLNSTGRVLDRDPPMNIHSIVVQVQCINKKVGTIIYHEVRIVVRDRNDNSPTFKHESYYATVNELTPVGTTIFTGFSGDNGATDIDDGPNGQIEYVIQYNPDDPTSNDTFEIPLMLTGNIVLRKRLNYEDKTRYFVIIQANDRAQNLNERRTTTTTLTVDVLDGDDLGPMFLPCVLVPNTRDCRPLTYQAAIPELRTPEELNPIIVTPPIQAIDQDRNIQPPSDRPGILYSILVGTPEDYPRFFHMHPRTAELSLLEPVNRDFHQKFDLVIKAEQDNGHPLPAFAGLHIEILDENNQSPYFTMPSYQGYILESAPVGATISDSLNLTSPLRIVALDKDIEDTKDPELHLFLNDYTSVFTVTQTGITRYLTLLQPVDREEQQTYTFSITAFDGVQESEPVIVNIQVMDANDNTPTFPEISYDVYVYTDMRPGDSVIQLTAVDADEGSNGEITYEILVGAQGDFIINKTTGLITIAPGVEMIVGRTYALTVQAADNAPPAERRNSICTVYIEVLPPNNQSPPRFPQLMYSLEISEAMRVGAVLLNLQATDREGDSITYAIENGDPQRVFNLSETTGILTLGKALDRESTDRYILIITASDGRPDGTSTATVNIVVTDVNDNAPVFDPYLPRNLSVVEEEANAFVGQVKATDPDAGINGQVHYSLGNFNNLFRITSNGSIYTAVKLNREVRDYYELVVVATDGAVHPRHSTLTLAIKVLDIDDNSPVFTNSTYTVLVEENLPAGTTILQIEAKDVDLGANVSYRIRSPEVKHFFALHPFTGELSLLRSLDYEAFPDQEASITFLVEAFDIYGTMPPGIATVTVIVKDMNDYPPVFSKRIYKGMVAPDAVKGTPITTVYAEDADPPGLPASRVRYRVDDVQFPYPASIFEVEEDSGRVITRVNLNEEPTTIFKLVVVAFDDGEPVMSSSATVKILVLHPGEIPRFTQEEYRPPPVSELATKGTMVGVISAAAINQSIVYSIVSGNEEDTFGINNITGVIYVNGPLDYETRTSYVLRVQADSLEVVLANLRVPSKSNTAKVYIEIQDENNHPPVFQKKFYIGGVSEDARMFTSVLRVKATDKDTGNYSVMAYRLIIPPIKEGKEGFVVETYTGLIKTAMLFHNMRRSYFKFQVIATDDYGKGLSGKADVLVSVVNQLDMQVIVSNVPPTLVEKKIEDLTEILDRYVQEQIPGAKVVVESIGARRHGDAFSLEDYTKCDLTVYAIDPQTNRAIDRNELFKFLDGKLLDINKDFQPYYGEGGRILEIRTPEAVTSIKKRGESLGYTEGALLALAFIIILCCIPAILVVLVSYRQFKVRQAECTKTARIQAALPAAKPAVPAPAPVAAPPPPPPPPPGAHLYEELGDSSMHNLFLLYHFQQSRGNNSVSEDRKHQQVVMPFSSNTIEAHKSAHVDGSLKSNKLKSARKFTFLSDEDDLSAHNPLYKENISQVSTNSDISQRTDFVDPFSPKIQAKSKSLRGPREKIQRLWSQSVSLPRRLMRKVPNRPEIIDLQQWQGTRQKAENENTGICTNKRGSSNPLLTTEEANLTEKEEIRQGETLMIEGTEQLKSLSSDSSFCFPRPHFSFSTLPTVSRTVELKSEPNVISSPAECSLELSPSRPCVLHSSLSRRETPICMLPIETERNIFENFAHPPNISPSACPLPPPPPISPPSPPPAPAPLAPPPDISPFSLFCPPPSPPSIPLPLPPPTFFPLSVSTSGPPTPPLLPPFPTPLPPPPPSIPCPPPPSASFLSTECVCITGVKCTTNLMPAEKIKSSMTQLSTTTVCKTDPQREPKGILRHVKNLAELEKSVANMYSQIEKNYLRTNVSELQTMCPSEVTNMEITSEQNKGSLNNIVEGTEKQSHSQSTSL

SEQ ID NO: 54550 - protein, 961 aa, Artificial Sequence
  derived and/or modified sequence
MFRQFYLWTCLASGIILGSLFEICLGQYDDDCKLARGGPPATIVAIDEESRNGTILVDNMLIKGTAGGPDPTIELSLKDNVDYWVLMDPVKQMLFLNSTGRVLDRDPPMNIHSIVVQVQCINKKVGTIIYHEVRIVVRDRNDNSPTFKHESYYATVNELTPVGTTIFTGFSGDNGATDIDDGPNGQIEYVIQYNPDDPTSNDTFEIPLMLTGNIVLRKRLNYEDKTRYFVIIQANDRAQNLNERRTTTTTLTVDVLDGDDLGPMFLPCVLVPNTRDCRPLTYQAAIPELRTPEELNPIIVTPPIQAIDQDRNIQPPSDRPGILYSILVGTPEDYPRFFHMHPRTAELSLLEPVNRDFHQKFDLVIKAEQDNGHPLPAFAGLHIEILDENNQSPYFTMPSYQGYILESAPVGATISDSLNLTSPLRIVALDKDIEDTKDPELHLFLNDYTSVFTVTQTGITRYLTLLQPVDREEQQTYTFSITAFDGVQESEPVIVNIQVMDANDNTPTFPEISYDVYVYTDMRPGDSVIQLTAVDADEGSNGEITYEILVGAQGDFIINKTTGLITIAPGVEMIVGRTYALTVQAADNAPPAERRNSICTVYIEVLPPNNQSPPRFPQLMYSLEISEAMRVGAVLLNLQATDREGDSITYAIENGDPQRVFNLSETTGILTLGKALDRESTDRYILIITASDGRPDGTSTATVNIVVTDVNDNAPVFDPYLPRNLSVVEEEANAFVGQVKATDPDAGINGQVHYSLGNFNNLFRITSNGSIYTAVKLNREVRDYYELVVVATDGAVHPRHSTLTLAIKVLDIDDNSPVFTNSTYTVLVEENLPAGTTILQIEAKDVDLGANVSYRIRSPEVKHFFALHPFTGELSLLRSLDYEAFPDQEASITFLVEAFDIYGTMPPGIATVTVIVKDMNDYPPVFSKRIYKGMVAPDAVKGTPITTVYAEDADPPVSRRH

SEQ ID NO: 54551 - protein, 654 aa, Artificial Sequence
  derived and/or modified sequence
MFRQFYLWTCLASGIILGSLFEICLGQYDDDCKLARGGPPATIVAIDEESRNGTILVDNMLIKGTAGGPDPTIELSLKDNVDYWVLMDPVKQMLFLNSTGRVLDRDPPMNIHSIVVQVQCINKKVGTIIYHEVRIVVRDRNDNSPTFKHESYYATVNELTPVGTTIFTGFSGDNGATDIDDGPNGQIEYVIQYNPDDPTSNDTFEIPLMLTGNIVLRKRLNYEDKTRYFVIIQANDRAQNLNERRTTTTTLTVDVLDGDDLGPMFLPCVLVPNTRDCRPLTYQAAIPELRTPEELNPIIVTPPIQAIDQDRNIQPPSDRPGILYSILVGTPEDYPRFFHMHPRTAELSLLEPVNRDFHQKFDLVIKAEQDNGHPLPAFAGLHIEILDENNQSPYFTMPSYQGYILESAPVGATISDSLNLTSPLRIVALDKDIEDTKDPELHLFLNDYTSVFTVTQTGITRYLTLLQPVDREEQQTYTFSITAFDGVQESEPVIVNIQVMDANDNTPTFPEISYDVYVYTDMRPGDSVIQLTAVDADEGSNGEITYEILVGAQGDFIINKTTGLITIAPGVEMIVGRTYALTVQAADNAPPAERRNSICTVYIEVLPPNNQSPPRFPQLMYSLEISEAMRVGAVLLNLQHGDSNLRESTGQGKH

SEQ ID NO: 54552 - DNA, 5874 bp, Artificial Sequence
  derived and/or modified sequence
atgtttcgacagttctatctgtggacctgcctagcgtccgggatcatactgggctctctgtttgaaatatgcttgggacagtatgatgacgactgtaaactggccagggggggcccccccgccaccatagttgcgatcgacgaggagtctcgaaacggcactatcctggtggataatatgctgattaaagggacagccggaggaccagaccctacaatcgaactatcactgaaggataatgtcgactactgggtcctgatggatccggtgaaacagatgttatttctcaactcgacagggcgggtccttgaccgtgatccaccaatgaatattcactcgatcgtggtccaggtacaatgtattaacaagaaggttggaacaatcatatatcacgaagttaggatagtggtaagagaccgaaatgacaacagccccacctttaaacatgagtcttattatgcgaccgtgaacgagctgacccccgtgggcaccaccatttttacaggtttctctggcgacaatggagctactgatatagacgatgggcccaacggccaaatagaatacgtgattcagtacaacccagacgatcccacgtccaacgacacctttgagataccccttatgctgacgggtaacatcgtgctcaggaagagactgaattacgaggacaaaactaggtactttgtcattattcaggccaatgatcgagcacagaatctgaacgaaaggcggactaccacaacgacattgaccgtggacgtccttgacggtgacgatctgggaccaatgttcctcccctgcgtactggtgccaaataccagggattgccgaccacttacgtatcaagccgccattccagagctcagaacgccagaagaactcaatccaatcatcgttactcctccgatacaagctattgaccaggacaggaatatacagccaccaagcgataggccaggcatactgtattcaatcctagtgggcacgccggaggactacccaagattcttccacatgcacccacggaccgcggaattatctctcctggaaccagtgaaccgggatttccatcaaaaattcgacctggtcattaaggctgagcaggataacggccatccactgccagcatttgcaggacttcatattgaaatccttgacgagaataatcaaagtccgtacttcacgatgccatcataccaagggtacatactcgaatcagcccctgtgggggccaccatctccgactcactgaacctcacttcccccctccgaattgtggcactggacaaagacatagaggacacaaaagatcccgaactgcaccttttcttgaatgactacacctccgtgttcaccgtgactcagaccggaattaccaggtatctcactcttttgcaacctgtggatcgcgaggagcagcaaacttacacgttctctataacagcctttgacggggtgcaagaaagcgaacctgtgatcgttaacatacaggtgatggatgcgaatgacaatacccctacttttcccgaaatctcatatgacgtctacgtttacacagatatgcgcccaggagattctgtgatccagctgaccgctgtagatgcagatgagggtagcaacggggagatcacttacgagatattagtgggtgcccagggcgacttcatcattaacaaaaccacaggactaatcaccattgccccgggagttgaaatgatcgtaggccgcacttatgccctgaccgtccaagcagcggataacgctccgccagctgagcgcagaaattctatttgtacggtctacatcgaggtcttgcccccaaacaaccaatcgccacccaggtttccacaacttatgtactccctcgagatttccgaggctatgagagtgggcgccgtgctcctgaacttgcaggctaccgatcgggagggtgattccattacttatgcaatcgagaatggtgacccccagcgggtctttaatctatccgaaaccactggcatcttaaccctcggcaaggcactggacagggagtctaccgaccgctatatattgattattacagcgtcggacgggcgccctgacggcacaagcactgcaacagttaatattgtcgtgactgatgtgaatgataatgccccagtgttcgatccctacctgccacgcaacctgagtgttgtggaggaagaagctaatgcattcgtgggacaggtgaaagcgaccgaccccgacgccgggattaacgggcaagttcattactccctgggaaacttcaacaacctctttcggattacttcaaacggctcaatatatacagctgtaaagctgaaccgagaggtgagggactattatgagctagtagtagtggcgacagacggtgccgtccatcctcggcattctaccctgacgctggccatcaaagtgttggacatagatgataatagtccagtctttactaactcaacatatactgtgctggtagaggagaacctccctgctggcacgaccatactgcagattgaagccaaagatgtagacctgggggctaacgtgagctatcgcatcagaagtccagaggtgaagcacttcttcgccctccaccccttcacgggggaactcagtctgctaagatccctggactacgaagcttttcccgaccaggaggcatctattacctttctggtcgaggctttcgatatatatgggacaatgcctccaggtattgccacagttacggtgattgtcaaggacatgaacgattacccccctgtcttctccaagcggatttacaagggcatggtcgccccagacgccgtgaagggcaccccgataacaaccgtgtacgcggaagacgctgatcctcccggtctgcctgccagccgcgtgcggtaccgtgtcgacgatgttcagttcccctacccagccagtatcttcgaggtggaggaggatagtggcagggttatcacccgcgtcaatctgaacgaggaaccaactaccatatttaaactggtcgttgtcgctttcgatgacggtgagcctgtcatgtcctcaagtgccaccgtgaagatcttagtgctgcatcctggtgaaattccaaggttcactcaggaagaataccgtcctccaccagtgagcgagctagcaaccaagggcacaatggtcggggtgatctctgcagccgcaattaatcaatcgatagtgtactctatagtcagcggtaacgaggaggataccttcgggataaataacattactggagttatttacgtaaatgggcctttagattacgagactagaacatcttacgttctccgtgtgcaggctgacagcctagaggtggttctcgccaatctccgcgtcccctcaaagagtaacactgccaaagtgtacatcgagattcaggatgagaataatcatccacctgtgtttcagaagaagttctatattggcggagtgtcagaagatgctcggatgttcacatccgtgctccgggtcaaagccactgacaaagatactgggaattacagcgtaatggcgtatcgccttataatcccacctatcaaggagggaaaggaggggtttgtggttgagacatacactgggctgatcaaaactgctatgctgttccataacatgcgccggagctatttcaaatttcaggttatcgccactgatgattacgggaaaggcctgagtggtaaagcagacgttctcgtgtccgttgtcaaccagctggacatgcaagtgattgtgtccaatgtcccaccaacattggttgagaaaaagattgaggacctcaccgaaattctggatagatacgtacaggagcagatccctggggccaaagtggtggtcgagagtattggggctcggcgccacggagatgcctttagcttggaggattacaccaagtgcgatctaacagtgtatgccatcgatccgcagaccaaccgcgcgattgatcgcaacgagctgtttaagttcctggacggaaagctcctggatatcaataaggactttcagccgtattacggcgagggaggccggatcctcgaaatccgaactccagaggcagtgacaagcatcaagaagcgcggggaaagtttgggctatactgagggcgccttgctggctttggccttcatcatcattttgtgttgtatccccgcaatccttgtggtgctggtctcctaccggcagttcaaggtgcgccaggcagagtgcacaaagactgcccgaatccaagccgcgttgcctgccgccaaaccggctgtaccagcaccagcacccgtggccgcccccccacctccacccccaccccccccaggcgctcacctgtatgaggaactgggcgatagctcaatgcacaatctctttttgctctatcactttcagcagtcgagaggtaacaactccgtctccgaggatcgcaaacaccagcaagtggtgatgcccttctccagtaataccatcgaagcccacaaaagtgcccatgtagacgggtcacttaaaagcaacaaactgaagagcgccaggaagttcacattcttgtccgacgaagatgatctgtccgcacataaccctctgtataaggaaaacatttcacaggtgtcgaccaacagcgatatatcccagagaaccgattttgtggaccctttttctcccaaaatccaggcaaaaagcaagtccctaaggggcccccgcgagaagatccagcggctgtggtctcagtccgtgtcgctcccgagacggcttatgcggaaggtcccaaacagacctgaaatcattgacctgcagcagtggcagggtacccgtcaaaaggctgaaaatgaaaatacaggaatatgtacaaataaacggggatcctcgaatccattactcactaccgaggaggccaacctgacagagaaggaggaaatccggcagggcgagacactcatgatcgaagggaccgaacagttgaagagcttaagctcggacagctccttttgcttcccccggccccacttttctttcagcaccctgccaactgtgtcgaggaccgttgaactgaaatccgagccgaacgtaatatctagcccagcggaatgtagtctcgagctgtctccgtcaagaccgtgtgttttgcacagtagcctctccagacgggaaactcccatctgtatgcttccaatagagactgaacgaaacatcttcgagaacttcgcacaccctccaaatatatcaccctcagcctgccctctccctccaccccctccgattagcccaccctctcctcctcccgctccagccccccttgccccgcccccagacatctcgccctttagcctgttttgcccacccccatccccacctagcatccctctgcccctcccacccccgacattcttcccactctctgtatccacctccggacccccaaccccaccactcttaccgccctttccaacacccttgcccccccctccgcccagtattccctgtccccctccaccttctgcatcattcctatctacagaatgcgtctgtattactggagttaaatgcaccactaacctgatgcccgcagagaagataaaatcatctatgacccagctgtctacaactactgtctgtaagacagatccccagcgggagccaaaaggtatacttcgccatgtgaagaacttggcagagctcgagaaatctgtggctaatatgtacagccagatcgagaagaactacctccggaccaacgtctccgagctccagactatgtgtccatcagaggttacaaacatggaaattacttctgagcagaacaaaggttctctcaataacatcgtggaaggcaccgagaagcagagtcactcccagagcacttccctgtag

SEQ ID NO: 54553 - DNA, 279 bp, Artificial Sequence
  derived and/or modified sequence
atgtttcgacagttttacctgtggacatgtctcgcgagtgggatcatactgggcagtctgttcgagatttgtctcgggcagtacgacgacgactgtaaactagccagaggcggccccccagctaccattgtcgcaatcgacgaggaatctaggaacggaactatactagtcgataatatgctgatcaaaggcaccgccgggggtcccgaccccactatagagctctcgttaaaagacaacgttgattattgggtgttgatggacccagtcaagcagtag

SEQ ID NO: 54554 - DNA, 5874 bp, Artificial Sequence
  derived and/or modified sequence
atgttccggcagttctacctgtggacctgcctggccagcggcatcatcctgggcagcctgtttgagatctgcctgggccagtatgatgatgactgcaagctggcccggggcggccccccagccaccatcgtggccattgatgaggagagcagaaatggcaccatcctggtggacaacatgctgatcaagggcacagctgggggccctgaccccaccatcgagctgagcctgaaggacaacgtggactactgggtgctgatggaccctgtgaagcagatgctgttcctgaacagcacaggccgggtgctggaccgggacccccccatgaacatccacagcatcgtggtgcaggtgcagtgcatcaacaagaaggtgggcaccatcatctaccacgaggtgagaattgtggtgcgggacagaaatgacaacagccccaccttcaagcatgagagctactatgccaccgtgaatgagctgacccctgtgggcaccaccatcttcaccggcttcagcggggacaacggggccacagacattgatgatggccccaacggccagattgaatatgtgatccagtacaacccagatgaccccaccagcaatgacacctttgagatccccctgatgctgactggaaacatcgtgctgaggaagaggctgaactatgaggacaagacccgctactttgtgatcatccaggccaatgaccgggcccagaacctgaatgaaagaaggaccaccaccaccaccctgactgtggatgtgctggatggagatgacctgggccccatgttcctgccctgtgtgctggtgcccaacacccgggactgccggcccctgacctaccaggccgccatccctgagctgcggaccccagaggagctgaaccccatcatcgtgaccccacccatccaggccatcgaccaggacaggaacatccagcccccaagtgaccggcccggcatcctgtacagcatcctggtgggcaccccagaggactacccccgcttcttccacatgcaccccaggacagctgagctgagcctgctggagcctgtgaacagagacttccaccagaagtttgacctggtgatcaaggccgagcaggacaatggccaccccctgcctgcctttgctggcctgcacatcgagatcctggatgagaacaaccagagcccctacttcaccatgcccagctaccagggctacatcctggagagcgcccctgtgggcgccaccatcagtgacagcctgaacctgaccagccccctgcgcatcgtggccctggacaaggacatcgaggacaccaaggaccctgagctgcacctgttcctgaatgactacaccagcgtcttcaccgtgacccagacaggcatcacccgctacctgaccctgctgcagcctgtggaccgggaggagcagcagacctacaccttcagcatcacagcctttgatggagtgcaggagagcgagcccgtcatcgtgaacatccaggtgatggatgccaatgacaacacccccaccttccctgagatctcctatgatgtgtatgtgtacacagacatgaggcctggggacagcgtcatccagctgacagctgtggatgctgatgagggcagcaatggagagatcacctatgagatcctggtgggcgcccagggcgacttcatcatcaacaagaccaccggcctcatcaccatcgcccctggggtggagatgattgtgggccgcacctacgccctgactgtgcaggccgctgacaatgcccccccagctgagaggagaaattccatctgcaccgtgtacatcgaggtgctgccccccaacaaccagagccccccacgcttcccccagctgatgtacagcctggagatcagcgaggccatgagggtgggcgctgtgctgctgaacctgcaggccacagaccgggagggggacagcatcacctacgccattgaaaatggagacccccagagggtcttcaacctgtctgagaccaccggcatcctgaccctgggcaaggccctggaccgggagagcacagaccgctacatcctgatcatcacagccagtgatggccgcccagatggcaccagcacagccaccgtgaacatcgtggtgacagatgtgaatgacaatgcccctgtgtttgacccctacctgcccaggaacctgtctgtggtggaggaggaggccaatgcctttgtgggccaggtgaaggccacagatcctgatgctggcatcaatggccaggtgcactacagcctgggcaacttcaacaacctcttccgcatcaccagcaatggcagcatctacacagctgtgaagctgaaccgggaggtgcgggactactatgagctggtggtggtggccacagatggagctgtgcaccccaggcacagcaccctgaccctggccatcaaggtgctggacattgatgacaacagccctgtgttcaccaacagcacctacacagtgctggtggaggagaacctgcctgctggcaccaccatcctgcagatcgaggccaaggatgtggacctgggcgccaacgtgtcctaccgcatccgcagccctgaggtgaagcacttctttgccctgcaccccttcaccggggagctgagcctgctgcggagcctggactatgaggccttcccagaccaggaggccagcatcaccttcctggtggaggcctttgacatctacggcaccatgcctcctggcatcgccaccgtgacagtgattgtgaaggacatgaatgactacccacctgtgttcagcaagaggatctacaagggcatggtggccccagatgctgtgaagggcacccccatcaccaccgtgtatgcagaagatgctgaccccccaggcctgcctgccagccgggtgcgctacagagtggatgatgtgcagttcccctacccagccagcatctttgaggtggaggaggacagcggccgggtcatcaccagggtgaacctgaatgaggagcccaccaccatcttcaagctggtggtggtggcctttgatgatggagagcctgtgatgagcagcagcgccaccgtgaagatcctggtgctgcaccctggagagatcccccgcttcacccaggaggagtaccggcccccacctgtgtctgagctggccaccaagggcaccatggtgggcgtcatctctgctgctgccatcaaccagagcatcgtgtacagcatcgtgtctggaaatgaggaggacaccttcggcatcaacaacatcaccggggtcatctacgtgaatggccccctggactatgagaccaggaccagctatgtgctgcgggtgcaggccgacagcctggaggtggtgctggccaacctgcgggtgcccagcaagagcaacacagccaaggtgtacatcgagatccaggatgagaacaaccacccccctgtgttccagaagaagttctacatcggcggcgtgtctgaagatgccaggatgttcacctctgtgctgcgggtgaaggccacagacaaggacaccggcaactacagcgtgatggcctaccgcctcatcatcccccccatcaaggagggcaaggagggctttgtggtggagacctacacaggcctcatcaagacagccatgctgttccacaacatgaggaggagctacttcaagttccaggtgattgccacagatgattatggcaagggcctgagcggcaaggcagatgtgctggtgtctgtggtgaaccagctggacatgcaggtgattgtgtccaatgtgccccccaccctggtggagaagaagattgaggacctgacagagatcctggaccgctacgtgcaggagcagatccctggggccaaggtggtggtggagagcattggagccaggagacatggagatgccttcagcctggaggactacaccaagtgtgacctgactgtgtatgccatcgacccccagaccaacagagccatcgacagaaatgagctgttcaagttcctggatggcaagctgctggacatcaacaaggacttccagccctactatggagagggcggccgcatcctggagatccgcaccccagaggccgtgaccagcatcaagaagagaggagagagcctgggctacacagaaggagccctgctggccctggccttcatcatcatcctgtgctgcatcccagccatcctggtggtgctggtgtcctaccggcagttcaaggtgcggcaggccgagtgcaccaagacagcccgcatccaggccgccctgcctgctgccaagccagctgtgcctgccccagcccctgtggccgcccctcctcctcctcctcctcctcctcctggggcccacctgtatgaggagctgggggacagctccatgcacaacctcttcctgctgtaccacttccagcagagccggggcaacaacagcgtgtctgaggacaggaagcaccagcaggtggtgatgcccttcagcagcaacaccatcgaggcccacaagagcgcccacgtggatggcagcctgaagagcaacaagctgaagagcgccaggaagttcaccttcctgagtgatgaagatgacctgagcgcccacaaccccctgtacaaggagaacatcagccaggtgtccaccaacagcgacatcagccagaggacagactttgtggaccccttcagccccaagatccaggccaagagcaagagcctgcggggcccccgggagaagatccagaggctgtggagccagagcgtgtccctgccccggcggctgatgaggaaggtgcccaacagacctgagatcatcgacctgcagcagtggcagggcacccggcagaaggccgagaatgaaaatacaggcatctgcaccaacaagaggggcagcagcaaccccctgctgaccacagaggaggccaacctgacagagaaggaggagatccggcagggcgagaccctgatgattgagggcacagagcagctgaagagcctgagcagtgacagcagcttctgcttcccccggccccacttctccttcagcaccctgcccaccgtgtccaggacagtggagctgaagtctgagcccaacgtcatcagcagccctgcagaatgttccctggagctgagccccagccggccctgtgtgctgcacagcagcctgagccggcgggagacccccatctgcatgctgcccatcgagacagagaggaacatctttgagaactttgcccacccccccaacatcagccccagcgcctgccccctgcccccacctccacccatcagcccccccagccccccaccagccccagcccccctggcccctcctccagacatcagccccttcagcctcttctgccccccacccagccccccatccatccccctgcccctgcccccacccaccttcttccccctgtctgtgtccaccagcggcccccccaccccacccctgctgccccccttccccacccccctgcccccacctccacccagcatcccctgccccccaccacccagcgccagcttcctgagcacagaatgtgtgtgcatcaccggggtgaagtgcaccaccaacctgatgcctgctgagaagatcaagagctccatgacccagctgagcaccaccaccgtgtgcaagacagacccccagcgggagcccaagggcatcctgcggcacgtgaagaacctggccgagctggagaagtctgtggccaacatgtacagccagatcgagaagaactacctgcggaccaacgtgtctgagctgcagaccatgtgccccagcgaggtgaccaacatggagatcaccagcgagcagaacaagggcagcctgaacaacatcgtggagggcacagagaagcagagccacagccagagcaccagcctgtag

SEQ ID NO: 54555 - DNA, 279 bp, Artificial Sequence
  derived and/or modified sequence
atgttccggcagttctacctgtggacctgcctggccagcggcatcatcctgggcagcctgtttgagatctgcctgggccagtatgatgatgactgcaagctggcccggggcggccccccagccaccatcgtggccattgatgaggagagcagaaatggcaccatcctggtggacaacatgctgatcaagggcacagctgggggccctgaccccaccatcgagctgagcctgaaggacaacgtggactactgggtgctgatggaccctgtgaagcagtag

SEQ ID NO: 54556 - DNA, 5874 bp, Artificial Sequence
  derived and/or modified sequence
atgttccggcagttctacctgtggacctgcctggccagcggcatcatcttaggctccctctttgagatttgtttaggacagtacgatgatgattgcaagctggcccgcggagggccaccagccaccattgtggccattgatgaggagtcccgcaatggcacgatactagtggataatatgcttattaaggggaccgctggtggtcctgacccaacaatcgagctatccctaaaggacaacgtggattactgggtgctcatggatcccgtaaagcagatgttatttctgaactccaccggccgtgtcctggaccgggacccccccatgaatattcattccattgtggttcaagtgcagtgcattaacaaaaaagtgggcaccatcatttatcacgaagttagaattgtcgttagagaccgaaatgacaacagtccaacattcaagcacgagagctattatgccactgtgaacgagctgactcccgtaggcacaaccatttttaccggcttttccggcgacaacggggccacagatattgatgatgggccaaatgggcagatcgaatatgtgattcagtataacccagacgatccaacttcaaacgatacatttgaaataccactgatgctgaccgggaatatcgtgcttcgtaaaagactcaactatgaagataagacaagatacttcgttattattcaggccaacgatagagcgcagaaccttaacgagcgaaggaccactaccacaacactgaccgtggatgtgttggatggagatgacctgggccccatgtttttgccttgtgtgttggtccccaatacccgggattgcagaccccttacgtaccaggcggcaatccctgagctccgtactcccgaggaattgaatccgataattgtaacaccccctatacaggcaatagaccaagaccgaaatatccagccaccatcggaccggccagggatcctctacagcatactcgttggaacccccgaagattacccccggtttttccatatgcatccccgaaccgctgagttgtctctgttggaaccagtgaatcgtgactttcaccagaaattcgatttggtgatcaaggctgagcaagacaatggccatcccctgcctgccttcgctgggctgcatatcgagatcttagatgagaacaaccagtccccctactttactatgccatcctatcaggggtatatactcgagtctgcaccagtcggagcgactatatccgattccctgaatctgactagcccgctccgaattgtcgcactcgacaaggatatcgaagacacaaaggaccccgagctgcatctgtttctgaacgactatacaagcgtctttacagtcacccagaccggcatcactaggtatctgacccttctgcagcccgtcgatagagaggagcagcaaacttacaccttctctataaccgcattcgatggggtgcaagagtccgagcctgtgattgtaaatatccaggtcatggacgcgaacgacaacacaccaacatttccagagatctcctacgatgtctatgtctacaccgacatgaggccaggcgattccgtcatccaactgaccgcagtcgacgcagacgagggttcaaatggtgagatcacttatgaaatcctcgtgggagcccaaggagattttattattaataagaccaccggcctgatcacgatagcccccggtgtcgaaatgattgttggtcgaacttacgcactgacggttcaggcagcagacaatgcccctccagctgagagaagaaactctatctgcacagtctacattgaggtcctgccccccaacaatcagagccctccacgtttccctcaactgatgtattccttggagatctctgaagctatgcgagtcggtgctgtgcttcttaacctgcaggccacggacagggaaggtgacagcataacatatgctatagagaacggtgatccccagagagtatttaatctgtctgagaccacaggcatcctcaccctgggtaaagctttagacagggagtctactgaccggtatatactgataatcacagcctccgacgggcggcccgatggcacctctaccgcaactgttaacatcgttgttaccgatgtaaacgataatgctcccgttttcgatccttacctgcctaggaacctatctgtggtggaagaggaggctaacgcctttgttggccaggtgaaagccaccgacccagacgccggaattaatgggcaggtacactatagcctcgggaactttaacaatttgtttagaataaccagcaacggcagcatttacacagcagttaagctaaaccgcgaagtgagagactattatgagctggtcgtggtggcaacggacggcgccgtgcaccctagacactcaactctgacccttgcgatcaaagtgctggatatcgatgacaattctccagtatttacgaatagtacgtacaccgtgctcgtggaagaaaatttgccagcaggaaccaccattttgcaaatcgaggccaaggatgtggacctaggagcaaatgtctcctacagaatccgtagccctgaagtaaaacacttcttcgcccttcaccctttcacgggtgaattgtcgcttctgcgaagtctggattatgaggcttttccagaccaggaggcctccattaccttcctggtagaggctttcgatatttacgggacaatgccaccaggaatcgctactgtcaccgttatagtcaaagatatgaatgactaccctcctgtgttttccaaaagaatttataagggcatggtcgcccctgacgctgtgaagggaacacccattacgactgtttacgcagaggacgcagacccaccgggactgccagcttctagggtcaggtatagagtagacgacgtccaatttccctaccctgccagcatcttcgaagtggaggaggattctgggcgagtgatcacacgagttaaccttaatgaggaacctacaacaatcttcaaacttgtggttgtggcctttgacgatggagaacctgtgatgtcgtcatccgcaaccgtgaagatcttggttttacaccctggggagatccctcggttcacccaggaggagtaccgaccccccccggtgtccgaactggctactaaaggaacgatggtaggcgtcatctccgcggcggcaatcaaccaaagcattgtttacagcatagtaagcggaaatgaagaggatactttcggaattaacaacattacaggagttatctatgtcaacggccctcttgattacgaaacaagaacaagttacgttctgagggttcaggccgactcactcgaggtggtcttggccaaccttagagtcccaagcaaaagcaatacagccaaagtttatatagagattcaggatgagaataaccatcccccagtattccagaagaagttctatattggcggcgtgagcgaggatgcacgcatgttcaccagtgtgttgagggttaaggccacagacaaggacaccggcaattattccgtgatggcatatcgcctgattatcccccccatcaaggagggcaaagaaggtttcgtggtagaaacctataccgggctgattaagacagcaatgcttttccataacatgcggcgctcttactttaagtttcaagtcattgccacagacgattacggaaaaggtctctctggcaaggcagatgtgctggtcagtgttgtcaaccagctggatatgcaggttattgtttcaaatgtgccgcccaccctggttgagaagaaaatcgaagacttgactgagatcctggacaggtatgtgcaggaacagatccccggggctaaagtggtcgtggagtccattggcgctcggcgccacggggacgcctttagtcttgaggactacacaaagtgcgacctgacggtctacgcaatcgacccacagactaaccgcgcaatcgaccgtaacgagttgttcaagttcctggacggaaagttacttgacatcaacaaggactttcagccgtactatggagagggcggacggattttggaaatccgtactcctgaagcagttacctctatcaaaaaaaggggcgagagtctgggctacaccgagggagctcttttagccctcgccttcatcattattttgtgttgcattcccgcgatcttggtcgtgctggtgagctatagacagttcaaggtccgacaggcggaatgcaccaagacagccaggatccaggcggcactgcccgctgcaaaacccgccgtgcctgcacctgccccggtagcagctccaccccccccacccccaccccccccaggagcacacctgtacgaggagctcggcgattcttccatgcacaatttgttcctactctaccatttccagcagtctcgaggcaacaactccgtatccgaagacaggaagcatcaacaagtggtgatgcctttttcatccaacaccattgaggctcacaagagcgcgcatgtagatggatccttaaaatctaacaaactcaagtcagcaaggaagtttacattcctgagcgacgaggatgacctctctgcccacaatccactctataaggaaaacatttcacaggtctctaccaacagcgatattagccagcgtacggactttgtggatcctttttctcccaagatccaggccaagagcaaaagtctaaggggtccccgcgaaaagatccagaggttgtggtctcagtctgtgagcctgcccagacgtttgatgagaaaagtgcccaaccgccctgagattatcgatttgcagcagtggcaaggtaccagacagaaagcagagaacgaaaacactggcatctgcaccaacaaacgaggttcctccaaccccctgctcaccactgaggaagctaacctgaccgaaaaagaagaaatcaggcagggcgagaccctgatgatagaaggaaccgagcagctgaaatcactgtccagtgattcctccttttgttttcctagaccccacttcagcttttctaccctgccaaccgtatctcggaccgtggaactgaagtctgagcccaatgtgatttctagtccagccgaatgcagcctggagctttcaccctccaggccctgcgtgttgcattcatcgctgagtaggagagagacacctatctgtatgctgcccattgagaccgaacgaaacatcttcgaaaactttgctcacccccctaatatcagccctagtgcctgtccgctgcccccaccccccccgatctcacctccctctccacctcccgcaccagccccactagccccaccacccgatatcagcccattttcccttttctgtccacccccatctcccccatccatccccctccctctgccaccccccacatttttcccactgtcggtttcgacaagcggaccccctacacctcccttgctgccccctttcccaacgcccctgcccccccctccgccttcaataccctgtccaccccctcccagtgccagcttcctcagcacggagtgcgtgtgcattaccggcgtgaaatgtacaactaatctcatgcctgcggagaagatcaagagctctatgacccagctctctactaccacagtgtgcaagaccgaccctcagcgggagccgaagggcatcttgaggcacgtgaaaaacctggccgagcttgagaaatcagttgccaacatgtactcccagattgaaaagaactatttacggacaaacgtctcggagctgcagactatgtgtccatcagaggtcaccaatatggagatcacaagcgagcagaacaagggttctctgaacaatattgttgaagggaccgagaagcagtcacacagccagagcacctccctatag

SEQ ID NO: 54557 - DNA, 279 bp, Artificial Sequence
  derived and/or modified sequence
atgttccggcagttctacctgtggacctgcctggccagcggcatcattttggggagcttgttcgaaatatgcctggggcagtatgacgatgattgtaaactggcccgcggcggcccacctgccacgattgtggcgattgatgaggagagccggaatgggacaatactcgtggataacatgctcatcaaaggaacagctggcggccccgaccccaccattgagctcagcctgaaagataatgtggactactgggtgctgatggatcctgtgaaacaatag

SEQ ID NO: 54558 - DNA, 5873 bp, Artificial Sequence
  derived and/or modified sequence
atgtttaggcagttttacttgtggacatgcctggcctccggtatcattttagggtcactctttgagatttgcctggggcaatacgatgacgattgcaagcttgcacgtggcggtccgcctgctacaattgtcgctattgacgaagagagtagaaacggaaccatcttggtcgacaatatgcttatcaaaggaacagccggagggcctgatccaacgattgaactcagtctgaaggataacgtcgactactgggtgctcatggatcctgtcaagcaaatgctgttcctgaattctaccggtcgggtcctagaccgggaccctcccatgaatatccattccatcgttgtccaagtgcagtgtataaataaaaaggtgggtactatcatttatcacgaggttcgtattgtggtgagggatcgcaacgacaactcacccaccttcaaacacgagtcttactatgcaaccgtaaatgaactgacccctgtggggaccactatatttacagggttttccggggacaatggtgccacagacatcgacgatggccctaatggacaaatcgagtatgtcattcagtataatccagatgacccaacttcgaatgataccttcgaaattcccctcatgctgactgggaacatcgttttgcgcaaaaggctaaattatgaggacaagacgaggtattttgtgattatacaagctaacgatcgagcccagaacttgaatgagagaagaactactacaaccactctcaccgttgatgtcctagatggcgatgacctggggcctatgttcctcccctgtgtactggtcccaaatacacgagattgtagacccctgacttatcaggccgcaatccccgagctacgcactcctgaagaactgaaccccatcattgtaacacccccaatccaggccatcgatcaggacaggaatattcagcccccttcagataggcctgggattctttattccatcctggtgggcaccccggaagactacccaaggttttttcatatgcacccacgtactgccgaactgtcactgctagagcctgtgaaccgcgactttcaccagaaatttgacttggtaattaaagctgagcaagataacgggcacccccttcccgctttcgctgggctgcacattgagatattagatgaaaataaccagagcccctacttcactatgccgagctatcaagggtacatccttgagtcagcccctgtgggggcaaccatctccgactctctgaacctgacatctcctctgcgtatcgtcgcactggacaaagatatcgaagataccaaggaccccgaactgcacctgtttctcaatgattatacaagtgtcttcactgtgactcaaacaggcataaccaggtacttaaccctccttcagcccgtcgatcgggaagaacagcagacgtataccttctctatcacagcttttgacggcgtacaggagagcgaaccagtaatcgtgaatattcaagtgatggatgcgaacgacaacacacctacctttccagaaatctcatacgacgtatatgtctatactgatatgcggcctggggacagtgtcatacagctaacagcagtggatgcagatgagggaagcaatggcgagataacgtatgagatcttggtcggtgcccagggcgatttcattattaataagactactggcctcataacaatcgccccaggcgtagagatgatcgtggggagaacatacgctctgaccgtacaggcagctgacaatgcaccccctgcagagcgtcgaaactcaatttgcactgtctatatcgaagtgcttcctccaaacaatcagtcacccccacgctttccacagcttatgtattccctggagatcagtgaagcaatgcgggtgggcgctgttctgctaaatttacaggctactgaccgagaaggcgattcgatcacttacgccatcgaaaatggcgacccacagagggtgttcaatctgagcgaaactactggtatccttaccttgggaaaggccttggaccgggaatccaccgatcgatatatcctcataattaccgcatctgacggccgtccagacggaacatccacagccacagtaaatatcgtggtgacagatgtcaatgataacgctccagtgtttgatccttacctgccgaggaacctgtctgtggttgaggaagaagccaacgcctttgtggggcaggtgaaagccacagatcctgatgcaggaatcaatgggcaggttcattactctctgggaaattttaacaatctgttccggatcacgagcaacggctctatctacaccgccgtcaagctgaaccgggaagttcgtgattactacgagctagtggtagtggcaactgacggggctgtgcatccccgacacagtaccctgacccttgcaatcaaggtgctggacatcgatgacaactcccctgtttttaccaactccacttatacggtgctggtcgaggaaaatttacctgcagggactacaattctgcagatcgaagccaaagacgttgatctcggcgcaaacgtgagctatagaattagaagtcctgaggtgaagcacttttttgccctacacccctttactggcgaattgtccctccttcggtcactcgactatgaagctttcccagaccaagaagcctctatcactttcttagtggaagcattcgacatctatggcaccatgccgccagggatcgcgactgtgaccgtgatagtaaaggacatgaatgactaccctcccgtgttttctaagcggatctataaggggatggtggcaccagacgcggtgaaggggaccccaataaccaccgtgtatgcagaagacgctgatccccctggcctgcctgcatcacgggtgcgatatagggtggacgatgtccagttcccctacccagccagcattttcgaggtggaagaagacagtgggagagtcattacccgggtaaatcttaacgaggagcccacaacaatcttcaagcttgtggttgtggcgttcgatgacggcgagccagtcatgtcgtcctcagcgactgttaagattttggtgcttcaccccggagaaattccacgctttacgcaggaggagtaccggccaccacctgtgagcgagctggccaccaagggaaccatggtgggagtcataagcgccgcagctatcaatcagtcgattgtctattccatcgtgtctggcaacgaggaagacactttcggaataaacaatatcactggagtgatctacgtcaacgggccactggactacgaaaccagaacatcctacgtattgagagttcaggctgacagtctagaagtggtcctcgctaatttgcgggtgcccagcaagtcgaacaccgccaaagtgtacatcgagattcaggatgaaaataaccaccctccagtgttccagaagaaattttacatcggaggagtctccgaagacgctcgcatgttcacatccgtcctgagggtgaaagccaccgacaaagacaccggcaattatagcgtgatggcgtatcggctgatcattcctccaatcaaggagggcaaagagggttttgtggtagaaacatacaccgggctgattaaaaccgccatgttgttccacaatatgcgcaggtcctactttaagtttcaggtaatagctacagatgactacggaaaagggctgtccggaaaagccgatgtattggtgtctgtcgtaaaccaactcgatatgcaggtcatcgtcagcaatgtcccacccaccctagtggaaaagaaaatagaggatttaaccgaaatcctcgacaggtatgttcaggaacagatcccaggtgccaaggtggtggtggagtcaatcggcgcaagaagacacggggatgcattttcactcgaggactacactaaatgcgatttgacagtatatgctattgatccacaaacgaaccgcgcaattgatcggaatgagttgttcaagtttttggacgggaaacttctggacatcaataaagactttcagccatactacggtgaaggaggtcggatcctggaaatcagaacacctgaagcagtcacgagtatcaagaagcggggagaatcgctgggctacaccgagggcgcactgctagcccttgcctttattatcattctttgctgcatccccgcaatattagtggtgttagtgtcttatcggcagttcaaagttcggcaggccgaatgtactaagactgcccgtattcaggcagccttgcctgctgctaagcctgccgtacctgcgcctgctcctgttgctgcgcctccaccacctccccctcctccgccaggcgcacacttatatgaagaactcggagacagtagtatgcacaatctgtttctcttgtatcactttcagcaatcaagagggaacaatagcgtgagcgaggaccgcaagcatcagcaagtggtaatgcccttcagctctaatactatcgaggcacacaaatctgctcatgtggatggttcgttaaaaagcaacaagctgaaatctgctcgaaaattcacatttttaagcgacgaggacgatttatctgcgcacaaccccttatataaagaaaacatttcccaggtgagcaccaactccgacatatcacagcgaacagatttcgtagacccattttcacctaagatccaagcaaagagcaaaagcctccgcggaccacgggagaagatccagaggctatggagccaatccgtgagcctcccacgcaggttgatgcgcaaggtgcccaaccgccctgagataatagacctgcaacagtggcaagggaccagacagaaggctgagaatgaaaatactggaatttgtaccaacaagcgtggaagctctaacccgctcctgaccacagaggaagccaatctcacagagaaggaggaaatacgccagggcgaaacccttatgatagagggaaccgagcaactaaagtcactttctagtgactctagtttctgtttcccccgacctcatttctctttttctaccctgccgacggtttcccgaacagtggagctgaagagtgagccaaacgtaattagcagcccagcagagtgctccctggagctgagtccttctcgaccctgtgttctgcactcctccctgagccgaagggagactccaatttgtatgctgcctatcgaaacggagagaaatatctttgagaactttgcccaccctcctaacatcagtccatcggcttgccctctccctccccctcccccaatttcgccacccagcccccctccggcacccgctcccctggctcctccgccagacatcagcccgttctctctattctgcccacccccaagtcctccgtctattccactcccattgcctcccccaacattctttcctctgagcgtgtcgacttccggacctccaaccccccctctactcccaccgttccccactcccttgcctcctccgccaccaagtatcccctgtcccccaccacccagcgcttcatttctgtctacagagtgtgtatgcattacaggagtgaagtgtacaacaaatttgatgccagccgaaaagattaagagcagcatgacacagttgtcaaccacaaccgtttgcaaaacggatcctcagagagaacctaagggcatcctcagacatgtgaaaaacctggctgaacttgaaaaatccgtggcaaacatgtacagtcagatcgaaaagaactacctacggacaaacgtgagtgagctccagactatgtgcccatctgaagtaacaaacatggagataacatccgaacagaataaagggtcactgaacaacatcgtggagggaactgagaaacagtctcattcacagtcaaccagcttata

SEQ ID NO: 54559 - DNA, 279 bp, Artificial Sequence
  derived and/or modified sequence
atgttccggcagttctatctctggacttgtttagcatctgggattatactgggctctctctttgaaatttgtctcggacagtatgacgatgactgcaaacttgcccgagggggaccccctgctacgatcgttgctatagacgaggagtcccgcaatgggacaattcttgttgacaacatgctgatcaaggggacagctggcggaccagacccgacaattgagctgagccttaaagataatgtcgattattgggtgctcatggatcctgtgaaacaatag

SEQ ID NO: 54560 - DNA, 6957 bp, Artificial Sequence
  derived and/or modified sequence
caacgtgctgagctaatagcgacagatagagggcagacagattcctgctagcagcttagtgttagttgcttgtggtaactaaggcaggtggcatacatctcagaacgtggagaatgatggtatgctttctgagttaacatgttgaactgttttgcttttctaaaaattttcctagtaacattttcttgatgatatgagagtggatatcaatgcctcacagaaacaagaggtggaacatgtgaatgaatcgtcttggaactagattatgagcactggttctttttaaagggatgtgcaagaggcagccttggcaagaaaacttgctgcataatcttacatggactaaagatgaaactttaaaccgcaaatcagctttgagtgaactttgacagaagatgtttcgacagttttatctctggacatgtttagcttcagggatcatcctgggctctctctttgaaatctgcttgggccagtatgatgatgattgcaaactagctaggggaggaccaccagctaccatagttgctattgatgaagaaagtcggaatggtacaattctggtggacaacatgctgatcaaagggactgctggaggaccagaccccaccatagaactttctttaaaggataatgtggattactgggtgttgatggatcctgttaagcaaatgcttttcctgaacagcaccggaagagttctggatagagatccaccgatgaacatacactccattgtggtgcaggtccagtgcatcaacaaaaaagtgggcactattatctaccatgaagtgcgaatagtggtgagagacaggaatgacaactcacccactttcaagcatgaaagctactatgccacagtgaatgagctcactccagttggtaccacaatattcacaggattttcaggagacaatggagctacagatatagatgatggaccaaatggacagatagagtatgttattcagtataatccagatgatccgacatccaatgacacctttgaaattcccctaatgttgactggaaatatagtgttaaggaagaggctcaactatgaagataagactcgctactttgtcataatccaagctaatgaccgtgcccaaaatctgaatgagaggcgaaccaccaccaccactctcacagtggatgttctggatggagatgacttgggtccaatgtttcttccttgtgtccttgtgccaaacactcgtgattgccgtccactcacttatcaagctgccatacctgagttgagaactccggaagaactgaaccccattattgttacgccaccaatccaagccattgatcaggaccggaatattcaaccgccatcagataggccaggaatcctctattccatccttgttgggactcctgaggattacccacgatttttccatatgcatcctaggacagcagaacttagtctcctggagccagtaaacagagactttcaccagaaatttgatttggttattaaggctgaacaagacaatggtcatcctcttcctgcctttgccggtctacacattgaaatactggatgaaaacaatcaaagtccatattttacaatgcccagttatcaaggctatatcctggaatctgccccagtgggagcaaccatttcggacagtctcaatttgacttcacctttaagaatagtagctctggacaaggacatagaagatacaaaagacccagagcttcacctttttctgaatgactacacctcagtcttcaccgtcacacagactggtattactcgctacctcaccttacttcaaccagtggacagggaagaacagcaaacttacaccttttcgataacagcatttgatggtgtacaagaaagtgagccagtcatcgtcaatattcaagtgatggatgcaaatgataacacgccaaccttccctgaaatatcctatgatgtgtatgtttatacagacatgagacctggggacagtgtcatacagctcactgcagtcgacgcagacgaagggtcaaatggggagatcacatatgaaatccttgttggggctcagggagacttcatcatcaataaaacaacagggcttatcaccatcgctccaggggtggaaatgatagtcgggcggacttacgcactcacggtccaagcagcggataatgctcctcctgcagagcgaaggaactccatctgcactgtgtatattgaagtgcttccaccaaataatcaaagccctcctcgcttcccacagctgatgtatagccttgaaattagtgaagccatgagggttggtgctgttttattaaatctacaggcaactgatcgagagggagactcaataacatatgccattgagaatggagatcctcagagagtttttaatctttcagaaaccacggggattctaaccttagggaaagcactggacagggaaagcactgatcgctacattctgatcatcacagcttcagatggcaggccagatgggacctcaactgccacagtaaacatagtggtgacagatgtcaatgacaatgctccagtgtttgatccttatctgccaagaaatttatctgtggtggaagaagaagccaatgcctttgtgggtcaagtaaaagcaacagaccctgatgctggaataaatggtcaagtgcactacagtttgggtaactttaataatctttttcgtatcacatccaatgggagcatttacacagcagtgaagcttaacagagaagtcagggactactatgaacttgttgttgtggcaacagatggagcagtacaccctcgtcattcaactctaaccttggccatcaaggttttggacattgatgataacagtcctgtgttcaccaattcaacatacactgtccttgttgaagagaatttgccagctgggactaccatccttcaaatagaggccaaagatgtcgaccttggagcaaatgtgtcttaccggataagaagcccagaagtgaagcacttttttgcactacatccatttacaggagaactatcgcttttaaggagtttagattatgaggcatttccagaccaagaagcaagtatcacttttctggtagaggcctttgatatttatggaacaatgccacctggtattgctactgtcacagtgattgtaaaggatatgaatgattatcctcctgtctttagtaaacgaatatacaaagggatggtggctccggatgcagtcaagggtacacctatcacaacagtttatgctgaagatgcagaccctcctggattacctgcaagtcgtgtgaggtatagagtagatgatgtacagtttccttaccctgccagtatttttgaagtggaagaagattctggaagagtaataacacgagtcaatcttaatgaagaacctacaacaatttttaagttggtggtggttgcttttgatgatggggagcctgtgatgtccagcagtgccacagtgaagattcttgtcttacatcctggtgagatcccacgcttcacacaggaggaatatagacctcctccagtaagtgaacttgccaccaaagggaccatggttggtgtaatttctgctgctgccattaatcaaagtattgtgtactccattgtttcaggaaatgaagaagatacatttggaattaataacatcacaggtgttatctatgtgaatggacctctggattatgagaccaggacaagctatgtacttcgagtccaagctgattccctggaagtggtccttgccaatctccgagttccttcaaaaagcaatacagctaaagtatacattgagattcaggatgaaaataatcatcccccagtgtttcagaaaaaattctacatcggaggtgtatctgaagatgcaagaatgtttacttctgtactcagagtgaaggctactgataaagatactggcaattatagtgtcatggcctacagactcataataccaccaattaaagagggaaaagaaggatttgtagtggaaacatatacagggcttatcaaaactgctatgctcttccataatatgaggagatcctacttcaagtttcaagttattgcaactgacgactatgggaagggactgagcggcaaagccgatgtactcgtctccgtggtcaatcagctggatatgcaagtcattgtttccaatgtgcctcctactctagtggaaaaaaagatagaagatcttacagagatcttggatcgctatgttcaggaacaaattcctggtgccaaggtcgtagtggagtccattggagctcgccggcatggagatgccttttccctagaagattacaccaaatgtgacttgactgtctatgcaattgacccccaaaccaacagagccatcgatagaaatgagctttttaaatttttggatggcaaactacttgatatcaataaagactttcagccgtattatggggaaggaggacgcattctggagatccggactccagaggcagtgaccagcattaaaaagagaggagaaagtctaggatacacagaaggggccttgttggctctggccttcatcatcatcctctgctgcattcctgccatcttggtggttttggtcagctacagacagtttaaagtacgtcaagctgagtgtacaaagactgcacgaattcaggccgcattacccgcggctaaaccagcagtgccggctcctgcaccagtggcagcgcccccgccgccgccgccgcctccgccaggtgcgcatctctatgaagaacttggagacagctcaatgcataatcttttccttctctaccattttcaacaaagcaggggaaataactcagtctcagaagacaggaaacatcaacaagttgtgatgcccttttcttccaatactattgaggctcacaagtcagctcatgtagacggatcacttaagagcaacaaactgaagtctgcaagaaaattcacatttctatctgatgaggatgacttaagtgcccataatcccctttataaggaaaacataagtcaagtatcaacaaattcagacatttcacagagaacagattttgtagacccattttcacccaaaatacaagccaagagtaagtctctgaggggcccaagagaaaagattcagaggctgtggagtcagtcagtcagcttacccaggaggctgatgaggaaagttccaaatagaccagagatcatagatctgcagcagtggcaaggcaccaggcagaaagctgaaaatgaaaacactggaatctgtacaaacaaaagaggtagcagcaatccattgcttacaactgaagaggcaaatttgacagagaaagaggaaataaggcaaggtgaaacactgatgatagaaggaacagaacagttgaaatctctctcttcagactcttcattttgctttcccaggcctcacttctcattctccactttgccaactgtttcaagaactgtggaactcaaatcagaacctaatgtcatcagttctcctgctgagtgttccttggaactttctccttcaaggccttgtgttttacattcttcactctctaggagagagacacctatttgtatgttacctattgaaaccgaaagaaatatttttgaaaattttgcccatccaccaaacatctctccttctgcctgtccccttccccctcctcctcctatttctcctccttctcctcctcctgctcctgctcctcttgctcctcctcctgacatttctcctttttctcttttttgtcctcctccctctcctccttctatccctcttcctcttcctcctcctacattttttccactttccgtttcaacgtctggtcccccaacaccacctcttctacctccatttccaactcctcttcctccaccacctccttctattccttgccctccacctccttcagcttcatttctgtccacagagtgtgtctgtataacaggtgttaaatgcacgaccaacttgatgcctgccgagaaaattaagtcctctatgacacagctatcaacaacgacagtgtgtaaaacagaccctcagagagaaccaaaaggcatcctcagacacgttaaaaacttagcagaacttgaaaaatcagtagctaacatgtacagtcaaatagaaaaaaactatctacgcacaaatgtttcagaacttcaaactatgtgcccttcagaagtaacaaatatggaaatcacatctgaacaaaacaaggggagtttgaacaatattgtcgagggaactgaaaaacaatctcacagtcaatctacttcactgtaatgttgcttttcttattttagtcgggcaaacctcttgttgatcatagtcttcaagttgaacatcaaatttgaacgtcaaagaagactctattattttaccccaaattcaatgaaatgcagttttttttctcgtttttaatttaaaaagatattaacctcatcactactaactcactcatataatagatttaccttactttttaaaaactacaaagtagcataatttgttctacatttatttgaaaagtaagtaattttaatctcttttttagtgggaatatgtgggcatgaaaattagatacccaacttaaaccaaaggcatgtctatcatgtggatgcagtaacatttacatttagtttttgatcgtagttttatatgaatgttccaagaaaaaagcagactgttacaaataagttaaaactgatatgattgataggttctgttttttcttgaagcctatgtatttggtaagaagaaatactaccgaagtaaaatataatgtacctagattgtaggagatgacagacataaggtatttcaaaataaatctcaggtgctataacatgtagtcatctgttttctgataagaacatcttttactctgacttgcttttatcttagtagtatgcttatggatttagtagtatgcttatggatttgataaatcttatactttttcagttgctgt

SEQ ID NO: 54561 - DNA, 448 bp, Artificial Sequence
  derived and/or modified sequence
tatgcaggatttccaggaaaatggaaacatcattccctagaaacagttgaagttgacagacctagaggttgacaaaaggacacgacactagggaatttgcattgtcatgtttcgaaataccattccaaagacctgcaaataagatcagctttgagtgaactttgacagaagatgtttcgacagttttatctctggacatgtttagcttcagggatcatcctgggctctctctttgaaatctgcttgggccagtatgatgatgattgcaaactagctaggggaggaccaccagctaccatagttgctattgatgaagaaagtcggaatggtacaattctggtggacaacatgctgatcaaagggactgctggaggaccagaccccaccatagaactttctttaaaggataatgtggattactgggtgttgatggatcctgttaagcaaa

SEQ ID NO: 54562 - DNA, 5874 bp, Artificial Sequence
  derived and/or modified sequence
atgttcagacagttctacctgtggacctgcctggccagcggcatcatcctgggcagcctgttcgagatctgcctgggccagtacgacgacgactgcaagctggccagaggcggcccccccgccaccatcgtggccatcgacgaggagagcagaaacggcaccatcctggtggacaacatgctgatcaagggcaccgccggcggccccgaccccaccatcgagctgagcctgaaggacaacgtggactactgggtgctgatggaccccgtgaagcagatgctgttcctgaacagcaccggcagagtgctggacagagacccccccatgaacatccacagcatcgtggtgcaggtgcagtgcatcaacaagaaggtgggcaccatcatctaccacgaggtgagaatcgtggtgagagacagaaacgacaacagccccaccttcaagcacgagagctactacgccaccgtgaacgagctgacccccgtgggcaccaccatcttcaccggcttcagcggcgacaacggcgccaccgacatcgacgacggccccaacggccagatcgagtacgtgatccagtacaaccccgacgaccccaccagcaacgacaccttcgagatccccctgatgctgaccggcaacatcgtgctgagaaagagactgaactacgaggacaagaccagatacttcgtgatcatccaggccaacgacagagcccagaacctgaacgagagaagaaccaccaccaccaccctgaccgtggacgtgctggacggcgacgacctgggccccatgttcctgccctgcgtgctggtgcccaacaccagagactgcagacccctgacctaccaggccgccatccccgagctgagaacccccgaggagctgaaccccatcatcgtgaccccccccatccaggccatcgaccaggacagaaacatccagccccccagcgacagacccggcatcctgtacagcatcctggtgggcacccccgaggactaccccagattcttccacatgcaccccagaaccgccgagctgagcctgctggagcccgtgaacagagacttccaccagaagttcgacctggtgatcaaggccgagcaggacaacggccaccccctgcccgccttcgccggcctgcacatcgagatcctggacgagaacaaccagagcccctacttcaccatgcccagctaccagggctacatcctggagagcgcccccgtgggcgccaccatcagcgacagcctgaacctgaccagccccctgagaatcgtggccctggacaaggacatcgaggacaccaaggaccccgagctgcacctgttcctgaacgactacaccagcgtgttcaccgtgacccagaccggcatcaccagatacctgaccctgctgcagcccgtggacagagaggagcagcagacctacaccttcagcatcaccgccttcgacggcgtgcaggagagcgagcccgtgatcgtgaacatccaggtgatggacgccaacgacaacacccccaccttccccgagatcagctacgacgtgtacgtgtacaccgacatgagacccggcgacagcgtgatccagctgaccgccgtggacgccgacgagggcagcaacggcgagatcacctacgagatcctggtgggcgcccagggcgacttcatcatcaacaagaccaccggcctgatcaccatcgcccccggcgtggagatgatcgtgggcagaacctacgccctgaccgtgcaggccgccgacaacgccccccccgccgagagaagaaacagcatctgcaccgtgtacatcgaggtgctgccccccaacaaccagagcccccccagattcccccagctgatgtacagcctggagatcagcgaggccatgagagtgggcgccgtgctgctgaacctgcaggccaccgacagagagggcgacagcatcacctacgccatcgagaacggcgacccccagagagtgttcaacctgagcgagaccaccggcatcctgaccctgggcaaggccctggacagagagagcaccgacagatacatcctgatcatcaccgccagcgacggcagacccgacggcaccagcaccgccaccgtgaacatcgtggtgaccgacgtgaacgacaacgcccccgtgttcgacccctacctgcccagaaacctgagcgtggtggaggaggaggccaacgccttcgtgggccaggtgaaggccaccgaccccgacgccggcatcaacggccaggtgcactacagcctgggcaacttcaacaacctgttcagaatcaccagcaacggcagcatctacaccgccgtgaagctgaacagagaggtgagagactactacgagctggtggtggtggccaccgacggcgccgtgcaccccagacacagcaccctgaccctggccatcaaggtgctggacatcgacgacaacagccccgtgttcaccaacagcacctacaccgtgctggtggaggagaacctgcccgccggcaccaccatcctgcagatcgaggccaaggacgtggacctgggcgccaacgtgagctacagaatcagaagccccgaggtgaagcacttcttcgccctgcaccccttcaccggcgagctgagcctgctgagaagcctggactacgaggccttccccgaccaggaggccagcatcaccttcctggtggaggccttcgacatctacggcaccatgccccccggcatcgccaccgtgaccgtgatcgtgaaggacatgaacgactacccccccgtgttcagcaagagaatctacaagggcatggtggcccccgacgccgtgaagggcacccccatcaccaccgtgtacgccgaggacgccgacccccccggcctgcccgccagcagagtgagatacagagtggacgacgtgcagttcccctaccccgccagcatcttcgaggtggaggaggacagcggcagagtgatcaccagagtgaacctgaacgaggagcccaccaccatcttcaagctggtggtggtggccttcgacgacggcgagcccgtgatgagcagcagcgccaccgtgaagatcctggtgctgcaccccggcgagatccccagattcacccaggaggagtacagacccccccccgtgagcgagctggccaccaagggcaccatggtgggcgtgatcagcgccgccgccatcaaccagagcatcgtgtacagcatcgtgagcggcaacgaggaggacaccttcggcatcaacaacatcaccggcgtgatctacgtgaacggccccctggactacgagaccagaaccagctacgtgctgagagtgcaggccgacagcctggaggtggtgctggccaacctgagagtgcccagcaagagcaacaccgccaaggtgtacatcgagatccaggacgagaacaaccacccccccgtgttccagaagaagttctacatcggcggcgtgagcgaggacgccagaatgttcaccagcgtgctgagagtgaaggccaccgacaaggacaccggcaactacagcgtgatggcctacagactgatcatcccccccatcaaggagggcaaggagggcttcgtggtggagacctacaccggcctgatcaagaccgccatgctgttccacaacatgagaagaagctacttcaagttccaggtgatcgccaccgacgactacggcaagggcctgagcggcaaggccgacgtgctggtgagcgtggtgaaccagctggacatgcaggtgatcgtgagcaacgtgccccccaccctggtggagaagaagatcgaggacctgaccgagatcctggacagatacgtgcaggagcagatccccggcgccaaggtggtggtggagagcatcggcgccagaagacacggcgacgccttcagcctggaggactacaccaagtgcgacctgaccgtgtacgccatcgacccccagaccaacagagccatcgacagaaacgagctgttcaagttcctggacggcaagctgctggacatcaacaaggacttccagccctactacggcgagggcggcagaatcctggagatcagaacccccgaggccgtgaccagcatcaagaagagaggcgagagcctgggctacaccgagggcgccctgctggccctggccttcatcatcatcctgtgctgcatccccgccatcctggtggtgctggtgagctacagacagttcaaggtgagacaggccgagtgcaccaagaccgccagaatccaggccgccctgcccgccgccaagcccgccgtgcccgcccccgcccccgtggccgcccccccccccccccccccccccccccccggcgcccacctgtacgaggagctgggcgacagcagcatgcacaacctgttcctgctgtaccacttccagcagagcagaggcaacaacagcgtgagcgaggacagaaagcaccagcaggtggtgatgcccttcagcagcaacaccatcgaggcccacaagagcgcccacgtggacggcagcctgaagagcaacaagctgaagagcgccagaaagttcaccttcctgagcgacgaggacgacctgagcgcccacaaccccctgtacaaggagaacatcagccaggtgagcaccaacagcgacatcagccagagaaccgacttcgtggaccccttcagccccaagatccaggccaagagcaagagcctgagaggccccagagagaagatccagagactgtggagccagagcgtgagcctgcccagaagactgatgagaaaggtgcccaacagacccgagatcatcgacctgcagcagtggcagggcaccagacagaaggccgagaacgagaacaccggcatctgcaccaacaagagaggcagcagcaaccccctgctgaccaccgaggaggccaacctgaccgagaaggaggagatcagacagggcgagaccctgatgatcgagggcaccgagcagctgaagagcctgagcagcgacagcagcttctgcttccccagaccccacttcagcttcagcaccctgcccaccgtgagcagaaccgtggagctgaagagcgagcccaacgtgatcagcagccccgccgagtgcagcctggagctgagccccagcagaccctgcgtgctgcacagcagcctgagcagaagagagacccccatctgcatgctgcccatcgagaccgagagaaacatcttcgagaacttcgcccacccccccaacatcagccccagcgcctgccccctgcccccccccccccccatcagcccccccagccccccccccgcccccgcccccctggcccccccccccgacatcagccccttcagcctgttctgccccccccccagcccccccagcatccccctgcccctgcccccccccaccttcttccccctgagcgtgagcaccagcggcccccccaccccccccctgctgccccccttccccacccccctgcccccccccccccccagcatcccctgcccccccccccccagcgccagcttcctgagcaccgagtgcgtgtgcatcaccggcgtgaagtgcaccaccaacctgatgcccgccgagaagatcaagagcagcatgacccagctgagcaccaccaccgtgtgcaagaccgacccccagagagagcccaagggcatcctgagacacgtgaagaacctggccgagctggagaagagcgtggccaacatgtacagccagatcgagaagaactacctgagaaccaacgtgagcgagctgcagaccatgtgccccagcgaggtgaccaacatggagatcaccagcgagcagaacaagggcagcctgaacaacatcgtggagggcaccgagaagcagagccacagccagagcaccagcctgtag

SEQ ID NO: 54563 - DNA, 279 bp, Artificial Sequence
  derived and/or modified sequence
atgttcagacagttctacctgtggacctgcctggccagcggcatcatcctgggcagcctgttcgagatctgcctgggccagtacgacgacgactgcaagctggccagaggcggcccccccgccaccatcgtggccatcgacgaggagagcagaaacggcaccatcctggtggacaacatgctgatcaagggcaccgccggcggccccgaccccaccatcgagctgagcctgaaggacaacgtggactactgggtgctgatggaccccgtgaagcagtag

SEQ ID NO: 54564 - protein, 719 aa, Artificial Sequence
  derived and/or modified sequence
MFRQFYLWTCLASGIILGSLFEICLGQYDDDCKLARGGPPATIVAIDEESRNGTILVDNMLIKGTAGGPDPTIELSLKDNVDYWVLMDPVKQMLFLNSTGRVLDRDPPMNIHSIVVQVQCINKKVGTIIYHEVRIVVRDRNDNSPTFKHESYYATVNELTPVGTTIFTGFSGDNGATDIDDGPNGQIEYVIQYNPDDPTSNDTFEIPLMLTGNIVLRKRLNYEDKTRYFVIIQANDRAQNLNERRTTTTTLTVDVLDGDDLGPMFLPCVLVPNTRDCRPLTYQAAIPELRTPEELNPIIVTPPIQAIDQDRNIQPPSDRPGILYSILVGTPEDYPRFFHMHPRTAELSLLEPVNRDFHQKFDLVIKAEQDNGHPLPAFAGLHIEILDENNQSPYFTMPSYQGYILESAPVGATISDSLNLTSPLRIVALDKDIEDEEPKKIKKPKVEIREPSEEEEVVVTIEKPPAAEPTYTTWKRARIFPMIFKKVRGLADKRGIVDLEGEEWQRRLEEEDKDYLKLTLDQEEATESTVESEEESSSDYTEYSEEESEFSESETTEEESESETPSEEEESSTPESEESESTESEGEKARKNIVLARRRPMVEEVKEVKGRKEEPQEEQKEPKMEEEEHSEEEESGPAPVEESTDPEAQDIPEEGSAESASVEGGVESEEESESGSSSSSSESQSGGPWGYQVPAYDRSKNANQKKSPGANSEGYNTAL

SEQ ID NO: 54565 - protein, 650 aa, Artificial Sequence
  derived and/or modified sequence
MFRQFYLWTCLASGIILGSLFEICLGQYDDDCKLARGGPPATIVAIDEESRNGTILVDNMLIKGTAGGPDPTIELSLKDNVDYWVLMDPVKQMLFLNSTGRVLDRDPPMNIHSIVVQVQCINKKVGTIIYHEVRIVVRDRNDNSPTFKHESYYATVNELTPVGTTIFTGFSGDNGATDIDDGPNGQIEYVIQYNPDDPTSNDTFEIPLMLTGNIVLRKRLNYEDKTRYFVIIQANDRAQNLNERRTTTTTLTVDVLDGDDLGPMFLPCVLVPNTRDCRPLTYQAAIPELRTPEELNPIIVTPPIQAIDQDRNIQPPSDRPGILYSILVGTPEDYPRFFHMHPRTAELSLLEPVNRDFHQKFDLVIKEEPKKIKKPKVEIREPSEEEEVVVTIEKPPAAEPTYTTWKRARIFPMIFKKVRGLADKRGIVDLEGEEWQRRLEEEDKDYLKLTLDQEEATESTVESEEESSSDYTEYSEEESEFSESETTEEESESETPSEEEESSTPESEESESTESEGEKARKNIVLARRRPMVEEVKEVKGRKEEPQEEQKEPKMEEEEHSEEEESGPAPVEESTDPEAQDIPEEGSAESASVEGGVESEEESESGSSSSSSESQSGGPWGYQVPAYDRSKNANQKKSPGANSEGYNTAL

SEQ ID NO: 54566 - protein, 1886 aa, Artificial Sequence
  derived and/or modified sequence
MFRQFYLWTCLASGIILGSLFEICLGQYDDDCKLARGGPPATIVAIDEESRNGTILVDNMLIKGTAGGPDPTIELSLKDNVDYWVLMDPVKQMLFLNSTGRVLDRDPPMNIHSIVVQVQCINKKVGTIIYHEVRIVVRDRNDNSPTFKHESYYATVNELTPVGTTIFTGFSGDNGATDIDDGPNGQIEYVIQYNPDDPTSNDTFEIPLMLTGNIVLRKRLNYEDKTRYFVIIQANDRAQNLNERRTTTTTLTVDVLDGDDLGPMFLPCVLVPNTRDCRPLTYQAAIPELRTPEELNPIIVTPPIQAIDQDRNIQPPSDRPGILYSILVGTPEDYPRFFHMHPRTAELSLLEPVNRDFHQKFDLVIKAEQDNGHPLPAFAGLHIEILDENNQSPYFTMPSYQGYILESAPVGATISDSLNLTSPLRIVALDKDIEDTKDPELHLFLNDYTSVFTVTQTGITRYLTLLQPVDREEQQTYTFSITAFDGVQESEPVIVNIQVMDANDNTPTFPEISYDVYVYTDMRPGDSVIQLTAVDADEGSNGEITYEILVGAQGDFIINKTTGLITIAPGVEMIVGRTYALTVQAADNAPPAERSTGILTLGKALDRESTDRYILIITASDGRPDGTSTATVNIVVTDVNDNAPVFDPYLPRNLSVVEEEANAFVGQVKATDPDAGINGQVHYSLGNFNNLFRITSNGSIYTAVKLNREVRDYYELVVVATDGAVHPRHSTLTLAIKVLDIDDNSPVFTNSTYTVLVEENLPAGTTILQIEAKDVDLGANVSYRIRSPEVKHFFALHPFTGELSLLRSLDYEAFPDQEASITFLVEAFDIYGTMPPGIATVTVIVKDMNDYPPVFSKRIYKGMVAPDAVKGTPITTVYAEDADPPGLPASRVRYRVDDVQFPYPASIFEVEEDSGRVITRVNLNEEPTTIFKLVVVAFDDGEPVMSSSATVKILVLHPGEIPRFTQEEYRPPPVSELATKGTMVGVISAAAINQSIVYSIVSGNEEDTFGINNITGVIYVNGPLDYETRTSYVLRVQADSLEVVLANLRVPSKSNTAKVYIEIQDENNHPPVFQKKFYIGGVSEDARMFTSVLRVKATDKDTGNYSVMAYRLIIPPIKEGKEGFVVETYTGLIKTAMLFHNMRRSYFKFQVIATDDYGKGLSGKADVLVSVVNQLDMQVIVSNVPPTLVEKKIEDLTEILDRYVQEQIPGAKVVVESIGARRHGDAFSLEDYTKCDLTVYAIDPQTNRAIDRNELFKFLDGKLLDINKDFQPYYGEGGRILEIRTPEAVTSIKKRGESLGYTEGALLALAFIIILCCIPAILVVLVSYRHFKRRQAECTKTARIQAALPAAKPAVPAPAPVAAPPPPPPPPPGAHLYEELGDSSMKGLFLLYHFQQSRGNNSVSEDRKHQQVVMPFSSNTIEAHKSAHVDGSLKSNKLKSARKFTFLSDEDDLSAHNPLYKENISQVSTNSDISQRTDFVDPFSPKIQAKSKSLRGPREKIQRLWSQSVSLPRRLMRKVPNRPEIIDLQQWQGTRQKAENENTGICTNKRGSSNPLLTTEEANLTEKEEIRQGETLMIEGTEQLKSLSSDSSFCFPRPHFSFSTLPTVSRTVELKSEPNVISSPAECSLELSPSRPCVLHSSLSRRETPICMLPIETERNIFENFAHPPNISPSACPLPPPPPISPPSPPPAPAPLAPPPDISPFSLFCPPPSPPSIPLPLPPPTFFPLSVSTSGPPTPPLLPPFPTPLPPPPPSIPCPPPPSASFLSTECVCITGVKCTTNLMPAEKIKSSMTQLSTTTVCKTDPQREPKGILRHVKNLAELEKSVANMYSQIEKNYLRTNVSELQTMCPSEVTNMEITSEQNKGSLNNIVEGTEKQSHSQSTSL

SEQ ID NO: 54567 - DNA, 5661 bp, Artificial Sequence
  derived and/or modified sequence
atgtttcgccaattctatctgtggacctgcctggcaagcggcattattctgggctccctctttgagatctgcctgggccagtatgatgatgattgcaagctcgcgcgcggaggccccccagccacaattgtggctatcgatgaggagagcagaaatgggactatattagtggacaatatgctcattaaagggacagctgggggacccgacccaacaatcgagctctccttgaaggacaacgtcgattactgggtgttgatggaccccgtgaaacagatgcttttcttgaactcaacgggtcgagtcctggacagagacccaccaatgaacattcactccattgttgtgcaggttcaatgcatcaacaagaaagtgggtactattatatatcatgaggtccgcatcgttgtgcgggataggaacgacaatagtcccactttcaagcacgagtcttattacgctaccgtgaacgagctgacgccagtcggtacaacgatatttaccggcttctcaggggacaacggtgccactgacatcgacgacggcccaaatggtcagattgaatatgtcatacagtataaccccgacgatcctacctccaacgacaccttcgaaatccctctgatgctgaccggaaacattgtcctgaggaaaaggctgaattatgaggataagaccagatacttcgtcattatccaggccaacgaccgtgcccagaatctgaacgaacgcagaactacaaccactacgctgacagtagacgtcctggacggcgatgacctcggcccgatgttcctgccttgcgtgctggtgcctaacactcgggattgccggcctctcacatatcaggccgcaatcccggagctgcgtacaccagaggaacttaatccaatcattgtcaccccacccattcaggcaatcgaccaggatcggaatattcagcccccaagcgacaggccaggaattctgtacagcattctggttgggacgcccgaggattacccacgcttcttccacatgcacccccggactgccgaactctctctgctggaaccggtcaatcgcgatttccaccaaaaattcgacctagtgataaaagctgagcaggacaacggccaccccctacctgccttcgctggactgcacatcgagattttggacgagaataaccagtccccctattttactatgccatcttatcagggatacatcctcgagtccgcccctgtgggagctactatttctgactcactgaaccttacatctcccctgcgtattgtggccctagataaagatattgaagatactaaagatcccgagctgcatctgttcttgaatgactatacctcagtattcaccgttacccagactggcattacacggtacttgacgctgttgcaacccgttgaccgagaggagcagcagacctacaccttctccattactgcctttgacggcgtccaggagtcagagcccgtcatcgtgaatatacaggttatggacgccaacgacaacacacctacatttcctgaaatcagttatgatgtctacgtttatactgacatgagaccaggagactctgtgattcagctgaccgcagttgacgcagacgaggggtccaacggcgaaatcacttacgagattttggtcggcgctcaaggcgacttcattatcaacaaaactacaggtctgatcactatcgcccctggtgtggaaatgattgtgggaaggacatacgccctgaccgtacaggcagcagacaatgcgccacccgcagaaaggtcaacaggtatcctgacactaggaaaggcactggaccgtgagtcgacagatagatacatcttaatcatcactgcttcggacggaagaccagacggtacctcaactgccaccgtgaacattgtggtcaccgacgtgaacgacaacgccccagtgtttgatccctacctgcccagaaatctgtcagtggtcgaagaggaagctaacgctttcgtcggacaggtcaaggctaccgatcccgacgcaggtattaacgggcaggtccactatagcctcgggaactttaataatttatttcgcataacgagcaacggtagtatctatacagctgtgaagctgaaccgcgaagtgcgggattactacgagctggtggttgtggctacagacggggcagttcacccaagacactcaactttgactttggccattaaggtcctggacattgatgacaatagcccagtatttactaactcaacttatacagtgcttgtggaggaaaatcttccagccgggacaacaattcttcagatcgaggcaaaggacgtggacctcggagctaatgtgagttaccggattcggtccccagaagtcaagcactttttcgctttgcatccttttaccggcgagctgtccctgttgagatccctggactacgaagcattccccgaccaggaggcttctataacattccttgtagaggctttcgacatctacggcacgatgccacctggtatcgccaccgttacagtgattgtcaaggatatgaatgattacccgcccgtgttttccaagagaatctataaaggtatggttgccccagacgcagtgaagggcactccaattaccacagtgtatgccgaagatgccgatccgccaggattacctgcctcccgcgttcgttatcgtgtggacgatgtgcagtttccctacccggcctccatctttgaggtcgaagaagactcaggccgcgtaattacacgggtgaacctgaatgaggaacccaccacgatatttaagctggtggtggtggcctttgatgacggggagccagtgatgagctcatccgccactgtgaagattttggtcctccaccccggcgaaatccctagatttacacaggaagaatatcggccaccccccgtctccgagctggctacgaaaggaacaatggtaggtgtcatctccgcagcagccataaaccagtcgattgtttatagcatcgtgtcagggaacgaagaagatacatttgggatcaacaacattacaggagttatttatgtaaacggcccactggattacgaaactcgcacaagttatgtgctccgtgtgcaggctgattcactcgaagttgtgctagcaaacctgcgcgtgccaagtaagtctaataccgcgaaggtgtacatagagatccaagacgagaacaatcatccaccggtgttccagaagaagttctatattggaggggtcagcgaggacgcacgaatgttcacctccgtcctgcgagtgaaagccacagacaaggatactggaaattacagtgtaatggcatataggctgattataccccccattaaggagggaaaagaaggattcgttgtcgagacctataccggcctgattaagaccgccatgctctttcacaatatgcgccgcagctattttaagttccaggtgattgccacagatgactacggtaaaggcctgtcagggaaagcagacgtgttggtgagcgtagtgaatcaattggatatgcaggtcatcgtgagcaatgtgccacccaccctcgtggagaaaaaaatcgaagacctgaccgaaatcctagatcgctatgtgcaggagcagattcccggcgccaaggtagtcgtcgagagtatcggtgctagaaggcacggcgacgcgttttctctggaagactataccaagtgcgacctgactgtctacgccatcgatccccaaacgaatagggcgatcgaccgtaatgaactcttcaagtttctcgacggaaaactgttggacatcaataaagacttccaaccctattatggagagggagggaggatcctggaaattcggacgcctgaggccgttacgtccatcaaaaaaagaggcgagagcctcggctacacagagggggcactcctggccttagccttcattatcattctctgctgcattcccgcaatcctagtcgttttggtgtcttatagacactttaagagacgccaggcggagtgcacaaaaaccgcacggatacaggcagccttaccagctgccaagccggccgtacccgctcccgctcccgtggctgccccgcctcctccaccccccccaccccccggtgctcacctttatgaggagctgggggatagcagcatgaaaggcctgtttcttttgtatcactttcagcagtccagaggtaataattcggtgtccgaggatcgcaaacatcagcaggtggtcatgcccttttcatctaatacaatagaagctcacaagagcgctcacgtggacggttccctcaagagcaacaagctaaagagtgcgcgcaaatttaccttcctgagtgatgaagacgacctttctgctcacaaccccctttataaggagaatatcagccaggtgagcactaatagtgatatcagccagaggacagatttcgtcgatccgttttcacctaagatacaggccaagtcaaagagtctgcggggtccacgggaaaaaatccaacgactttggtctcagtcagtatcgttaccccggagattgatgagaaaagtgccaaaccgccccgaaatcattgatctacagcaatggcagggcacaaggcagaaggccgaaaatgagaacaccggtatctgtacaaacaagcggggcagtagcaaccctctgctaactaccgaagaggccaatctgaccgagaaggaggagattcgccagggcgaaaccctgatgatcgaaggtacggaacaactaaagagcttgagcagcgattcgtctttctgcttcccacgccctcacttcagctttagcaccctgcccactgttagccgtactgtggagctgaagtccgagcccaacgtaatcagcagcccagccgagtgctctttagagctcagccccagcaggccttgtgttctgcacagtagcctgtcccgccgggagacccctatatgcatgctgccaatcgaaaccgagagaaatatttttgagaacttcgcccatccccccaacatctccccctccgcttgccccttacctccccctccccccatctctcctccttctcctccgcccgcccccgctcctctggccccacccccagatatctccccgtttagtttgttctgccccccgccgtccccacccagcatccccttaccgcttcctccacctactttcttcccactcagcgtcagtacatccggtccccccaccccccccctgttacctcctttccctactccactgccccccccacccccatcaataccatgtcccccaccaccatctgcaagtttcctgtctactgaatgcgtgtgcattaccggtgtgaagtgcaccacaaatcttatgcctgccgagaaaattaaaagtagtatgacacagctgtcaaccacgaccgtttgtaaaaccgatcctcagcgtgaaccgaaggggattctgcgccatgtgaagaatctggccgaactggaaaaatcggtggccaacatgtactcccagattgagaagaactacctcagaacgaatgtctccgagctgcaaaccatgtgccccagcgaagtaacaaatatggaaatcacaagcgaacagaacaaaggatcccttaataacatagttgaagggaccgagaaacagtcccattctcaaagcacaagtctctag

SEQ ID NO: 54568 - DNA, 5661 bp, Artificial Sequence
  derived and/or modified sequence
atgttccggcagttctacctgtggacctgcctggccagcggcatcatcctgggcagcctgtttgagatctgcctgggccagtatgatgatgactgcaagctggcccggggcggccccccagccaccatcgtggccattgatgaggagagcagaaatggcaccatcctggtggacaacatgctgatcaagggcacagctgggggccctgaccccaccatcgagctgagcctgaaggacaacgtggactactgggtgctgatggaccctgtgaagcagatgctgttcctgaacagcacaggccgggtgctggaccgggacccccccatgaacatccacagcatcgtggtgcaggtgcagtgcatcaacaagaaggtgggcaccatcatctaccacgaggtgagaattgtggtgcgggacagaaatgacaacagccccaccttcaagcatgagagctactatgccaccgtgaatgagctgacccctgtgggcaccaccatcttcaccggcttcagcggggacaacggggccacagacattgatgatggccccaacggccagattgaatatgtgatccagtacaacccagatgaccccaccagcaatgacacctttgagatccccctgatgctgactggaaacatcgtgctgaggaagaggctgaactatgaggacaagacccgctactttgtgatcatccaggccaatgaccgggcccagaacctgaatgaaagaaggaccaccaccaccaccctgactgtggatgtgctggatggagatgacctgggccccatgttcctgccctgtgtgctggtgcccaacacccgggactgccggcccctgacctaccaggccgccatccctgagctgcggaccccagaggagctgaaccccatcatcgtgaccccacccatccaggccatcgaccaggacaggaacatccagcccccaagtgaccggcccggcatcctgtacagcatcctggtgggcaccccagaggactacccccgcttcttccacatgcaccccaggacagctgagctgagcctgctggagcctgtgaacagagacttccaccagaagtttgacctggtgatcaaggccgagcaggacaatggccaccccctgcctgcctttgctggcctgcacatcgagatcctggatgagaacaaccagagcccctacttcaccatgcccagctaccagggctacatcctggagagcgcccctgtgggcgccaccatcagtgacagcctgaacctgaccagccccctgcgcatcgtggccctggacaaggacatcgaggacaccaaggaccctgagctgcacctgttcctgaatgactacaccagcgtcttcaccgtgacccagacaggcatcacccgctacctgaccctgctgcagcctgtggaccgggaggagcagcagacctacaccttcagcatcacagcctttgatggagtgcaggagagcgagcccgtcatcgtgaacatccaggtgatggatgccaatgacaacacccccaccttccctgagatctcctatgatgtgtatgtgtacacagacatgaggcctggggacagcgtcatccagctgacagctgtggatgctgatgagggcagcaatggagagatcacctatgagatcctggtgggcgcccagggcgacttcatcatcaacaagaccaccggcctcatcaccatcgcccctggggtggagatgattgtgggccgcacctacgccctgactgtgcaggccgctgacaatgcccccccagctgagaggagcacaggcatcctgaccctgggcaaggccctggaccgggagagcacagaccgctacatcctgatcatcacagccagtgatggccgcccagatggcaccagcacagccaccgtgaacatcgtggtgacagatgtgaatgacaatgcccctgtgtttgacccctacctgcccaggaacctgtctgtggtggaggaggaggccaatgcctttgtgggccaggtgaaggccacagatcctgatgctggcatcaatggccaggtgcactacagcctgggcaacttcaacaacctcttccgcatcaccagcaatggcagcatctacacagctgtgaagctgaaccgggaggtgcgggactactatgagctggtggtggtggccacagatggagctgtgcaccccaggcacagcaccctgaccctggccatcaaggtgctggacattgatgacaacagccctgtgttcaccaacagcacctacacagtgctggtggaggagaacctgcctgctggcaccaccatcctgcagatcgaggccaaggatgtggacctgggcgccaacgtgtcctaccgcatccgcagccctgaggtgaagcacttctttgccctgcaccccttcaccggggagctgagcctgctgcggagcctggactatgaggccttcccagaccaggaggccagcatcaccttcctggtggaggcctttgacatctacggcaccatgcctcctggcatcgccaccgtgaccgtcatcgtgaaggacatgaatgactacccacctgtgttcagcaagaggatctacaagggcatggtggccccagatgctgtgaagggcacccccatcaccaccgtgtatgcagaagatgctgaccccccaggcctgcctgccagccgggtgcgctacagagtggatgatgtgcagttcccctacccagccagcatctttgaggtggaggaggacagcggccgggtcatcaccagggtgaacctgaatgaggagcccaccaccatcttcaagctggtggtggtggcctttgatgatggagagcctgtgatgagcagcagcgccaccgtgaagatcctggtgctgcaccctggagagatcccccgcttcacccaggaggagtacagacctcctcctgtgtctgagctggccaccaagggcaccatggtgggcgtcatctctgctgctgccatcaaccagagcatcgtgtacagcatcgtgtctggaaatgaggaggacaccttcggcatcaacaacatcactggagtcatctacgtgaatggccccctggactatgagaccaggaccagctatgtgctgcgggtgcaggccgacagcctggaggtggtgctggccaacctgcgggtgcccagcaagagcaacacagccaaggtgtacatcgagatccaggatgagaacaaccacccccctgtgttccagaagaagttctacatcggcggcgtgtctgaagatgccaggatgttcacctctgtgctgcgggtgaaggccacagacaaggacaccggcaactacagcgtgatggcctaccgcctcatcatcccccccatcaaggagggcaaggagggctttgtggtggagacctacacaggcctcatcaagacagccatgctgttccacaacatgagaagaagctacttcaagttccaggtgattgccacagatgattatggcaagggcctgagcggcaaggcagatgtgctggtgtctgtggtgaaccagctggacatgcaggtgattgtgtccaatgtgccccccaccctggtggagaagaagattgaggacctgacagagatcctggacagatatgtgcaggagcagatccctggggccaaggtggtggtggagagcatcggggccaggagacatggagatgccttcagcctggaggactacaccaagtgtgacctgactgtgtatgccatcgacccccagaccaacagagccatcgacagaaatgaactcttcaagttcctggatggcaagctgctggacatcaacaaggacttccagccctactacggggagggcggccgcatcctggagatccgcaccccagaggccgtgaccagcatcaagaagagaggagagagcctgggctacacagagggcgccctgctggccctggccttcatcatcatcctgtgctgcatcccagccatcctggtggtgctggtgtcctaccgccacttcaagaggcggcaggctgaatgtaccaagacagcccgcatccaggccgccctgcctgctgccaagccagctgtgcctgccccagcccctgtggccgcccctcctcctcctcctcctcctcctcctggggcccacctgtatgaggagctgggggacagctccatgaagggcctcttcctgctgtaccacttccagcagagccggggcaacaacagcgtgtctgaggacaggaagcaccagcaggtggtgatgcccttcagcagcaacaccatcgaggcccacaagagcgcccacgtggatggcagcctgaagagcaacaagctgaagagcgccaggaagttcaccttcctgagtgatgaagatgacctgagcgcccacaaccccctgtacaaggagaacatcagccaggtgtccaccaacagcgacatcagccagaggacagactttgtggaccccttcagccccaagatccaggccaagagcaagagcctgcggggcccccgggagaagatccagaggctgtggagccagagcgtgtccctgccccggcggctgatgaggaaggtgcccaacagacctgagatcatcgacctgcagcagtggcagggcacccggcagaaggcagaaaatgaaaatacaggcatctgcaccaacaagaggggcagcagcaaccccctgctgaccacagaggaggccaacctgacagagaaggaggagatccggcagggcgagaccctgatgattgagggcacagagcagctgaagagcctgagcagtgacagcagcttctgcttcccccggccccacttctccttcagcaccctgcccaccgtgtccaggacagtggagctgaagtctgagcccaacgtcatcagcagccctgctgagtgcagcctggagctgagccccagccggccctgtgtgctgcacagcagcctgagcagaagagagacccccatctgcatgctgcccattgaaacagaaagaaacatctttgaaaattttgcccacccccccaacatcagccccagcgcctgccccctgcccccacctccacccatcagcccccccagccccccaccagccccagcccccctggcccctcctccagacatcagccccttcagcctcttctgccccccacccagcccccccagcatccccctgcccctgcccccacccaccttcttccccctgtctgtgtccaccagcggcccccccaccccacccctgctgccccccttccccacccccctgcccccacctcctccttccatcccctgccccccacctccttctgccagcttcctgagcacagaatgtgtgtgcatcactggagtgaagtgcaccaccaacctgatgcctgctgagaagatcaagagctccatgacccagctgagcaccaccaccgtgtgcaagacagacccccagcgggagcccaagggcatcctgcggcacgtgaagaacctggccgagctggagaagtctgtggccaacatgtacagccagatcgagaagaactacctgcggaccaacgtgtctgagctgcagaccatgtgccccagcgaggtgaccaacatggagatcaccagcgagcagaacaagggcagcctgaacaacatcgtggagggcacagagaagcagagccacagccagagcaccagcctgtag

SEQ ID NO: 54569 - DNA, 5661 bp, Artificial Sequence
  derived and/or modified sequence
atgttccggcagttctacctgtggacctgcctggccagcggcatcatactggggtccctgtttgaaatttgtctggggcagtatgacgacgactgtaagctcgcgcgcggaggccctcctgccacaattgtggcaatcgacgaagagagcagaaacggaactatactcgtagataatatgcttattaaaggaacagccgggggcccagatcccaccattgagttgtcactgaaagataacgtagactactgggtcctgatggatcctgtaaaacagatgctcttccttaatagcaccggtagagtgctggatagggaccctcctatgaacattcactccattgtcgtgcaagtacagtgtattaacaagaaggtgggcactataatttaccacgaagtgaggatcgtcgtcagggatagaaatgataattctcctacgtttaaacatgaatcctactatgccactgtcaatgagctaacccctgtgggaactacaatcttcactgggttctctggcgacaatggagccaccgatattgatgacgggcccaatggccagatcgaatacgtgatccagtacaaccctgatgatccgacatccaatgacacattcgaaatcccgctgatgctaactggtaatattgttctccggaaacgcctgaattacgaggataagacgcgctatttcgttataattcaggccaatgaccgcgcacagaatttaaatgaaaggagaactaccacaacaacgctgactgtggatgtgttagatggggatgacctgggcccaatgtttctgccttgtgttttagtgcctaacactagagattgccgacctctcacatatcaggcggctatcccagaacttcgcaccccagaggagttgaatcccatcatagtcactccccccatacaggctatagaccaggataggaatatccagcctccgagcgaccggcctggcattctgtattcaatcctggtgggtaccccagaggattacccccgattttttcacatgcacccaaggacggctgaactaagcctgctggagccagtcaatcgcgatttccatcagaagtttgatctcgtgattaaggccgaacaggacaacggtcaccccctgcccgcattcgccgggctgcacattgagattttggatgagaacaaccaatccccctatttcacaatgcctagctaccagggatatatactggaatccgcacctgtgggtgcgacaatttcagacagcctgaatctgactagccctctgcgtattgtggctctggacaaagacattgaagacaccaaggatcccgaactacatttattcttaaatgattatacctctgtgtttaccgtgacccaaaccggcattactagatatcttactctcctgcaaccagttgatcgtgaagaacagcagacgtacacctttagtatcacagcctttgatggtgtccaggaatcggaacccgtgattgttaatattcaagtcatggacgccaacgacaacactcccacctttccagagataagttacgacgtgtatgtgtataccgatatgcgccctggcgacagtgtaatccagctcacggccgtagatgctgacgagggaagcaatggtgagataacctatgaaattctggtgggtgcacagggggattttattatcaacaaaacaacgggtctgataaccattgccccaggggtggaaatgattgtgggcagaacctatgctctgactgtccaggctgcagacaatgcaccccccgctgaaagaagcacaggaattttaacattagggaaggccctcgacagagaatctactgatcggtacatactaatcatcacagctagtgatggacgcccagatggtacctccaccgctacagttaatatagttgtgaccgacgtcaacgataacgcaccggtgttcgacccctatctgccccggaacctgagcgtggtggaagaggaggccaatgcattcgtggggcaggtgaaggccactgatcccgatgctggaattaatgggcaggtgcattactccctgggaaactttaataacctatttcgaatcacctcaaacggctccatttacaccgctgtcaaattgaaccgggaagtgagagactactatgaattggtagtggtggccacagacggcgccgtccatcctcggcactctacgctgacgctggctataaaggtgctggacattgacgacaatagtcctgtgttcactaacagcacgtatacagtcctggttgaagagaacctgcccgccggaacaaccattttacaaatcgaagccaaagacgtggacctgggcgcaaatgtgtcctataggatcagaagccccgaggttaagcatttctttgcgctgcaccctttcactggggagctgtctctgctcaggtccttagactatgaagcatttcctgaccaagaagcatcgataaccttccttgtcgaagcatttgatatctatggcactatgccacctggcatcgccacagtcaccgtgattgtcaaagatatgaacgactatccacctgtcttttcgaagcgcatctacaagggtatggtcgctccggacgcagtgaaaggaactccaataacaacggtgtacgctgaagatgcagacccccccgggctccctgcctcaagggtaaggtaccgggtcgatgacgtccagtttccataccccgcttccatttttgaagtggaggaagattccggtcgggtgatcacccgggtgaatttgaacgaggagcccacaaccatctttaaattagtggtggtcgcttttgacgacggcgagcctgtgatgagctcatcagctaccgttaagatcctggtattgcaccctggtgagatccctcgctttacccaggaggaatacagaccgccaccagtgtctgaattagcaaccaagggcaccatggtaggcgttatatctgcagccgccatcaaccagtcaatcgtctactctatcgtctctggcaacgaggaggatacatttgggatcaataatatcacaggagtaatctacgtgaatggccccctagattacgagaccaggacttcttatgtgctccgagtacaggctgattctcttgaagtggtgctagccaatctgcgcgtgccttcgaaatccaatacagcgaaagtttacatagagatccaggatgaaaacaaccacccgcctgtgttccaaaagaagttctacattggaggggtatcagaagatgctcgtatgttcacttctgtgttgagagtaaaggctacagataaagacactggcaactacagtgttatggcatacaggcttatcatcccccctatcaaggaggggaaagaaggcttcgttgtggagacttataccggacttattaagactgccatgctgtttcacaacatgagacggagctacttcaagttccaggtgatcgcaaccgatgattacgggaaaggcctcagtggtaaagcagatgtgctggtaagtgttgtgaaccaattagacatgcaagtaatcgtgtcaaacgtgcccccaaccctggtggagaagaagattgaggatctgacggagatcctggatagatatgtacaggaacagatcccaggagcaaaggtagttgttgagtcaatcggagcccgtcgccacggcgatgccttttctctggaggactacacaaaatgtgacttaacggtctacgcaatcgatccacagacaaatagggcaatcgacaggaatgagctatttaaattcctggacggaaagcttctggacatcaacaaagatttccaaccctactatggggagggagggagaattctggagatccgcacgccagaagccgtgacgtcaataaaaaagcgaggagaatcccttgggtacaccgagggagccctgttagcactagccttcatcattatactatgctgcattccagctattttggtggttctcgtgtcttataggcactttaaaagacgacaggccgagtgtacaaagactgctagaatccaggcggcactgccggccgctaagccggctgtccccgccccggctcccgtggccgccccccccccaccgcctcctccaccacccggggcacatctgtatgaggaactgggggactcatcgatgaaggggctgtttctattatatcacttccaacagagcagggggaacaatagcgtgagcgaggatagaaagcaccagcaagtggtaatgccatttagctctaatacgatcgaggcacataaatccgcgcacgtggatgggtctctgaagtctaataaattgaagtcggcccgcaagtttactttcctgtctgacgaggacgatctttcagcacacaatccactttataaggagaacatatctcaggtctcaaccaattctgatatcagccagaggacagacttcgtagaccccttctctccaaagatacaagcaaagagtaaatctctgcgcggtcctcgagagaaaattcaacggctgtggtcacaatcagtctcattaccccgtcgactgatgaggaaggttccaaaccggcctgagataatcgatctccagcagtggcaggggaccagacaaaaggcagaaaacgagaacactgggatttgcacaaacaagagagggagcagcaaccctctactgaccactgaagaggccaatctgacggagaaagaggagatcagacagggggaaaccctgatgatcgagggcacagaacagttgaagtctctctccagcgatagctcgttctgttttcccagacctcatttttcatttagcacactgcccaccgtaagtagaaccgtcgaactcaaaagcgaaccgaatgtaatcagttccccagccgaatgcagtctagagctttcgcccagcaggccttgtgtgctgcactcttctctgagtcgtcgcgagaccccgatctgcatgttacccatcgaaactgagagaaatatatttgagaattttgcccacccaccaaatatcagcccatcggcttgcccccttccacccccgccacccatttcccctccttcacccccccctgctcccgccccactcgctccacctcccgacatctcccccttttccttattttgccctcctccttcaccaccgtctattccgctaccgctccccccccctactttttttcctctgtccgtctcaacaagcggtcctccaaccccacccctgcttcctcccttccccacacctcttcctccaccaccacctagtatcccctgtccacctccccctagcgcctctttcctctcgacagagtgtgtgtgcatcacgggagtgaagtgtacgaccaacctgatgcccgcagaaaaaatcaagtccagcatgacccagctgagtaccacaacagtatgtaagacagaccctcagagggagcccaagggtatcctgagacacgtgaagaatctggccgagctggaaaaaagtgtggcaaatatgtattcacagattgagaaaaactacttgaggacaaacgtgtctgaactgcagaccatgtgtccgtcagaggtgactaacatggagattaccagtgaacagaacaagggcagcctcaataatatcgtcgaaggaacagagaagcagagtcactcccagagtacatccttgtag

SEQ ID NO: 54570 - DNA, 5660 bp, Artificial Sequence
  derived and/or modified sequence
atgtttcgacagttttatctgtggacatgcctggcctcaggaataatcctcggctcgctattcgagatttgtcttggtcagtacgatgatgactgcaaactggccaggggaggaccaccagccactattgtggcaattgacgaagaaagccgaaatggcaccatccttgtggataatatgctgattaagggcaccgccggtggccctgaccccaccattgaactatcactaaaagacaacgtggactactgggtattgatggaccctgtgaagcagatgctgttcctgaatagcactggcagagtgcttgatcgtgacccacctatgaacatacattccatcgtagttcaagttcagtgcataaacaagaaagttgggaccatcatatatcacgaagtccgaatcgtggtgcgagaccgtaatgataactcgcccacctttaaacacgaaagctactacgcaacagtaaacgagctgacccctgttggcacaaccatatttacaggattcagtggagataatggcgctacggatatcgacgatgggccaaatggacagatagaatatgtaatccaatacaatccggacgaccccaccagcaatgacacctttgaaatccctctaatgttgaccggtaacatcgttctacgtaaacgacttaattatgaggacaagacacggtattttgttataattcaggcaaatgatagagcccagaacctcaacgaaagacgaacaacaactacgacactcactgtggacgttctggacggtgatgacctgggacccatgtttctgccctgcgtcctggtcccaaatacccgcgattgcagaccacttacttaccaagccgcaattcctgagttgagaacgccagaggaactcaaccctatcatcgtaactcctccaattcaagccattgatcaagaccgaaacatccaaccccctagtgatagacctgggattctgtactcgattctggtagggacacccgaagattatcctaggtttttccacatgcatcctcggactgctgagctgtcactcctcgaaccagtgaatagggactttcatcagaagtttgacctcgtaattaaagcagagcaagacaatggacacccactgcccgcattcgccggactccacatagaaattttggacgagaacaatcagagtccatacttcacgatgcccagctatcaagggtatatcctggaatccgctcctgtcggagccacgataagtgatagccttaacctcactagccctctgcgtatcgtcgcacttgataaagatatcgaagatacaaaagatcccgagctccacctgtttctgaatgactatacctcagtcttcaccgtcacccagacagggatcacccgctatctcacactcctgcagccagtggaccgagaggagcagcagacctacaccttcagcattacagcattcgacggagtacaagaatccgagcccgtcattgtgaacattcaggtgatggatgccaacgacaacactccaacgttccccgagatcagttacgacgtgtacgtgtacaccgatatgcgacctggagatagcgtgatccaactcaccgccgtcgatgctgatgaaggtagcaatggggaaataacatatgaaatcctggtcggcgcacagggtgactttatcattaacaaaacaacagggctcataacgattgcgcctggtgtggagatgatagttgggaggacttacgcactaacagtgcaggcagccgacaacgcccctcctgccgaacgaagcacaggcatacttaccctgggaaaagccctggatagagagagtacagacaggtacattctgatcattactgcatctgacggacgacccgatggaacatctactgcaaccgtgaacattgtagtgactgatgtgaatgacaacgcgccagtgtttgatccatacctacctcgtaacctctctgtagtggaggaagaggccaacgcatttgtgggccaggtgaaggctaccgatcccgacgccggaatcaacggccaggtacattattctttagggaactttaataacctgtttcggattacatccaatgggagcatttacaccgccgtgaagttgaatcgcgaagtccgggactattatgaattggtcgtggtggctaccgatggagcagtgcatcctcgacactcaacacttacactagctattaaggtcctcgatattgacgacaacagtcctgtgttcacaaactccacctacaccgtgctcgtggaggaaaacctgccagccggtactacgattttgcagatcgaggctaaggatgtcgacctgggggctaatgtgtcttataggatccggtcccctgaagtgaaacacttctttgctctgcaccccttcacaggggagctctccctgctgcgctccctcgactacgaagcctttccagaccaggaggcaagcattacctttctggtggaggcctttgacatctatgggacaatgcccccaggcatcgctaccgtcacggtaatcgtcaaggacatgaatgattaccctcccgtgttctcaaaacgaatctataaagggatggttgctcctgatgcagttaaaggcactcccataaccactgtctacgccgaggacgctgaccctcctgggctgcccgctagcagagtgcgctatcgcgtggatgacgtgcagttcccctaccccgcatcaatatttgaagtggaggaggattccgggagggtaatcacccgcgtgaatctcaacgaggagccaacaactatttttaagctggtggtcgttgctttcgatgacggagagccagtaatgtcctcctccgctaccgttaagatcctggtgttgcacccaggcgagattccaaggttcacccaggaagagtatcgcccaccacccgtatcggagctggccacaaaaggcactatggtgggggttatctcagctgccgcaattaatcagtcaattgtctactccatcgtctccggaaatgaggaggacacctttgggataaacaatatcacaggcgtgatctacgtcaatggcccactggattacgagactaggacttcttacgtactgagggtgcaggctgattcccttgaagtggtgttagccaacctgagggttccctccaagtcaaataccgccaaagtatacatcgagatccaggacgaaaacaatcatcccccagtgtttcagaagaagttctatataggaggtgtctctgaagatgcccgaatgttcaccagcgtcctccgcgttaaggccaccgataaggataccgggaattatagtgtcatggcctatcgcttgattatccctcctatcaaggaggggaaagagggattcgttgtggagacctatactggcctgattaaaacagccatgctcttccacaatatgcggcgtagttattttaaatttcaagttatcgctactgatgactacgggaaggggctgtcaggcaaggccgacgtgttggtgtctgtggtcaatcagctagacatgcaggttatcgtatcaaacgtccctcccaccctggttgagaaaaagattgaggatctgaccgagatcctcgaccgctacgtccaggaacagattcctggggcaaaagtggttgtggagtccatcggagctcgtcggcatggggacgcctttagcttggaggattacactaaatgtgatcttaccgtgtatgcaatagacccgcagaccaaccgggctattgacagaaatgagctcttcaagtttctcgacggcaaactactggacatcaataaggactttcagccttactacggtgagggaggcaggattttggagataagaactcctgaagcagtaacgtccataaaaaagagaggtgaaagcctggggtatactgaaggcgctcttctggcacttgcgtttattataatactgtgctgcattcccgcaatactggtcgtcctggtgtcctaccgccatttcaaaaggagacaggccgagtgtacaaaaacagctcgaattcaggctgctctgccggctgcgaagccagcggttcccgcacccgctcctgtggctgcaccgcctccacccccaccacctccccctggcgcacacctctacgaggaattaggagatagttcaatgaaggggctgttcctgctgtaccatttccagcaatctagaggcaacaacagcgtgagcgaggatcggaagcaccagcaggtggtgatgcccttttccagcaataccattgaggctcacaagagcgcccacgtagatgggtccctgaaaagcaacaagctcaagtctgccaggaagtttactttcctgtctgacgaggacgacctgagcgcacataacccgctgtataaggaaaatatatctcaagttagtacgaattcagatatctcacaaagaacagacttcgtcgatccattttctcccaaaatccaagctaaaagtaaatcactgcgcggaccaagagaaaagatccaaaggttgtggagccaaagtgtgtctttgccacgtcgcctcatgcggaaggtccccaataggccagaaattatcgacctgcagcagtggcaaggcacaagacagaaagccgagaatgaaaatacgggtatctgtacaaataaaagggggagttctaatcctctgctgaccactgaagaggcaaatttgaccgaaaaggaggaaatccgacagggagagacactgatgattgaggggacggagcagctcaagagcctgagctctgattcatcattctgttttccgaggccgcacttctccttctctacgctcccgacagtgtcacggactgtggaactgaaatctgagcccaacgtcatctcttcacccgctgagtgtagccttgagttatctccgagtcggccatgcgttctgcattcatccctgtccagacgcgagactccaatctgcatgttgcctatagagaccgaacggaacatcttcgagaacttcgcacatccaccgaatatcagcccctccgcctgccccttgcctcccccaccacctatttcccccccatccccccctcccgcacctgcgcctttagcccctccaccagatatctccccattcagcttattctgcccacccccttctccccctagcataccgcttcccttgcccccacccacattcttccctcttagcgtttcaaccagtgggccacccaccccgccacttctgccacccttccctaccccattgccgccaccaccaccaagtattccatgccccccaccaccatctgccagctttctgagtaccgaatgcgtttgcattacaggagtgaaatgtaccacaaacctcatgcctgctgaaaaaatcaagagcagtatgacacagttgtctacaaccaccgtctgtaagacagatccccagagagaacccaagggcatcctgagacatgtcaaaaatctagcggaacttgaaaagtcagtggctaacatgtacagccagatcgaaaaaaattatctcaggacaaacgtgtcagaactgcagaccatgtgccccagtgaagttactaatatggaaatcacctccgagcagaacaagggcagtctcaacaacatagtggaggggacagaaaagcagtctcattcccagagtacgtctctata

SEQ ID NO: 54571 - DNA, 6056 bp, Artificial Sequence
  derived and/or modified sequence
caacgtgctgagctaatagcgacagatagagggcagacagattcctgctagcagcttagtgttagttgcttgtggtaactaaggcaggtggcatacatctcagaacgtggagaatgatggtatgctttctgagttaacatgttgaactgttttgcttttctaaaaattttcctagtaacattttcttgatgatatgagagtggatatcaatgcctcacagaaacaagaggtggaacatgtgaatgaatcgtcttggaactagattatgagcactggttctttttaaagggatgtgcaagaggcagccttggcaagaaaacttgctgcataatcttacatggactaaagatgaaactttaaaccgcaaatcagctttgagtgaactttgacagaagatgtttcgacagttttatctctggacatgtttagcttcagggatcatcctgggctctctctttgaaatctgcttgggccagtatgatgatgattgcaaactagctaggggaggaccaccagctaccatagttgctattgatgaagaaagtcggaatggtacaattctggtggacaacatgctgatcaaagggactgctggaggaccagaccccaccatagaactttctttaaaggataatgtggattactgggtgttgatggatcctgttaagcaaatgcttttcctgaacagcaccggaagagttctggatagagatccaccgatgaacatacactccattgtggtgcaggtccagtgcatcaacaaaaaagtgggcactattatctaccatgaagtgcgaatagtggtgagagacaggaatgacaactcacccactttcaagcatgaaagctactatgccacagtgaatgagctcactccagttggtaccacaatattcacaggattttcaggagacaatggagctacagatatagatgatggaccaaatggacagatagagtatgttattcagtataatccagatgatccgacatccaatgacacctttgaaattcccctaatgttgactggaaatatagtgttaaggaagaggctcaactatgaagataagactcgctactttgtcataatccaagctaatgaccgtgcccaaaatctgaatgagaggcgaaccaccaccaccactctcacagtggatgttctggatggagatgacttgggtccaatgtttcttccttgtgtccttgtgccaaacactcgtgattgccgtccactcacttatcaagctgccatacctgagttgagaactccggaagaactgaaccccattattgttacgccaccaatccaagccattgatcaggaccggaatattcaaccgccatcagataggccaggaatcctctattccatccttgttgggactcctgaggattacccacgatttttccatatgcatcctaggacagcagaacttagtctcctggagccagtaaacagagactttcaccagaaatttgatttggttattaaggctgaacaagacaatggtcatcctcttcctgcctttgccggtctacacattgaaatactggatgaaaacaatcaaagtccatattttacaatgcccagttatcaaggctatatcctggaatctgccccagtgggagcaaccatttcggacagtctcaatttgacttcacctttaagaatagtagctctggacaaggacatagaagatacaaaagacccagagcttcacctttttctgaatgactacacctcagtcttcaccgtcacacagactggtattactcgctacctcaccttacttcaaccagtggacagggaagaacagcaaacttacaccttttcgataacagcatttgatggtgtacaagaaagtgagccagtcatcgtcaatattcaagtgatggatgcaaatgataacacgccaaccttccctgaaatatcctatgatgtgtatgtttatacagacatgagacctggggacagtgtcatacagctcactgcagtcgacgcagacgaagggtcaaatggggagatcacatatgaaatccttgttggggctcagggagacttcatcatcaataaaacaacagggcttatcaccatcgctccaggggtggaaatgatagtcgggcggacttacgcactcacggtccaagcagcggataatgctcctcctgcagagcgaagcacggggattctaaccttagggaaagcactggacagggaaagcactgatcgctacattctgatcatcacagcttcagatggcaggccagatgggacctcaactgccacagtaaacatagtggtgacagatgtcaatgacaatgctccagtgtttgatccttatctgccaagaaatttatctgtggtggaagaagaagccaatgcctttgtgggtcaagtaaaagcaacagaccctgatgctggaataaatggtcaagtgcactacagtttgggtaactttaataatctttttcgtatcacatccaatgggagcatttacacagcagtgaagcttaacagagaagtcagggactactatgaacttgttgttgtggcaacagatggagcagtacaccctcgtcattcaactctaaccttggccatcaaggttttggacattgatgataacagtcctgtgttcaccaattcaacatacactgtccttgttgaagagaatttgccagctgggactaccatccttcaaatagaggccaaagatgtcgaccttggagcaaatgtgtcttaccggataagaagcccagaagtgaagcacttttttgcactacatccatttacaggagaactatcgcttttaaggagtttagattatgaggcatttccagaccaagaagcaagtatcacttttctggtagaggcctttgatatttatggaacaatgccacctggtattgctactgtcacagtgattgtaaaggatatgaatgattatcctcctgtctttagtaaacgaatatacaaagggatggtggctccggatgcagtcaagggtacacctatcacaacagtttatgctgaagatgcagaccctcctggattacctgcaagtcgtgtgaggtatagagtagatgatgtacagtttccttaccctgccagtatttttgaagtggaagaagattctggaagagtaataacacgagtcaatcttaatgaagaacctacaacaatttttaagttggtggtggttgcttttgatgatggggagcctgtgatgtccagcagtgccacagtgaagattcttgtcttacatcctggtgagatcccacgcttcacacaggaggaatatagacctcctccagtaagtgaacttgccaccaaagggaccatggttggtgtaatttctgctgctgccattaatcaaagtattgtgtactccattgtttcaggaaatgaagaagatacatttggaattaataacatcacaggtgttatctatgtgaatggacctctggattatgagaccaggacaagctatgtacttcgagtccaagctgattccctggaagtggtccttgccaatctccgagttccttcaaaaagcaatacagctaaagtatacattgagattcaggatgaaaataatcatcccccagtgtttcagaaaaaattctacatcggaggtgtatctgaagatgcaagaatgtttacttctgtactcagagtgaaggctactgataaagatactggcaattatagtgtcatggcctacagactcataataccaccaattaaagagggaaaagaaggatttgtagtggaaacatatacagggcttatcaaaactgctatgctcttccataatatgaggagatcctacttcaagtttcaagttattgcaactgacgactatgggaagggactgagcggcaaagccgatgtactcgtctccgtggtcaatcagctggatatgcaagtcattgtttccaatgtgcctcctactctagtggaaaaaaagatagaagatcttacagagatcttggatcgctatgttcaggaacaaattcctggtgccaaggtcgtagtggagtccattggagctcgccggcatggagatgccttttccctagaagattacaccaaatgtgacttgactgtctatgcaattgacccccaaaccaacagagccatcgatagaaatgagctttttaaatttttggatggcaaactacttgatatcaataaagactttcagccgtattatggggaaggaggacgcattctggagatccggactccagaggcagtgaccagcattaaaaagagaggagaaagtctaggatacacagaaggggccttgttggctctggccttcatcatcatcctctgctgcattcctgccatcttggtggttttggtcagctacagacacttcaaaagacgtcaagctgagtgtacaaagactgcacgaattcaggccgcattacccgcggctaaaccagcagtgccggctcctgcaccagtggcagcgcccccgccgccgccgccgcctccgccaggtgcgcatctctatgaagaacttggagacagctcaatgaaaggtcttttccttctctaccattttcaacaaagcaggggaaataactcagtctcagaagacaggaaacatcaacaagttgtgatgcccttttcttccaatactattgaggctcacaagtcagctcatgtagacggatcacttaagagcaacaaactgaagtctgcaagaaaattcacatttctatctgatgaggatgacttaagtgcccataatcccctttataaggaaaacataagtcaagtatcaacaaattcagacatttcacagagaacagattttgtagacccattttcacccaaaatacaagccaagagtaagtctctgaggggcccaagagaaaagattcagaggctgtggagtcagtcagtcagcttacccaggaggctgatgaggaaagttccaaatagaccagagatcatagatctgcagcagtggcaaggcaccaggcagaaagctgaaaatgaaaacactggaatctgtacaaacaaaagaggtagcagcaatccattgcttacaactgaagaggcaaatttgacagagaaagaggaaataaggcaaggtgaaacactgatgatagaaggaacagaacagttgaaatctctctcttcagactcttcattttgctttcccaggcctcacttctcattctccactttgccaactgtttcaagaactgtggaactcaaatcagaacctaatgtcatcagttctcctgctgagtgttccttggaactttctccttcaaggccttgtgttttacattcttcactctctaggagagagacacctatttgtatgttacctattgaaaccgaaagaaatatttttgaaaattttgcccatccaccaaacatctctccttctgcctgtccccttccccctcctcctcctatttctcctccttctcctcctcctgctcctgctcctcttgctcctcctcctgacatttctcctttttctcttttttgtcctcctccctctcctccttctatccctcttcctcttcctcctcctacattttttccactttccgtttcaacgtctggtcccccaacaccacctcttctacctccatttccaactcctcttcctccaccacctccttctattccttgccctccacctccttcagcttcatttctgtccacagagtgtgtctgtataacaggtgttaaatgcacgaccaacttgatgcctgccgagaaaattaagtcctctatgacacagctatcaacaacgacagtgtgtaaaacagaccctcagagagaaccaaaaggcatcctcagacacgttaaaaacttagcagaacttgaaaaatcagtagctaacatgtacagtcaaatagaaaaaaactatctacgcacaaatgtttcagaacttcaaactatgtgcccttcagaagtaacaaatatggaaatcacatctgaacaaaacaaggggagtttgaacaatattgtcgagggaactgaaaaacaatctcacagtcaatctacttcactgtaa

SEQ ID NO: 54572 - DNA, 6771 bp, Artificial Sequence
  derived and/or modified sequence
caacgtgctgagctaatagcgacagatagagggcagacagattcctgctagcagcttagtgttagttgcttgtggtaactaaggcaggtggcatacatctcagaacgtggagaatgatggtatgctttctgagttaacatgttgaactgttttgcttttctaaaaattttcctagtaacattttcttgatgatatgagagtggatatcaatgcctcacagaaacaagaggtggaacatgtgaatgaatcgtcttggaactagattatgagcactggttctttttaaagggatgtgcaagaggcagccttggcaagaaaacttgctgcataatcttacatggactaaagatgaaactttaaaccgcaaatcagctttgagtgaactttgacagaagatgtttcgacagttttatctctggacatgtttagcttcagggatcatcctgggctctctctttgaaatctgcttgggccagtatgatgatgattgcaaactagctaggggaggaccaccagctaccatagttgctattgatgaagaaagtcggaatggtacaattctggtggacaacatgctgatcaaagggactgctggaggaccagaccccaccatagaactttctttaaaggataatgtggattactgggtgttgatggatcctgttaagcaaatgcttttcctgaacagcaccggaagagttctggatagagatccaccgatgaacatacactccattgtggtgcaggtccagtgcatcaacaaaaaagtgggcactattatctaccatgaagtgcgaatagtggtgagagacaggaatgacaactcacccactttcaagcatgaaagctactatgccacagtgaatgagctcactccagttggtaccacaatattcacaggattttcaggagacaatggagctacagatatagatgatggaccaaatggacagatagagtatgttattcagtataatccagatgatccgacatccaatgacacctttgaaattcccctaatgttgactggaaatatagtgttaaggaagaggctcaactatgaagataagactcgctactttgtcataatccaagctaatgaccgtgcccaaaatctgaatgagaggcgaaccaccaccaccactctcacagtggatgttctggatggagatgacttgggtccaatgtttcttccttgtgtccttgtgccaaacactcgtgattgccgtccactcacttatcaagctgccatacctgagttgagaactccggaagaactgaaccccattattgttacgccaccaatccaagccattgatcaggaccggaatattcaaccgccatcagataggccaggaatcctctattccatccttgttgggactcctgaggattacccacgatttttccatatgcatcctaggacagcagaacttagtctcctggagccagtaaacagagactttcaccagaaatttgatttggttattaaggctgaacaagacaatggtcatcctcttcctgcctttgccggtctacacattgaaatactggatgaaaacaatcaaagtccatattttacaatgcccagttatcaaggctatatcctggaatctgccccagtgggagcaaccatttcggacagtctcaatttgacttcacctttaagaatagtagctctggacaaggacatagaagatacaaaagacccagagcttcacctttttctgaatgactacacctcagtcttcaccgtcacacagactggtattactcgctacctcaccttacttcaaccagtggacagggaagaacagcaaacttacaccttttcgataacagcatttgatggtgtacaagaaagtgagccagtcatcgtcaatattcaagtgatggatgcaaatgataacacgccaaccttccctgaaatatcctatgatgtgtatgtttatacagacatgagacctggggacagtgtcatacagctcactgcagtcgacgcagacgaagggtcaaatggggagatcacatatgaaatccttgttggggctcagggagacttcatcatcaataaaacaacagggcttatcaccatcgctccaggggtggaaatgatagtcgggcggacttacgcactcacggtccaagcagcggataatgctcctcctgcagagcgaaggaactccatctgcactgtgtatattgaagtgcttccaccaaataatcaaagccctcctcgcttcccacagctgatgtatagccttgaaattagtgaagccatgagggttggtgctgttttattaaatctacagcacggggattctaaccttagggaaagcactggacagggaaagcactgatcgctacattctgatcatcacagcttcagatggcaggccagatgggacctcaactgccacagtaaacatagtggtgacagatgtcaatgacaatgctccagtgtttgatccttatctgccaagaaatttatctgtggtggaagaagaagccaatgcctttgtgggtcaagtaaaagcaacagaccctgatgctggaataaatggtcaagtgcactacagtttgggtaactttaataatctttttcgtatcacatccaatgggagcatttacacagcagtgaagcttaacagagaagtcagggactactatgaacttgttgttgtggcaacagatggagcagtacaccctcgtcattcaactctaaccttggccatcaaggttttggacattgatgataacagtcctgtgttcaccaattcaacatacactgtccttgttgaagagaatttgccagctgggactaccatccttcaaatagaggccaaagatgtcgaccttggagcaaatgtgtcttaccggataagaagcccagaagtgaagcacttttttgcactacatccatttacaggagaactatcgcttttaaggagtttagattatgaggcatttccagaccaagaagcaagtatcacttttctggtagaggcctttgatatttatggaacaatgccacctggtattgctactgtcacagtgattgtaaaggatatgaatgattatcctcctgtctttagtaaacgaatatacaaagggatggtggctccggatgcagtcaagggtacacctatcacaacagtttatgctgaagatgcagaccctcctggattacctgcaagtcgtgtgaggtatagagtagatgatgtacagtttccttaccctgccagtatttttgaagtggaagaagattctggaagagtaataacacgagtcaatcttaatgaagaacctacaacaatttttaagttggtggtggttgcttttgatgatggggagcctgtgatgtccagcagtgccacagtgaagattcttgtcttacatcctggtgagatcccacgcttcacacaggaggaatatagacctcctccagtaagtgaacttgccaccaaagggaccatggttggtgtaatttctgctgctgccattaatcaaagtattgtgtactccattgtttcaggaaatgaagaagatacatttggaattaataacatcacaggtgttatctatgtgaatggacctctggattatgagaccaggacaagctatgtacttcgagtccaagctgattccctggaagtggtccttgccaatctccgagttccttcaaaaagcaatacagctaaagtatacattgagattcaggatgaaaataatcatcccccagtgtttcagaaaaaattctacatcggaggtgtatctgaagatgcaagaatgtttacttctgtactcagagtgaaggctactgataaagatactggcaattatagtgtcatggcctacagactcataataccaccaattaaagagggaaaagaaggatttgtagtggaaacatatacagggcttatcaaaactgctatgctcttccataatatgaggagatcctacttcaagtttcaagttattgcaactgacgactatgggaagggactgagcggcaaagccgatgtactcgtctccgtggtcaatcagctggatatgcaagtcattgtttccaatgtgcctcctactctagtggaaaaaaagatagaagatcttacagagatcttggatcgctatgttcaggaacaaattcctggtgccaaggtcgtagtggagtccattggagctcgccggcatggagatgccttttccctagaagattacaccaaatgtgacttgactgtctatgcaattgacccccaaaccaacagagccatcgatagaaatgagctttttaaatttttggatggcaaactacttgatatcaataaagactttcagccgtattatggggaaggaggacgcattctggagatccggactccagaggcagtgaccagcattaaaaagagaggagaaagtctaggatacacagaaggggccttgttggctctggccttcatcatcatcctctgctgcattcctgccatcttggtggttttggtcagctacagacagtttaaagtacgtcaagctgagtgtacaaagactgcacgaattcaggccgcattacccgcggctaaaccagcagtgccggctcctgcaccagtggcagcgcccccgccgccgccgccgcctccgccaggtgcgcatctctatgaagaacttggagacagctcaatgcataatcttttccttctctaccattttcaacaaagcaggggaaataactcagtctcagaagacaggaaacatcaacaagttgtgatgcccttttcttccaatactattgaggctcacaagtcagctcatgtagacggatcacttaagagcaacaaactgaagtctgcaagaaaattcacatttctatctgatgaggatgacttaagtgcccataatcccctttataaggaaaacataagtcaagtatcaacaaattcagacatttcacagagaacagattttgtagacccattttcacccaaaatacaagccaagagtaagtctctgaggggcccaagagaaaagattcagaggctgtggagtcagtcagtcagcttacccaggaggctgatgaggaaagttccaaatagaccagagatcatagatctgcagcagtggcaaggcaccaggcagaaagctgaaaatgaaaacactggaatctgtacaaacaaaagaggtagcagcaatccattgcttacaactgaagaggcaaatttgacagagaaagaggaaataaggcaaggtgaaacactgatgatagaaggaacagaacagttgaaatctctctcttcagactcttcattttgctttcccaggcctcacttctcattctccactttgccaactgtttcaagaactgtggaactcaaatcagaacctaatgtcatcagttctcctgctgagtgttccttggaactttctccttcaaggccttgtgttttacattcttcactctctaggagagagacacctatttgtatgttacctattgaaaccgaaagaaatatttttgaaaattttgcccatccaccaaacatctctccttctgcctgtccccttccccctcctcctcctatttctcctccttctcctcctcctgctcctgctcctcttgctcctcctcctgacatttctcctttttctcttttttgtcctcctccctctcctccttctatccctcttcctcttcctcctcctacattttttccactttccgtttcaacgtctggtcccccaacaccacctcttctacctccatttccaactcctcttcctccaccacctccttctattccttgccctccacctccttcagcttcatttctgtccacagagtgtgtctgtataacaggtgttaaatgcacgaccaacttgatgcctgccgagaaaattaagtcctctatgacacagctatcaacaacgacagtgtgtaaaacagaccctcagagagaaccaaaaggcatcctcagacacgttaaaaacttagcagaacttgaaaaatcagtagctaacatgtacagtcaaatagaaaaaaactatctacgcacaaatgtttcagaacttcaaactatgtgcccttcagaagtaacaaatatggaaatcacatctgaacaaaacaaggggagtttgaacaatattgtcgagggaactgaaaaacaatctcacagtcaatctacttcactgtaatgttgcttttcttattttagtcgggcaaacctcttgttgatcatagtcttcaagttgaacatcaaatttgaacgtcaaagaagactctattattttaccccaaattcaatgaaatgcagttttttttctcgtttttaatttaaaaagatattaacctcatcactactaactcactcatataatagatttaccttactttttaaaaactacaaagtagcataatttgttctacatttatttgaaaagtaagtaattttaatctcttttttagtgggaatatgtgggcatgaaaattagatacccaacttaaaccaaaggcatgtctatcatgtggatgcagtaacatttacatttagtttttgatcgtagttttatatgaatgttccaagaaaaaagcagactgttacaaataagttaaaactgatatgattgataggttctgttttttcttgaagcctatgtatttggtaagaagaaatactaccgaagtaaaatataatgtacctagattgtaggagatgacagacataaggtatttcaaaataaatctcaggtgctataacatgtagtcatctgttttct

SEQ ID NO: 54573 - DNA, 5661 bp, Artificial Sequence
  derived and/or modified sequence
atgttcagacagttctacctgtggacctgcctggccagcggcatcatcctgggcagcctgttcgagatctgcctgggccagtacgacgacgactgcaagctggccagaggcggcccccccgccaccatcgtggccatcgacgaggagagcagaaacggcaccatcctggtggacaacatgctgatcaagggcaccgccggcggccccgaccccaccatcgagctgagcctgaaggacaacgtggactactgggtgctgatggaccccgtgaagcagatgctgttcctgaacagcaccggcagagtgctggacagagacccccccatgaacatccacagcatcgtggtgcaggtgcagtgcatcaacaagaaggtgggcaccatcatctaccacgaggtgagaatcgtggtgagagacagaaacgacaacagccccaccttcaagcacgagagctactacgccaccgtgaacgagctgacccccgtgggcaccaccatcttcaccggcttcagcggcgacaacggcgccaccgacatcgacgacggccccaacggccagatcgagtacgtgatccagtacaaccccgacgaccccaccagcaacgacaccttcgagatccccctgatgctgaccggcaacatcgtgctgagaaagagactgaactacgaggacaagaccagatacttcgtgatcatccaggccaacgacagagcccagaacctgaacgagagaagaaccaccaccaccaccctgaccgtggacgtgctggacggcgacgacctgggccccatgttcctgccctgcgtgctggtgcccaacaccagagactgcagacccctgacctaccaggccgccatccccgagctgagaacccccgaggagctgaaccccatcatcgtgaccccccccatccaggccatcgaccaggacagaaacatccagccccccagcgacagacccggcatcctgtacagcatcctggtgggcacccccgaggactaccccagattcttccacatgcaccccagaaccgccgagctgagcctgctggagcccgtgaacagagacttccaccagaagttcgacctggtgatcaaggccgagcaggacaacggccaccccctgcccgccttcgccggcctgcacatcgagatcctggacgagaacaaccagagcccctacttcaccatgcccagctaccagggctacatcctggagagcgcccccgtgggcgccaccatcagcgacagcctgaacctgaccagccccctgagaatcgtggccctggacaaggacatcgaggacaccaaggaccccgagctgcacctgttcctgaacgactacaccagcgtgttcaccgtgacccagaccggcatcaccagatacctgaccctgctgcagcccgtggacagagaggagcagcagacctacaccttcagcatcaccgccttcgacggcgtgcaggagagcgagcccgtgatcgtgaacatccaggtgatggacgccaacgacaacacccccaccttccccgagatcagctacgacgtgtacgtgtacaccgacatgagacccggcgacagcgtgatccagctgaccgccgtggacgccgacgagggcagcaacggcgagatcacctacgagatcctggtgggcgcccagggcgacttcatcatcaacaagaccaccggcctgatcaccatcgcccccggcgtggagatgatcgtgggcagaacctacgccctgaccgtgcaggccgccgacaacgccccccccgccgagagaagcaccggcatcctgaccctgggcaaggccctggacagagagagcaccgacagatacatcctgatcatcaccgccagcgacggcagacccgacggcaccagcaccgccaccgtgaacatcgtggtgaccgacgtgaacgacaacgcccccgtgttcgacccctacctgcccagaaacctgagcgtggtggaggaggaggccaacgccttcgtgggccaggtgaaggccaccgaccccgacgccggcatcaacggccaggtgcactacagcctgggcaacttcaacaacctgttcagaatcaccagcaacggcagcatctacaccgccgtgaagctgaacagagaggtgagagactactacgagctggtggtggtggccaccgacggcgccgtgcaccccagacacagcaccctgaccctggccatcaaggtgctggacatcgacgacaacagccccgtgttcaccaacagcacctacaccgtgctggtggaggagaacctgcccgccggcaccaccatcctgcagatcgaggccaaggacgtggacctgggcgccaacgtgagctacagaatcagaagccccgaggtgaagcacttcttcgccctgcaccccttcaccggcgagctgagcctgctgagaagcctggactacgaggccttccccgaccaggaggccagcatcaccttcctggtggaggccttcgacatctacggcaccatgccccccggcatcgccaccgtgaccgtgatcgtgaaggacatgaacgactacccccccgtgttcagcaagagaatctacaagggcatggtggcccccgacgccgtgaagggcacccccatcaccaccgtgtacgccgaggacgccgacccccccggcctgcccgccagcagagtgagatacagagtggacgacgtgcagttcccctaccccgccagcatcttcgaggtggaggaggacagcggcagagtgatcaccagagtgaacctgaacgaggagcccaccaccatcttcaagctggtggtggtggccttcgacgacggcgagcccgtgatgagcagcagcgccaccgtgaagatcctggtgctgcaccccggcgagatccccagattcacccaggaggagtacagacccccccccgtgagcgagctggccaccaagggcaccatggtgggcgtgatcagcgccgccgccatcaaccagagcatcgtgtacagcatcgtgagcggcaacgaggaggacaccttcggcatcaacaacatcaccggcgtgatctacgtgaacggccccctggactacgagaccagaaccagctacgtgctgagagtgcaggccgacagcctggaggtggtgctggccaacctgagagtgcccagcaagagcaacaccgccaaggtgtacatcgagatccaggacgagaacaaccacccccccgtgttccagaagaagttctacatcggcggcgtgagcgaggacgccagaatgttcaccagcgtgctgagagtgaaggccaccgacaaggacaccggcaactacagcgtgatggcctacagactgatcatcccccccatcaaggagggcaaggagggcttcgtggtggagacctacaccggcctgatcaagaccgccatgctgttccacaacatgagaagaagctacttcaagttccaggtgatcgccaccgacgactacggcaagggcctgagcggcaaggccgacgtgctggtgagcgtggtgaaccagctggacatgcaggtgatcgtgagcaacgtgccccccaccctggtggagaagaagatcgaggacctgaccgagatcctggacagatacgtgcaggagcagatccccggcgccaaggtggtggtggagagcatcggcgccagaagacacggcgacgccttcagcctggaggactacaccaagtgcgacctgaccgtgtacgccatcgacccccagaccaacagagccatcgacagaaacgagctgttcaagttcctggacggcaagctgctggacatcaacaaggacttccagccctactacggcgagggcggcagaatcctggagatcagaacccccgaggccgtgaccagcatcaagaagagaggcgagagcctgggctacaccgagggcgccctgctggccctggccttcatcatcatcctgtgctgcatccccgccatcctggtggtgctggtgagctacagacacttcaagagaagacaggccgagtgcaccaagaccgccagaatccaggccgccctgcccgccgccaagcccgccgtgcccgcccccgcccccgtggccgcccccccccccccccccccccccccccccggcgcccacctgtacgaggagctgggcgacagcagcatgaagggcctgttcctgctgtaccacttccagcagagcagaggcaacaacagcgtgagcgaggacagaaagcaccagcaggtggtgatgcccttcagcagcaacaccatcgaggcccacaagagcgcccacgtggacggcagcctgaagagcaacaagctgaagagcgccagaaagttcaccttcctgagcgacgaggacgacctgagcgcccacaaccccctgtacaaggagaacatcagccaggtgagcaccaacagcgacatcagccagagaaccgacttcgtggaccccttcagccccaagatccaggccaagagcaagagcctgagaggccccagagagaagatccagagactgtggagccagagcgtgagcctgcccagaagactgatgagaaaggtgcccaacagacccgagatcatcgacctgcagcagtggcagggcaccagacagaaggccgagaacgagaacaccggcatctgcaccaacaagagaggcagcagcaaccccctgctgaccaccgaggaggccaacctgaccgagaaggaggagatcagacagggcgagaccctgatgatcgagggcaccgagcagctgaagagcctgagcagcgacagcagcttctgcttccccagaccccacttcagcttcagcaccctgcccaccgtgagcagaaccgtggagctgaagagcgagcccaacgtgatcagcagccccgccgagtgcagcctggagctgagccccagcagaccctgcgtgctgcacagcagcctgagcagaagagagacccccatctgcatgctgcccatcgagaccgagagaaacatcttcgagaacttcgcccacccccccaacatcagccccagcgcctgccccctgcccccccccccccccatcagcccccccagccccccccccgcccccgcccccctggcccccccccccgacatcagccccttcagcctgttctgccccccccccagcccccccagcatccccctgcccctgcccccccccaccttcttccccctgagcgtgagcaccagcggcccccccaccccccccctgctgccccccttccccacccccctgcccccccccccccccagcatcccctgcccccccccccccagcgccagcttcctgagcaccgagtgcgtgtgcatcaccggcgtgaagtgcaccaccaacctgatgcccgccgagaagatcaagagcagcatgacccagctgagcaccaccaccgtgtgcaagaccgacccccagagagagcccaagggcatcctgagacacgtgaagaacctggccgagctggagaagagcgtggccaacatgtacagccagatcgagaagaactacctgagaaccaacgtgagcgagctgcagaccatgtgccccagcgaggtgaccaacatggagatcaccagcgagcagaacaagggcagcctgaacaacatcgtggagggcaccgagaagcagagccacagccagagcaccagcctgtag

SEQ ID NO: 54574 - protein, 1952 aa, Artificial Sequence
  derived and/or modified sequence
MFRQFYLWTCLASGIILGSLFEICLGQYDDDCKLARGGPPATIVAIDEESRNGTILVDNMLIKGTAGGPDPTIELSLKDNVDYWVLMDPVKQMLFLNSTGRVLDRDPPMNIHSIVVQVQCINKKVGTIIYHEVRIVVRDRNDNSPTFKHESYYATVNELTPVGTTIFTGFSGDNGATDIDDGPNGQIEYVIQYNPDDPTSNDTFEIPLMLTGNIVLRKRLNYEDKTRYFVIIQANDRAQNLNERRTTTTTLTVDVLDGDDLGPMFLPCVLVPNTRDCRPLTYQAAIPELRTPEELNPIIVTPPIQAIDQDRNIQPPSDRPGILYSILVGTPEDYPRFFHMHPRTAELSLLEPVNRDFHQKFDLVIKAEQDNGHPLPAFAGLHIEILDENNQSPYFTMPSYQGYILESAPVGATISDSLNLTSPLRIVALDKDIEDTKDPELHLFLNDYTSVFTVTQTGITRYLTLLQPVDREEQQTYTFSITAFDGVQESEPVIVNIQVMDANDNTPTFPEISYDVYVYTDMRPGDSVIQLTAVDADEGSNGEITYEILVGAQGDFIINKTTGLITIAPGVEMIVGRTYALTVQAADNAPPAERRNSICTVYIEVLPPNNQSPPRFPQLMYSLEISEAMRVGAVLLNLQATDREGDSITYAIENGDPQRVFNLSETTGILTLGKALDRESTDRYILIITASDGRPDGTSTATVNIVVTDVNDNAPVFDPYLPRNLSVVEEEANAFVGQVKATDPDAGINGQVHYSLGNFNNLFRITSNGSIYTAVKLNREVRDYYELVVVATDGAVHPRHSTLTLAIKVLDIDDNSPVFTNSTYTVLVEENLPAGTTILQIEAKDVDLGANVSYRIRSPEVKHFFALHPFTGELSLLRSLDYEAFPDQEASITFLVEAFDIYGTMPPGIATVTVIVKDMNDYPPVFSKRIYKGMVAPDAVKGTPITTVYAEDADPPGLPASRVRYRVDDVQFPYPASIFEVEEDSGRVITRVNLNEEPTTIFKLVVVAFDDGEPVMSSSATVKILVLHPGEIPRFTQEEYRPPPVSELATKGTMVGVISAAAINQSIVYSIVSGNEEDTFGINNITGVIYVNGPLDYETRTSYVLRVQADSLEVVLANLRVPSKSNTAKVYIEIQDENNHPPVFQKKFYIGGVSEDARMFTSVLRVKATDKDTGNYSVMAYRLIIPPIKEGKEGFVVETYTGLIKTAMLFHNMRRSYFKFQVIATDDYGKGLSGKADVLVSVVNQLDMQVIVSNVPPTLVEKKIEDLTEILDRYVQEQIPGAKVVVESIGARRHGDAFSLEDYTKCDLTVYAIDPQTNRAIDRNELFKFLDGKLLDINKDFQPYYGEGGRILEIRTPEAVTSIKKRGESLGYTEGALLALAFIIILCCIPAILVVLVSYRQRQAECTKTARIQAALPAAKPAVPAPAPVAAPPPPPPPPPGAHLYEELGDSSILFLLYHFQQSRGNNSVSEDRKHQQVVMPFSSNTIEAHKSAHVDGSLKSNKLKSARKFTFLSDEDDLSAHNPLYKENISQVSTNSDISQRTDFVDPFSPKIQAKSKSLRGPREKIQRLWSQSVSLPRRLMRKVPNRPEIIDLQQWQGTRQKAENENTGICTNKRGSSNPLLTTEEANLTEKEEIRQGETLMIEGTEQLKSLSSDSSFCFPRPHFSFSTLPTVSRTVELKSEPNVISSPAECSLELSPSRPCVLHSSLSRRETPICMLPIETERNIFENFAHPPNISPSACPLPPPPPISPPSPPPAPAPLAPPPDISPFSLFCPPPSPPSIPLPLPPPTFFPLSVSTSGPPTPPLLPPFPTPLPPPPPSIPCPPPPSASFLSTECVCITGVKCTTNLMPAEKIKSSMTQLSTTTVCKTDPQREPKGILRHVKNLAELEKSVANMYSQIEKNYLRTNVSELQTMCPSEVTNMEITSEQNKGSLNNIVEGTEKQSHSQSTSL

SEQ ID NO: 54575 - protein, 981 aa, Artificial Sequence
  derived and/or modified sequence
MFRQFYLWTCLASGIILGSLFEICLGQYDDDCKLARGGPPATIVAIDEESRNGTILVDNMLIKGTAGGPDPTIELSLKDNVDYWVLMDPVKQMLFLNSTGRVLDRDPPMNIHSIVVQVQCINKKVGTIIYHEVRIVVRDRNDNSPTFKHESYYATVNELTPVGTTIFTGFSGDNGATDIDDGPNGQIEYVIQYNPDDPTSNDTFEIPLMLTGNIVLRKRLNYEDKTRYFVIIQANDRAQNLNERRTTTTTLTVDVLDGDDLGPMFLPCVLVPNTRDCRPLTYQAAIPELRTPEELNPIIVTPPIQAIDQDRNIQPPSDRPGILYSILVGTPEDYPRFFHMHPRTAELSLLEPVNRDFHQKFDLVIKAEQDNGHPLPAFAGLHIEILDENNQSPYFTMPSYQGYILESAPVGATISDSLNLTSPLRIVALDKDIEDTKDPELHLFLNDYTSVFTVTQTGITRYLTLLQPVDREEQQTYTFSITAFDGVQESEPVIVNIQVMDANDNTPTFPEISYDVYVYTDMRPGDSVIQLTAVDADEGSNGEITYEILVGAQGDFIINKTTGLITIAPGVEMIVGRTYALTVQAADNAPPAERRNSICTVYIEVLPPNNQSPPRFPQLMYSLEISEAMRVGAVLLNLQATDREGDSITYAIENGDPQRVFNLSETTGILTLGKALDRESTDRYILIITASDGRPDGEEPKKIKKPKVEIREPSEEEEVVVTIEKPPAAEPTYTTWKRARIFPMIFKKVRGLADKRGIVDLEGEEWQRRLEEEDKDYLKLTLDQEEATESTVESEEESSSDYTEYSEEESEFSESETTEEESESETPSEEEESSTPESEESESTESEGEKARKNIVLARRRPMVEEVKEVKGRKEEPQEEQKEPKMEEEEHSEEEESGPAPVEESTDPEAQDIPEEGSAESASVEGGVESEEESESGSSSSSSESQSGGPWGYQVPAYDRSKNANQKKSPGANSEGYNTAL

SEQ ID NO: 54576 - DNA, 5859 bp, Artificial Sequence
  derived and/or modified sequence
atgtttcgccaattctacctgtggacatgtctggcttctgggatcattctggggagcctgtttgagatctgcctcggacaatatgatgatgactgcaaactggctcgcggggggccacctgcaactattgttgccatcgatgaggagagccggaacggaaccatcctggttgataatatgttaattaaggggactgccggaggaccagatcctactatcgaactctctctgaaagacaacgtcgactattgggtcctgatggatccagttaaacagatgctcttcctgaacagcactggcagggttttggacagggacccaccaatgaacattcacagtattgtggtgcaggtgcagtgtattaataagaaagtgggaactattatctatcacgaggtgcggattgtggtccgcgaccgcaacgacaatagtcccacctttaagcatgagtcttactacgcgacagtcaatgagctgacgcccgttgggactaccatattcacaggattctctggagacaacggcgccactgacatagacgatggaccaaatggacagatagagtatgttatccagtacaatcctgacgacccaacttcaaacgacactttcgaaattcctctgatgcttaccggtaacattgttctgcggaagagactgaactatgaggacaagacacgatacttcgttataatacaagcgaacgatcgggcccaaaacttgaatgagagacggacaaccacgacaaccttaaccgtggatgtcctggacggtgacgacctgggaccgatgtttctgccttgcgttctggtgcctaatacccgtgactgtcgtcccctcacgtaccaggcggctatccccgagctccgaaccccggaagaactgaaccctatcattgttacaccaccaatccaagctattgaccaagatcgcaacatccagccccccagcgataggcccgggattctttattcgattctggtagggacccctgaagactatccacgctttttccacatgcacccccgcacagcagagctgtcacttctcgaaccggtcaatcgcgattttcaccaaaaattcgatctcgttatcaaagctgaacaagacaatggccacccccttcccgctttcgcaggcctacatattgagatcctggacgagaacaaccaaagcccttacttcaccatgcctagctaccagggctacatcctggaatctgcacctgtgggcgcaacaatctccgactccctgaatctcacaagcccactgagaattgtggccctggacaaggacatcgaggatactaaagatcctgagctccaccttttcctgaatgattacaccagtgtgttcactgttacccagaccggcatcacgagatatctgaccctgttgcaaccggtggaccgagaggagcagcaaacctatacttttagcataactgcatttgacggagtccaggaatcagaaccagtgattgtgaacatccaggtcatggacgctaatgataatactcctacctttcctgagattagttacgacgtttacgtgtacactgatatgaggcccggggatagcgttatccagttgactgctgtagatgctgatgagggctccaatggtgaaataacctacgaaatcctggtgggggcacaaggggacttcatcattaacaaaactactggcctgattacgatcgcaccaggagtggaaatgatcgtcggtaggacttatgccttgacagtgcaggccgccgataacgctccccccgccgagcggcggaactccatttgcacggtctatatcgaggttctgcctcccaacaatcaatcaccaccccggtttccacaactgatgtactcccttgaaataagcgaggccatgagagtgggagcagtgctgctcaacctccaggcgactgatcgggagggggacagcatcacctacgccattgaaaacggggaccctcaacgggtgttcaacctgtccgaaaccaccggcatcctgaccttggggaaagcactggatagggagagtacagaccgctatatcctgatcataacagcttccgacggccggcctgacggcacgtctaccgccacagtaaatatcgtggtaaccgatgtgaatgataatgctcctgtgttcgatccatatctcccccgaaatctgtcagtcgttgaggaggaggcgaatgctttcgtcggccaagttaaggctaccgaccctgacgccggaataaatgggcaggtgcactattccctcgggaactttaacaatttgtttcgaatcacgtccaacggatctatttatactgccgtgaagctgaacagggaagtcagagattattatgagctggtggtcgtggctactgacggggcggtgcacccacgccattcaactttaacattggctataaaggtcttagacatcgatgataacagtcccgtttttactaactctacttacaccgtgctggttgaagagaacttaccagctggaaccactattctgcagattgaggccaaagacgtcgacctgggggctaatgtctcctatagaatccgctcacctgaagtgaaacacttttttgcacttcatccctttaccggagagttaagtcttctgcggagcctcgattacgaagcattcccagatcaggaggcctcaatcactttcctggtagaggcatttgacatctacgggacaatgcccccaggcatcgccacagttacagtcattgtgaaagatatgaacgactatccccctgtgttcagcaaacgcatctacaagggaatggtcgcaccagatgccgtaaagggtactcccattaccactgtgtacgccgaagacgcggaccccccagggttgcctgccagccgcgtaaggtatcgagtcgatgacgtccaattcccatacccagcttctattttcgaggttgaggaggacagtggacgcgtcattacacgcgtcaatcttaacgaggagcctaccaccatcttcaagctcgttgttgtggcctttgatgacggagagccagtcatgtcatcttccgcaactgtgaagattcttgtgttacatcccggcgagatcccacgctttacacaagaagagtacaggcccccccccgtgtctgagctcgcaactaagggcactatggtaggtgtgatcagcgctgccgctatcaatcaaagcatcgtttattcgatcgtgtcaggtaacgaggaagatacattcggaattaataacatcaccggagtgatttacgtgaacggtcccctggactacgagaccagaacaagctacgttttgcgcgtgcaggcagattcgctcgaggttgtgcttgcgaatctacgggtgccatctaaatctaacacggccaaagtgtatatcgaaattcaggacgaaaataaccatcctcccgtgttccagaaaaagttttacattggaggggtcagtgaggacgcccgaatgttcacttccgtgctgcgagttaaggccaccgacaaggacaccggaaactactctgtcatggcatatcgactgatcatccctcccattaaagaggggaaggagggctttgtggtcgagacctataccggattgatcaagacagccatgctgtttcacaatatgcggaggtcatatttcaagttccaggtcatagctaccgacgactacggcaagggactaagtgggaaagccgacgtgcttgtgtctgtagtgaatcaactggacatgcaagtgatcgtctcaaatgtcccacccactcttgttgagaaaaagattgaagaccttaccgagatacttgatcgctatgtgcaggaacagatacctggcgccaaggtggtcgttgagtctattggggctagacgacacggagatgccttctctcttgaggactatacaaagtgtgaccttactgtctatgccatagacccgcagaccaaccgcgctatagacagaaatgaacttttcaagttccttgatgggaagttgctcgatataaataaagatttccagccttattacggtgaggggggcagaatactcgagatacgcacacctgaggcagtgacttctatcaaaaagaggggcgaatctcttggatataccgagggcgctcttctggcattagctttcatcatcatactgtgttgtatccccgccatcctggtggtactggtatcctacaggcagcgccaagcagagtgtacaaaaaccgcaagaatccaggcggcattgcccgctgccaaacccgctgttcccgcaccagcacccgtagccgcaccgccgccccccccccctccgcctccgggagcacatctctacgaggaactgggcgactcctccatcctgtttttactgtatcacttccagcagtcccggggcaataactccgttagtgaagatcggaaacatcagcaggtggtgatgcccttctcctccaacactattgaggcacacaaatccgcacacgtcgacggatctctgaaatctaataaactgaagagcgctcgcaagtttacgttcctgtcagatgaggacgacctgtccgcgcataaccccctttacaaggagaacatctcccaggtttccactaattccgatatcagtcagcggacagacttcgtggaccccttctccccaaagatccaggctaaatctaagtccctgagaggtccgcgagaaaagatccaacgactttggtcacagtctgtgagtttacccaggaggctcatgaggaaagtgccgaaccgccctgaaataatcgacctgcaacaatggcaaggaacccggcagaaagccgaaaacgaaaacaccggcatatgcactaataagaggggttccagcaaccccctgctgaccacagaagaagcaaacctgacggagaaagaggagatcaggcaaggagagaccctgatgattgaaggtaccgaacaactgaagtcactctcctccgactctagcttttgtttccccaggccacacttcagtttcagtacactgcccaccgtgtcaagaaccgtcgagctgaagtccgagccaaatgtcatctcatcacccgccgaatgcagtctggaattatcaccaagtcgtccttgtgttctccattctagtctgtccaggagggaaacccccatctgtatgcttcctattgagactgaacgcaacatctttgagaacttcgcccaccctccaaatatctcgccatccgcctgtcccctgcctccaccacctccaatttcaccacccagccctccaccggctcccgctcctcttgcacctccaccagacatttctcctttctcccttttttgccctcctccctcccctccttcaatacctctcccccttcccccccccacattctttccattatcggtgagcacaagcgggccacctaccccaccccttctcccgccctttcctacccctctgccacctccccccccttccattccttgtcctcctccccctagtgcctccttcctctccaccgaatgtgtatgtatcaccggtgtcaaatgcactaccaacctgatgcctgctgagaaaattaagtcttcaatgacacagctgtccactacgactgtctgcaaaaccgatccacaaagggaacccaagggaattctgcgacacgtgaagaatctggccgagcttgaaaaatcggtggccaacatgtatagccagattgaaaaaaattacttgaggaccaacgtgtccgagcttcaaaccatgtgccctagcgaagtgacgaatatggaaattacatccgagcagaataagggctctctgaacaatattgtcgagggaacagagaagcagtctcattctcaaagcaccagcttgtag

SEQ ID NO: 54577 - DNA, 5859 bp, Artificial Sequence
  derived and/or modified sequence
atgttccggcagttctacctgtggacctgcctggccagcggcatcatcctgggcagcctgtttgagatctgcctgggccagtatgatgatgactgcaagctggcccggggcggccccccagccaccatcgtggccattgatgaggagagcagaaatggcaccatcctggtggacaacatgctgatcaagggcacagctgggggccctgaccccaccatcgagctgagcctgaaggacaacgtggactactgggtgctgatggaccctgtgaagcagatgctgttcctgaacagcacaggccgggtgctggaccgggacccccccatgaacatccacagcatcgtggtgcaggtgcagtgcatcaacaagaaggtgggcaccatcatctaccacgaggtgagaattgtggtgcgggacagaaatgacaacagccccaccttcaagcatgagagctactatgccaccgtgaatgagctgacccctgtgggcaccaccatcttcaccggcttcagcggggacaacggggccacagacattgatgatggccccaacggccagattgaatatgtgatccagtacaacccagatgaccccaccagcaatgacacctttgagatccccctgatgctgactggaaacatcgtgctgaggaagaggctgaactatgaggacaagacccgctactttgtgatcatccaggccaatgaccgggcccagaacctgaatgaaagaaggaccaccaccaccaccctgactgtggatgtgctggatggagatgacctgggccccatgttcctgccctgtgtgctggtgcccaacacccgggactgccggcccctgacctaccaggccgccatccctgagctgcggaccccagaggagctgaaccccatcatcgtgaccccacccatccaggccatcgaccaggacaggaacatccagcccccaagtgaccggcccggcatcctgtacagcatcctggtgggcaccccagaggactacccccgcttcttccacatgcaccccaggacagctgagctgagcctgctggagcctgtgaacagagacttccaccagaagtttgacctggtgatcaaggccgagcaggacaatggccaccccctgcctgcctttgctggcctgcacatcgagatcctggatgagaacaaccagagcccctacttcaccatgcccagctaccagggctacatcctggagagcgcccctgtgggcgccaccatcagtgacagcctgaacctgaccagccccctgcgcatcgtggccctggacaaggacatcgaggacaccaaggaccctgagctgcacctgttcctgaatgactacaccagcgtcttcaccgtgacccagacaggcatcacccgctacctgaccctgctgcagcctgtggaccgggaggagcagcagacctacaccttcagcatcacagcctttgatggagtgcaggagagcgagcccgtcatcgtgaacatccaggtgatggatgccaatgacaacacccccaccttccctgagatctcctatgatgtgtatgtgtacacagacatgaggcctggggacagcgtcatccagctgacagctgtggatgctgatgagggcagcaatggagagatcacctatgagatcctggtgggcgcccagggcgacttcatcatcaacaagaccaccggcctcatcaccatcgcccctggggtggagatgattgtgggccgcacctacgccctgactgtgcaggccgctgacaatgcccccccagctgagaggagaaattccatctgcaccgtgtacatcgaggtgctgccccccaacaaccagagccccccacgcttcccccagctgatgtacagcctggagatcagcgaggccatgagggtgggcgctgtgctgctgaacctgcaggccacagaccgggagggggacagcatcacctacgccattgaaaatggagacccccagagggtcttcaacctgtctgagaccaccggcatcctgaccctgggcaaggccctggaccgggagagcacagaccgctacatcctgatcatcacagccagtgatggccgcccagatggcaccagcacagccaccgtgaacatcgtggtgacagatgtgaatgacaatgcccctgtgtttgacccctacctgcccaggaacctgtctgtggtggaggaggaggccaatgcctttgtgggccaggtgaaggccacagatcctgatgctggcatcaatggccaggtgcactacagcctgggcaacttcaacaacctcttccgcatcaccagcaatggcagcatctacacagctgtgaagctgaaccgggaggtgcgggactactatgagctggtggtggtggccacagatggagctgtgcaccccaggcacagcaccctgaccctggccatcaaggtgctggacattgatgacaacagccctgtgttcaccaacagcacctacacagtgctggtggaggagaacctgcctgctggcaccaccatcctgcagatcgaggccaaggatgtggacctgggcgccaacgtgtcctaccgcatccgcagccctgaggtgaagcacttctttgccctgcaccccttcaccggggagctgagcctgctgcggagcctggactatgaggccttcccagaccaggaggccagcatcaccttcctggtggaggcctttgacatctacggcaccatgcctcctggcatcgccaccgtgacagtgattgtgaaggacatgaatgactacccacctgtgttcagcaagaggatctacaagggcatggtggccccagatgctgtgaagggcacccccatcaccaccgtgtatgcagaagatgctgaccccccaggcctgcctgccagccgggtgcgctacagagtggatgatgtgcagttcccctacccagccagcatctttgaggtggaggaggacagcggccgggtcatcaccagggtgaacctgaatgaggagcccaccaccatcttcaagctggtggtggtggcctttgatgatggagagcctgtgatgagcagcagcgccaccgtgaagatcctggtgctgcaccctggagagatcccccgcttcacccaggaggagtaccggcccccacctgtgtctgagctggccaccaagggcaccatggtgggcgtcatctctgctgctgccatcaaccagagcatcgtgtacagcatcgtgtctggaaatgaggaggacaccttcggcatcaacaacatcaccggggtcatctacgtgaatggccccctggactatgagaccaggaccagctatgtgctgcgggtgcaggccgacagcctggaggtggtgctggccaacctgcgggtgcccagcaagagcaacacagccaaggtgtacatcgagatccaggatgagaacaaccacccccctgtgttccagaagaagttctacatcggcggcgtgtctgaagatgccaggatgttcacctctgtgctgcgggtgaaggccacagacaaggacaccggcaactacagcgtgatggcctaccgcctcatcatcccccccatcaaggagggcaaggagggctttgtggtggagacctacacaggcctcatcaagacagccatgctgttccacaacatgaggaggagctacttcaagttccaggtgattgccacagatgattatggcaagggcctgagcggcaaggcagatgtgctggtgtctgtggtgaaccagctggacatgcaggtgattgtgtccaatgtgccccccaccctggtggagaagaagattgaggacctgacagagatcctggaccgctacgtgcaggagcagatccctggggccaaggtggtggtggagagcattggagccaggagacatggagatgccttcagcctggaggactacaccaagtgtgacctgactgtgtatgccatcgacccccagaccaacagagccatcgacagaaatgagctgttcaagttcctggatggcaagctgctggacatcaacaaggacttccagccctactatggagagggcggccgcatcctggagatccgcaccccagaggccgtgaccagcatcaagaagagaggagagagcctgggctacacagaaggagccctgctggccctggccttcatcatcatcctgtgctgcatcccagccatcctggtggtgctggtgtcctaccggcagaggcaggctgaatgtaccaagacagcccgcatccaggccgccctgcctgctgccaagccagctgtgcctgccccagcccctgtggccgcccctcctcctcctcctcctcctcctcctggggcccacctgtatgaggagctgggggacagcagcatcctcttcctgctgtaccacttccagcagagccggggcaacaacagcgtgtctgaggacaggaagcaccagcaggtggtgatgcccttcagcagcaacaccatcgaggcccacaagagcgcccacgtggatggcagcctgaagagcaacaagctgaagagcgccaggaagttcaccttcctgagtgatgaagatgacctgagcgcccacaaccccctgtacaaggagaacatcagccaggtgtccaccaacagcgacatcagccagaggacagactttgtggaccccttcagccccaagatccaggccaagagcaagagcctgcggggcccccgggagaagatccagaggctgtggagccagagcgtgtccctgccccggcggctgatgaggaaggtgcccaacagacctgagatcatcgacctgcagcagtggcagggcacccggcagaaggcagaaaatgaaaatacaggcatctgcaccaacaagaggggcagcagcaaccccctgctgaccacagaggaggccaacctgacagagaaggaggagatccggcagggcgagaccctgatgattgagggcacagagcagctgaagagcctgagcagtgacagcagcttctgcttcccccggccccacttctccttcagcaccctgcccaccgtgtccaggacagtggagctgaagtctgagcccaacgtcatcagcagccctgctgagtgcagcctggagctgagccccagccggccctgtgtgctgcacagcagcctgagcagaagagagacccccatctgcatgctgcccattgaaacagaaagaaacatctttgaaaattttgcccacccccccaacatcagccccagcgcctgccccctgcccccacctccacccatcagcccccccagccccccaccagccccagcccccctggcccctcctccagacatcagccccttcagcctcttctgccccccacccagcccccccagcatccccctgcccctgcccccacccaccttcttccccctgtctgtgtccaccagcggcccccccaccccacccctgctgccccccttccccacccccctgcccccacctcctccttccatcccctgccccccacctccttctgccagcttcctgagcacagaatgtgtgtgcatcactggagtgaagtgcaccaccaacctgatgcctgctgagaagatcaagagctccatgacccagctgagcaccaccaccgtgtgcaagacagacccccagcgggagcccaagggcatcctgcggcacgtgaagaacctggccgagctggagaagtctgtggccaacatgtacagccagatcgagaagaactacctgcggaccaacgtgtctgagctgcagaccatgtgccccagcgaggtgaccaacatggagatcaccagcgagcagaacaagggcagcctgaacaacatcgtggagggcacagagaagcagagccacagccagagcaccagcctgtag

SEQ ID NO: 54578 - DNA, 5859 bp, Artificial Sequence
  derived and/or modified sequence
atgttccggcagttctacctgtggacctgcctggccagcggcatcatcttaggatctttgtttgaaatttgcttgggccagtatgacgatgattgcaagctggctcggggcggacctcccgcaaccattgttgcaattgatgaagaaagcagaaacggcacaattttggttgataatatgctcatcaagggtacagccggcggccccgacccgactatcgagctgtcccttaaggacaacgttgactactgggtcttgatggacccagtgaagcaaatgttgttcctcaattctacaggaagagtgctggaccgcgacccccccatgaatatccactcgatcgtggttcaggtgcagtgcattaacaagaaagtcggaaccataatctatcacgaggtccgtatcgtggttagggacaggaacgacaattcccccacgttcaaacatgagtcctattacgctaccgtgaacgagttgacccccgtggggaccactatcttcactgggtttagcggcgacaatggagccacagacatagatgacgggcccaatggacaaatagaatatgtcattcagtataacccggacgaccctactagcaacgataccttcgagatccctttgatgttgacgggaaacatcgtcctccggaaacgattaaactacgaagataagacgcggtacttcgtgatcatccaggccaacgaccgggcccagaatcttaatgaaagacgaaccactacaaccacccttaccgtggacgttctggacggtgatgacctgggccctatgttcctgccctgtgttctggtccctaatacacgcgattgtagacccttaacataccaggccgcaatccccgaactgcgaactcctgaggaattgaatccgataatcgtgacgccaccgatccaggcaatcgaccaagaccgcaatatccagccaccctccgaccgccctggcatcctctatagcattctcgtagggacccctgaggactatccaagattcttccatatgcacccccgaactgccgagctttcgctgctcgaaccggtgaatcgcgacttccatcaaaagtttgacctggtaattaaagctgaacaggataacggccaccccctgcctgctttcgctggactgcatatagagatcttggacgagaataatcagtcaccgtatttcactatgcctagttaccagggttacattctggaaagtgctcccgttggggctaccataagcgatagtctgaaccttacgagcccgttaagaattgtagctctggataaggatatcgaggacaccaaagatccagaacttcatctgttccttaacgactatacttcagtgtttaccgtcacgcaaacaggcataactaggtatctcaccctgctacaacccgtggatagagaggagcagcagacatatacattctctattactgcattcgacggagtccaggaatcagagcccgttattgtaaatatccaggtgatggacgcaaatgacaatacacctacatttccagaaataagttatgatgtgtacgtctataccgacatgaggcctggagattccgtgatccaactaaccgcagtagacgctgatgaaggcagcaatggagaaattacatacgagatcctggtgggtgcccaaggcgatttcataatcaacaaaaccactggcctgattacaatcgcccctggggtggagatgatcgtgggtagaacgtacgcattaacggtgcaggccgcggataacgcacctcccgcagagcgccgaaacagtatctgcactgtgtatattgaagtgcttccacccaacaatcagagccccccccgattccctcagcttatgtacagcctcgaaatcagcgaagccatgcgagttggtgcagttctgttgaacctgcaggcaaccgatagggaaggtgactcaatcacatacgcgatcgagaacggggatccgcaaagagtgtttaatctgtccgaaacgaccggcattctcaccctagggaaagcccttgatcgggagtctaccgacaggtatattcttatcattacagccagcgatggccgccctgatgggacttctactgctaccgttaatattgtggtgacagatgtcaacgacaacgcgcctgttttcgacccctacttgcccaggaatctgagtgtggtagaagaggaggcgaacgcatttgtgggccaggtcaaagctaccgatcccgacgctggtatcaatggacaggtgcactattctctgggtaatttcaataatctattcagaatcaccagcaacggctccatctacaccgcagttaagttaaacagagaggtccgcgactattacgagttagtagtggtcgccacagacggtgctgtgcatcctcggcactcaaccctgaccctggcgatcaaggtgcttgacattgatgacaattcacccgtgtttacgaactccacctatactgtgttggtggaggagaacctacccgccggcactacgattttgcaaatcgaagccaaagacgtggacttgggcgctaatgtttcatataggattaggtccccagaggtgaaacatttctttgctctgcatccctttacaggagaattatccctgctaaggagtcttgactacgaagcatttcctgatcaggaggcaagtattactttcttagtggaggcgttcgatatctacggaacgatgccccctggaatcgcaaccgtgactgtcatcgtgaaagatatgaacgactacccaccagtcttttctaagcgcatttacaagggaatggttgcgccagacgccgtcaagggcacgcctataactacagtttacgccgaggacgctgatccgcctggactacctgccagtcgggtgcgataccgcgtcgatgacgtgcagttcccctaccccgcttccatctttgaagtagaagaggattctgggcgggtgattaccagagtgaacttgaacgaggagcctaccacaattttcaaattagtggtggtggcctttgacgacggagaacccgttatgtcctcgagtgccacagtcaaaattctagtcctccatcccggggagataccaagatttacccaggaggagtacaggcccccgccggtgtcagagctcgcaactaaagggacaatggtcggtgtgatatcagctgcagccatcaaccaatctatagtctatagcatcgtgtccggcaacgaagaggacactttcgggattaataatatcacaggcgtgatctacgtaaatggacccctcgactacgaaaccagaactagctatgtgctcagagtccaggctgacagcctggaagtcgtgctcgccaatcttcgagtgccttctaaaagtaacactgccaaggtatacatcgagatccaggacgagaataatcacccccccgtcttccaaaagaaattctatatcggcggagtatcagaggacgctaggatgttcacctccgttctgcgcgtgaaagccactgataaagataccggaaattattccgtgatggcctatcggcttatcattccccctatcaaagagggaaaagagggatttgtggtagagacttacacaggactaatcaaaaccgcaatgcttttccacaacatgcggcgctcctatttcaagttccaggttattgctactgacgattacgggaagggactgtctggcaaagctgacgttttggtgagcgtggtcaatcagctggatatgcaggtgatcgtgtccaacgtgcctcctacactggttgaaaaaaaaatagaagatctgaccgaaatcctcgatcggtatgtgcaagaacagatccccggcgctaaggtagtggtggagagcattggggcacgccgacacggagacgccttctcactggaggactataccaaatgcgaccttacggtctacgccattgacccacagactaatagggctatcgacagaaatgaactgtttaaatttttagacggaaaactactcgatatcaacaaggatttccagccatattatggtgaaggtggtcgaattctcgagatcagaacccccgaagccgtcaccagtatcaaaaagcggggtgaatcgcttggatacaccgaaggagccctcctggctctcgcgttcataataatcctctgttgcatacctgcaattttagtggttttagttagttacagacagagacaggcggagtgcacgaagactgctaggattcaggcagcactgcccgctgccaagccggccgtcccagccccagccccagtagctgccccaccaccccctcctccccctcctcccggcgcccacttgtacgaggagttgggagatagcagcattctgtttctcctgtatcacttccagcaatcacgtggcaacaacagtgttagcgaagatcgaaaacaccagcaagtggtgatgccttttagcagcaatacaattgaggcacataagtcagctcacgtggatgggagcctaaaaagtaataagctcaagtcggctaggaaatttacgttcttgtctgatgaggatgacctgagcgcccacaaccctttgtataaagagaacattagccaagtcagcaccaacagtgatattagtcagcgtactgattttgtggatcctttttctcctaagatccaggcaaaatccaagtctcttcgcggcccacgcgaaaaaattcagaggctgtggtcacagagcgttagccttccccggagattaatgaggaaagttcccaatcgtccagaaatcatagatctccagcaatggcagggaacacgccagaaagccgagaacgagaataccggtatttgtactaacaaacggggatcatctaaccccctcctgactaccgaagaagcgaaccttacagaaaaggaagaaatcaggcagggagagacgttgatgattgaggggaccgaacaactaaaaagtttgtcttccgatagttccttctgttttcctcggcctcacttttcattttcaaccctgccgactgtttcgaggaccgtggagcttaagagcgagcctaacgttatctcctctcccgcagagtgctctttagagctgagccccagcaggccctgcgtgctgcactcttctctgtctcggagagaaaccccgatttgcatgctgcctatcgaaaccgaaagaaatatctttgagaactttgctcatccacctaatatctctcctagtgcgtgccccctacccccccccccccccatttccccaccgagtcccccgcccgctccagccccactggcacctccacctgatattagccccttctcacttttttgcccaccacccagccccccaagcatacccttacctctgcccccgcctacttttttcccactcagcgtgtcgacctctggcccgccaactccccctctgctgcccccctttcccactcctttgccacccccccctccttcgataccatgccctccacctcccagcgcttcctttttgagcacagagtgtgtttgcatcacgggagtcaagtgcaccacaaatctcatgccagccgagaagatcaagagcagtatgactcagctgagcaccaccacagtgtgtaagaccgatccgcagcgcgaacctaaaggaatacttcgtcatgtcaaaaaccttgctgaacttgaaaagtccgtcgccaatatgtatagtcagattgagaagaattaccttaggaccaatgtctccgagctgcagactatgtgccccagcgaagtcaccaacatggagatcacatccgaacagaacaaggggagtctgaataatatagtggaaggcactgagaaacagagccacagtcagagcacctcgctgtag

SEQ ID NO: 54579 - DNA, 5858 bp, Artificial Sequence
  derived and/or modified sequence
atgttccgacagttttacctatggacgtgcttggcctcaggcatcatcctgggtagcttgtttgaaatatgcctggggcagtatgacgatgattgcaaattagccagaggtggtccccctgccacaatcgtagctatcgatgaggagtctaggaatggcacaattctcgtggacaatatgctcatcaagggcaccgccggagggccagaccccaccatcgaactctcactgaaggacaatgttgactactgggtgctgatggatcctgtcaaacaaatgctgttcttgaacagtactggacgcgtgctggaccgcgaccctcccatgaacattcactcaatcgttgtgcaggtacagtgcatcaacaagaaggtgggaacgatcatctatcacgaggtgaggattgtagtgagggaccggaatgacaattctcccacattcaagcacgaatcttattacgccacagtgaacgagctcactccagttggaactactatctttacaggtttctccggagataacggcgcaactgacatagacgacgggccaaatggtcagatcgagtacgtgattcagtacaaccccgacgaccctacgtctaacgacacattcgagatcccactgatgcttacaggcaacattgtgctgcggaaaagactcaactatgaggataagactcgctactttgtcattatccaggccaatgatagggcacagaacttgaacgagagacgcaccacaactactactctgaccgtagacgtgctcgacggcgatgacctcggtccaatgttcctgccttgcgtgttagtgccaaacaccagggattgcagacccctgacgtatcaggctgcaatacctgaattgcgaacaccagaggaattgaatcccataattgtgacccctccgattcaggccatagaccaggataggaatatccagccccctagtgatcgacctggaattctgtacagcatcctggtgggaacaccggaggactatccgagatttttccacatgcaccctcggacagctgagcttagccttctcgaacccgtcaaccgagattttcatcagaaatttgacctcgtcattaaagctgaacaggataatggtcaccccttgccggctttcgctggtctgcacatcgagatactggacgagaataatcagtctccttacttcacaatgccaagttaccaagggtacattttggaatccgcccctgtcggggcaaccatctccgacagcctaaatcttacctctcccctcaggattgtggccctggacaaagacatcgaagacacaaaggacccagaactccacctctttctgaacgactacacatcagtttttaccgtgacccagactggcataactagatatctcacgttgctgcagcccgttgatcgcgaagagcagcaaacatatacattctccattactgcttttgatggcgtccaggagtcggaacccgttattgtgaacatacaggtaatggacgccaatgacaacacgcccacttttcctgagatctcctacgacgtctatgtgtatactgacatgcgacccggagattcagtaattcaattaaccgctgttgacgcggatgaaggctctaatggcgaaatcacatacgagatattagtgggagctcagggcgactttattataaataaaaccactggactgataacaatcgcacccggagtagagatgatcgtcggtagaacatatgcgctcacggttcaagctgcagataacgccccacctgccgagagaaggaatagcatatgtacggtatatattgaggttctgccacccaataatcagtccccaccgcgtttcccccagctgatgtattcactggagattagcgaggctatgagggtcggcgctgtgctgctcaatttgcaggctactgaccgagaaggtgacagcatcacgtacgcaatcgagaacggggacccacagagagttttcaatctctcagaaacaacaggcatcctgaccctggggaaagcgctcgacagagagagtactgacaggtacattctaattataactgcctcagatggaaggcctgatggcacttcgaccgccaccgttaatattgttgtcaccgacgtcaacgacaatgcacccgtgtttgatccctacctgcccagaaacctctcagtggtagaagaggaagccaatgcattcgtggggcaggtaaaggctactgacccggatgcaggaattaacggccaagttcactattccttaggtaacttcaacaacctttttcgcattacttccaacggctctatctataccgccgtgaagttgaatcgggaagttagagattattacgaactcgtcgtcgtggcaacagacggcgctgtgcaccctaggcatagcacgctgactctagctataaaggtcctggacatcgatgacaatagccctgttttcacaaactcaacttacactgtgctcgtggaggagaatctcccggctgggactactatacttcaaattgaagctaaggacgttgatctgggtgcaaacgtgtcttaccgcatccgctctcccgaggtcaagcacttctttgcgctacatccctttaccggagagctgagtctgctgagatctttggactatgaagcattcccagaccaggaggcatctatcacttttctcgtagaggcattcgacatttatggaacgatgcccccaggtatcgccaccgtgacagtcattgttaaagatatgaatgactacccccctgtgttcagtaaaagaatttacaagggcatggtggctcctgatgccgttaagggaacaccaatcaccactgtgtacgctgaagacgccgatccacccggtttaccagcatctcgggttcggtacagggttgacgatgtgcagttcccgtatcctgcaagcatcttcgaggtggaagaggattctggcagggtgattactcgtgtaaacctgaacgaggaaccgactacaatatttaaacttgttgtggtggcatttgacgacggagagccagtcatgtcttctagcgccacagtgaaaatcctagtcctgcatcccggagagatcccccgttttactcaagaggagtaccggcctcctcccgtctccgaattggccacaaaagggactatggtgggggtgatctctgccgcagcaataaaccagtctattgtctatagtatcgtctccggtaatgaagaagatactttcgggatcaacaatatcactggggtcatatacgtcaatggccctttggactatgaaaccagaacctcctacgttctgcgagtacaggcagactcattggaggttgtactggctaacctcagagtcccatccaaatcgaacacagcgaaggtatacatcgaaatccaggatgaaaacaaccaccctcccgtattccagaagaaattttatattggaggcgtgtcagaggatgccagaatgtttactagcgttcttcgggtgaaggcaacagataaagacactgggaattatagtgtgatggcatataggcttatcatccctccaataaaggaagggaaggaagggttcgtggtggagacatataccggcctgatcaagacggccatgttgtttcacaatatgaggagatcctacttcaaattccaggtgattgccactgacgattacggaaagggcctcagcggtaaggctgatgtactggtctctgtcgtaaatcagctggatatgcaggtcattgtctccaatgtcccaccgactttggtggagaagaaaatcgaggaccttaccgaaattctcgaccgatacgtgcaggaacagatccctggggcaaaagtggtcgttgagtctataggagccaggcgccacggcgacgcattcagcctggaggactatacaaagtgcgatttaacagtctacgccatcgacccacaaactaaccgggctatcgatcgcaatgagttgtttaaattcctagacggaaagctcctggacataaacaaggatttccagccttattatggcgagggtggaagaatccttgaaattcggacaccagaggcagtgacttccataaaaaaaagaggcgaaagtctgggctacaccgagggagccctgcttgcgctggctttcattatcatcctgtgttgcatccccgcaatcctcgtagtgctggtttcctacaggcagaggcaggctgagtgcaccaagaccgcccgtatacaggccgctttgcctgcagcaaagccagctgtgccagctcccgcacctgtggccgctcctccacctcctccacccccaccacccggtgcccatttgtacgaagagcttggcgacagttcaattttgttcctgctgtatcacttccagcagagtcgcggaaacaacagcgtgagcgaagatcgcaagcatcagcaagtggtgatgcctttttccagcaatacaatcgaagcccacaaatcagcccatgtcgacgggagccttaagtcaaacaagcttaaatctgctcggaagtttacatttctcagcgacgaagatgatctgtccgctcacaaccccctgtacaaagaaaatatctcccaggtgagcacaaactcggatatcagtcagcgcaccgacttcgtggacccctttagccctaagatacaggccaaaagtaaaagcctgagggggcctagggagaaaattcagagactctggtcacagtcagtgagtttgcccagacggctgatgcgaaaagtgcccaatcggcctgagatcattgacctgcagcaatggcagggcacgcgccagaaggctgaaaacgagaacactggcatctgtaccaataaaagaggctcaagcaatccgttgctaacaactgaggaagccaacttgaccgaaaaagaagaaattcggcagggagaaacgctcatgattgaaggaactgagcagctaaagagtctgagctcagactcatctttctgtttccccagaccgcattttagcttctccaccctgccaacagtttccaggactgtggaacttaaatctgagccaaacgtgataagcagtccggcagaatgtagcctggagttgagcccgtcccgtccctgcgtgttacactcaagtctctccaggagggagacgcccatttgtatgctgcctattgaaacagaaaggaatatattcgagaactttgctcatccccctaacatatccccgtcggcatgccccctgccgcctccaccgcctattagtcccccatctccaccaccagctcccgctcctctggcccctccacccgatatttcaccattttccctattttgcccacctccttctccgccatcgatcccgctgccactgcctccacctacattcttccctctctccgtgagtacgtcaggacccccaacacctcccttgctgcctccattccccacacctctgcctccgcctcctccttccataccatgtccccctcccccttcggcgtcttttttaagtacagaatgcgtatgtattacaggagtcaaatgtaccactaatctgatgccagccgagaagattaagtcttctatgacgcagttgagcaccactaccgtgtgcaagacggacccccagcgagagccaaaagggattctgcggcacgtcaagaatctcgccgagctggagaagtcagtcgccaacatgtactcccagatcgagaaaaactacctccggacaaacgtgtcagagctgcaaactatgtgcccatctgaagtgactaacatggagataacatcagagcaaaacaaagggagtctgaacaacatcgtggagggcacagaaaagcagtctcactctcagtccaccagcctcta

SEQ ID NO: 54580 - DNA, 6836 bp, Artificial Sequence
  derived and/or modified sequence
caacgtgctgagctaatagcgacagatagagggcagacagattcctgctagcagcttagtgttagttgcttgtggtaactaaggcaggtggcatacatctcagaacgtggagaatgatggtatgctttctgagttaacatgttgaactgttttgcttttctaaaaattttcctagtaacattttcttgatgatatgagagtggatatcaatgcctcacagaaacaagaggtggaacatgtgaatgaatcgtcttggaactagattatgagcactggttctttttaaagggatgtgcaagaggcagccttggcaagaaaacttgctgcataatcttacatggactaaagatgaaactttaaaccgcaaatcagctttgagtgaactttgacagaagatgtttcgacagttttatctctggacatgtttagcttcagggatcatcctgggctctctctttgaaatctgcttgggccagtatgatgatgattgcaaactagctaggggaggaccaccagctaccatagttgctattgatgaagaaagtcggaatggtacaattctggtggacaacatgctgatcaaagggactgctggaggaccagaccccaccatagaactttctttaaaggataatgtggattactgggtgttgatggatcctgttaagcaaatgcttttcctgaacagcaccggaagagttctggatagagatccaccgatgaacatacactccattgtggtgcaggtccagtgcatcaacaaaaaagtgggcactattatctaccatgaagtgcgaatagtggtgagagacaggaatgacaactcacccactttcaagcatgaaagctactatgccacagtgaatgagctcactccagttggtaccacaatattcacaggattttcaggagacaatggagctacagatatagatgatggaccaaatggacagatagagtatgttattcagtataatccagatgatccgacatccaatgacacctttgaaattcccctaatgttgactggaaatatagtgttaaggaagaggctcaactatgaagataagactcgctactttgtcataatccaagctaatgaccgtgcccaaaatctgaatgagaggcgaaccaccaccaccactctcacagtggatgttctggatggagatgacttgggtccaatgtttcttccttgtgtccttgtgccaaacactcgtgattgccgtccactcacttatcaagctgccatacctgagttgagaactccggaagaactgaaccccattattgttacgccaccaatccaagccattgatcaggaccggaatattcaaccgccatcagataggccaggaatcctctattccatccttgttgggactcctgaggattacccacgatttttccatatgcatcctaggacagcagaacttagtctcctggagccagtaaacagagactttcaccagaaatttgatttggttattaaggctgaacaagacaatggtcatcctcttcctgcctttgccggtctacacattgaaatactggatgaaaacaatcaaagtccatattttacaatgcccagttatcaaggctatatcctggaatctgccccagtgggagcaaccatttcggacagtctcaatttgacttcacctttaagaatagtagctctggacaaggacatagaagatacaaaagacccagagcttcacctttttctgaatgactacacctcagtcttcaccgtcacacagactggtattactcgctacctcaccttacttcaaccagtggacagggaagaacagcaaacttacaccttttcgataacagcatttgatggtgtacaagaaagtgagccagtcatcgtcaatattcaagtgatggatgcaaatgataacacgccaaccttccctgaaatatcctatgatgtgtatgtttatacagacatgagacctggggacagtgtcatacagctcactgcagtcgacgcagacgaagggtcaaatggggagatcacatatgaaatccttgttggggctcagggagacttcatcatcaataaaacaacagggcttatcaccatcgctccaggggtggaaatgatagtcgggcggacttacgcactcacggtccaagcagcggataatgctcctcctgcagagcgaaggaactccatctgcactgtgtatattgaagtgcttccaccaaataatcaaagccctcctcgcttcccacagctgatgtatagccttgaaattagtgaagccatgagggttggtgctgttttattaaatctacaggcaactgatcgagagggagactcaataacatatgccattgagaatggagatcctcagagagtttttaatctttcagaaaccacggggattctaaccttagggaaagcactggacagggaaagcactgatcgctacattctgatcatcacagcttcagatggcaggccagatgggacctcaactgccacagtaaacatagtggtgacagatgtcaatgacaatgctccagtgtttgatccttatctgccaagaaatttatctgtggtggaagaagaagccaatgcctttgtgggtcaagtaaaagcaacagaccctgatgctggaataaatggtcaagtgcactacagtttgggtaactttaataatctttttcgtatcacatccaatgggagcatttacacagcagtgaagcttaacagagaagtcagggactactatgaacttgttgttgtggcaacagatggagcagtacaccctcgtcattcaactctaaccttggccatcaaggttttggacattgatgataacagtcctgtgttcaccaattcaacatacactgtccttgttgaagagaatttgccagctgggactaccatccttcaaatagaggccaaagatgtcgaccttggagcaaatgtgtcttaccggataagaagcccagaagtgaagcacttttttgcactacatccatttacaggagaactatcgcttttaaggagtttagattatgaggcatttccagaccaagaagcaagtatcacttttctggtagaggcctttgatatttatggaacaatgccacctggtattgctactgtcacagtgattgtaaaggatatgaatgattatcctcctgtctttagtaaacgaatatacaaagggatggtggctccggatgcagtcaagggtacacctatcacaacagtttatgctgaagatgcagaccctcctggattacctgcaagtcgtgtgaggtatagagtagatgatgtacagtttccttaccctgccagtatttttgaagtggaagaagattctggaagagtaataacacgagtcaatcttaatgaagaacctacaacaatttttaagttggtggtggttgcttttgatgatggggagcctgtgatgtccagcagtgccacagtgaagattcttgtcttacatcctggtgagatcccacgcttcacacaggaggaatatagacctcctccagtaagtgaacttgccaccaaagggaccatggttggtgtaatttctgctgctgccattaatcaaagtattgtgtactccattgtttcaggaaatgaagaagatacatttggaattaataacatcacaggtgttatctatgtgaatggacctctggattatgagaccaggacaagctatgtacttcgagtccaagctgattccctggaagtggtccttgccaatctccgagttccttcaaaaagcaatacagctaaagtatacattgagattcaggatgaaaataatcatcccccagtgtttcagaaaaaattctacatcggaggtgtatctgaagatgcaagaatgtttacttctgtactcagagtgaaggctactgataaagatactggcaattatagtgtcatggcctacagactcataataccaccaattaaagagggaaaagaaggatttgtagtggaaacatatacagggcttatcaaaactgctatgctcttccataatatgaggagatcctacttcaagtttcaagttattgcaactgacgactatgggaagggactgagcggcaaagccgatgtactcgtctccgtggtcaatcagctggatatgcaagtcattgtttccaatgtgcctcctactctagtggaaaaaaagatagaagatcttacagagatcttggatcgctatgttcaggaacaaattcctggtgccaaggtcgtagtggagtccattggagctcgccggcatggagatgccttttccctagaagattacaccaaatgtgacttgactgtctatgcaattgacccccaaaccaacagagccatcgatagaaatgagctttttaaatttttggatggcaaactacttgatatcaataaagactttcagccgtattatggggaaggaggacgcattctggagatccggactccagaggcagtgaccagcattaaaaagagaggagaaagtctaggatacacagaaggggccttgttggctctggccttcatcatcatcctctgctgcattcctgccatcttggtggttttggtcagctacagacaacgtcaagctgagtgtacaaagactgcacgaattcaggccgcattacccgcggctaaaccagcagtgccggctcctgcaccagtggcagcgcccccgccgccgccgccgcctccgccaggtgcgcatctctatgaagaacttggagacagctcaattcttttccttctctaccattttcaacaaagcaggggaaataactcagtctcagaagacaggaaacatcaacaagttgtgatgcccttttcttccaatactattgaggctcacaagtcagctcatgtagacggatcacttaagagcaacaaactgaagtctgcaagaaaattcacatttctatctgatgaggatgacttaagtgcccataatcccctttataaggaaaacataagtcaagtatcaacaaattcagacatttcacagagaacagattttgtagacccattttcacccaaaatacaagccaagagtaagtctctgaggggcccaagagaaaagattcagaggctgtggagtcagtcagtcagcttacccaggaggctgatgaggaaagttccaaatagaccagagatcatagatctgcagcagtggcaaggcaccaggcagaaagctgaaaatgaaaacactggaatctgtacaaacaaaagaggtagcagcaatccattgcttacaactgaagaggcaaatttgacagagaaagaggaaataaggcaaggtgaaacactgatgatagaaggaacagaacagttgaaatctctctcttcagactcttcattttgctttcccaggcctcacttctcattctccactttgccaactgtttcaagaactgtggaactcaaatcagaacctaatgtcatcagttctcctgctgagtgttccttggaactttctccttcaaggccttgtgttttacattcttcactctctaggagagagacacctatttgtatgttacctattgaaaccgaaagaaatatttttgaaaattttgcccatccaccaaacatctctccttctgcctgtccccttccccctcctcctcctatttctcctccttctcctcctcctgctcctgctcctcttgctcctcctcctgacatttctcctttttctcttttttgtcctcctccctctcctccttctatccctcttcctcttcctcctcctacattttttccactttccgtttcaacgtctggtcccccaacaccacctcttctacctccatttccaactcctcttcctccaccacctccttctattccttgccctccacctccttcagcttcatttctgtccacagagtgtgtctgtataacaggtgttaaatgcacgaccaacttgatgcctgccgagaaaattaagtcctctatgacacagctatcaacaacgacagtgtgtaaaacagaccctcagagagaaccaaaaggcatcctcagacacgttaaaaacttagcagaacttgaaaaatcagtagctaacatgtacagtcaaatagaaaaaaactatctacgcacaaatgtttcagaacttcaaactatgtgcccttcagaagtaacaaatatggaaatcacatctgaacaaaacaaggggagtttgaacaatattgtcgagggaactgaaaaacaatctcacagtcaatctacttcactgtaatgttgcttttcttattttagtcgggcaaacctcttgttgatcatagtcttcaagttgaacatcaaatttgaacgtcaaagaagactctattattttaccccaaattcaatgaaatgcagttttttttctcgtttttaatttaaaaagatattaacctcatcactactaactcactcatataatagatttaccttactttttaaaaactacaaagtagcataatttgttctacatttatttgaaaagtaagtaattttaatctcttttttagtgggaatatgtgggcatgaaaattagatacccaacttaaaccaaaggcatgtctatcatgtggatgcagtaacatttacatttagtttttgatcgtagttttatatgaatgttccaagaaaaaagcagactgttacaaataagttaaaactgatatgattgataggttctgttttttcttgaagcctatgtatttggtaagaagaaatactaccgaagtaaaatataatgtacctagattgtaggagatgacagacataaggtatttcaaaataaatctcaggtgctataacatgtagtcatctgttttct

SEQ ID NO: 54581 - DNA, 5859 bp, Artificial Sequence
  derived and/or modified sequence
atgttcagacagttctacctgtggacctgcctggccagcggcatcatcctgggcagcctgttcgagatctgcctgggccagtacgacgacgactgcaagctggccagaggcggcccccccgccaccatcgtggccatcgacgaggagagcagaaacggcaccatcctggtggacaacatgctgatcaagggcaccgccggcggccccgaccccaccatcgagctgagcctgaaggacaacgtggactactgggtgctgatggaccccgtgaagcagatgctgttcctgaacagcaccggcagagtgctggacagagacccccccatgaacatccacagcatcgtggtgcaggtgcagtgcatcaacaagaaggtgggcaccatcatctaccacgaggtgagaatcgtggtgagagacagaaacgacaacagccccaccttcaagcacgagagctactacgccaccgtgaacgagctgacccccgtgggcaccaccatcttcaccggcttcagcggcgacaacggcgccaccgacatcgacgacggccccaacggccagatcgagtacgtgatccagtacaaccccgacgaccccaccagcaacgacaccttcgagatccccctgatgctgaccggcaacatcgtgctgagaaagagactgaactacgaggacaagaccagatacttcgtgatcatccaggccaacgacagagcccagaacctgaacgagagaagaaccaccaccaccaccctgaccgtggacgtgctggacggcgacgacctgggccccatgttcctgccctgcgtgctggtgcccaacaccagagactgcagacccctgacctaccaggccgccatccccgagctgagaacccccgaggagctgaaccccatcatcgtgaccccccccatccaggccatcgaccaggacagaaacatccagccccccagcgacagacccggcatcctgtacagcatcctggtgggcacccccgaggactaccccagattcttccacatgcaccccagaaccgccgagctgagcctgctggagcccgtgaacagagacttccaccagaagttcgacctggtgatcaaggccgagcaggacaacggccaccccctgcccgccttcgccggcctgcacatcgagatcctggacgagaacaaccagagcccctacttcaccatgcccagctaccagggctacatcctggagagcgcccccgtgggcgccaccatcagcgacagcctgaacctgaccagccccctgagaatcgtggccctggacaaggacatcgaggacaccaaggaccccgagctgcacctgttcctgaacgactacaccagcgtgttcaccgtgacccagaccggcatcaccagatacctgaccctgctgcagcccgtggacagagaggagcagcagacctacaccttcagcatcaccgccttcgacggcgtgcaggagagcgagcccgtgatcgtgaacatccaggtgatggacgccaacgacaacacccccaccttccccgagatcagctacgacgtgtacgtgtacaccgacatgagacccggcgacagcgtgatccagctgaccgccgtggacgccgacgagggcagcaacggcgagatcacctacgagatcctggtgggcgcccagggcgacttcatcatcaacaagaccaccggcctgatcaccatcgcccccggcgtggagatgatcgtgggcagaacctacgccctgaccgtgcaggccgccgacaacgccccccccgccgagagaagaaacagcatctgcaccgtgtacatcgaggtgctgccccccaacaaccagagcccccccagattcccccagctgatgtacagcctggagatcagcgaggccatgagagtgggcgccgtgctgctgaacctgcaggccaccgacagagagggcgacagcatcacctacgccatcgagaacggcgacccccagagagtgttcaacctgagcgagaccaccggcatcctgaccctgggcaaggccctggacagagagagcaccgacagatacatcctgatcatcaccgccagcgacggcagacccgacggcaccagcaccgccaccgtgaacatcgtggtgaccgacgtgaacgacaacgcccccgtgttcgacccctacctgcccagaaacctgagcgtggtggaggaggaggccaacgccttcgtgggccaggtgaaggccaccgaccccgacgccggcatcaacggccaggtgcactacagcctgggcaacttcaacaacctgttcagaatcaccagcaacggcagcatctacaccgccgtgaagctgaacagagaggtgagagactactacgagctggtggtggtggccaccgacggcgccgtgcaccccagacacagcaccctgaccctggccatcaaggtgctggacatcgacgacaacagccccgtgttcaccaacagcacctacaccgtgctggtggaggagaacctgcccgccggcaccaccatcctgcagatcgaggccaaggacgtggacctgggcgccaacgtgagctacagaatcagaagccccgaggtgaagcacttcttcgccctgcaccccttcaccggcgagctgagcctgctgagaagcctggactacgaggccttccccgaccaggaggccagcatcaccttcctggtggaggccttcgacatctacggcaccatgccccccggcatcgccaccgtgaccgtgatcgtgaaggacatgaacgactacccccccgtgttcagcaagagaatctacaagggcatggtggcccccgacgccgtgaagggcacccccatcaccaccgtgtacgccgaggacgccgacccccccggcctgcccgccagcagagtgagatacagagtggacgacgtgcagttcccctaccccgccagcatcttcgaggtggaggaggacagcggcagagtgatcaccagagtgaacctgaacgaggagcccaccaccatcttcaagctggtggtggtggccttcgacgacggcgagcccgtgatgagcagcagcgccaccgtgaagatcctggtgctgcaccccggcgagatccccagattcacccaggaggagtacagacccccccccgtgagcgagctggccaccaagggcaccatggtgggcgtgatcagcgccgccgccatcaaccagagcatcgtgtacagcatcgtgagcggcaacgaggaggacaccttcggcatcaacaacatcaccggcgtgatctacgtgaacggccccctggactacgagaccagaaccagctacgtgctgagagtgcaggccgacagcctggaggtggtgctggccaacctgagagtgcccagcaagagcaacaccgccaaggtgtacatcgagatccaggacgagaacaaccacccccccgtgttccagaagaagttctacatcggcggcgtgagcgaggacgccagaatgttcaccagcgtgctgagagtgaaggccaccgacaaggacaccggcaactacagcgtgatggcctacagactgatcatcccccccatcaaggagggcaaggagggcttcgtggtggagacctacaccggcctgatcaagaccgccatgctgttccacaacatgagaagaagctacttcaagttccaggtgatcgccaccgacgactacggcaagggcctgagcggcaaggccgacgtgctggtgagcgtggtgaaccagctggacatgcaggtgatcgtgagcaacgtgccccccaccctggtggagaagaagatcgaggacctgaccgagatcctggacagatacgtgcaggagcagatccccggcgccaaggtggtggtggagagcatcggcgccagaagacacggcgacgccttcagcctggaggactacaccaagtgcgacctgaccgtgtacgccatcgacccccagaccaacagagccatcgacagaaacgagctgttcaagttcctggacggcaagctgctggacatcaacaaggacttccagccctactacggcgagggcggcagaatcctggagatcagaacccccgaggccgtgaccagcatcaagaagagaggcgagagcctgggctacaccgagggcgccctgctggccctggccttcatcatcatcctgtgctgcatccccgccatcctggtggtgctggtgagctacagacagagacaggccgagtgcaccaagaccgccagaatccaggccgccctgcccgccgccaagcccgccgtgcccgcccccgcccccgtggccgcccccccccccccccccccccccccccccggcgcccacctgtacgaggagctgggcgacagcagcatcctgttcctgctgtaccacttccagcagagcagaggcaacaacagcgtgagcgaggacagaaagcaccagcaggtggtgatgcccttcagcagcaacaccatcgaggcccacaagagcgcccacgtggacggcagcctgaagagcaacaagctgaagagcgccagaaagttcaccttcctgagcgacgaggacgacctgagcgcccacaaccccctgtacaaggagaacatcagccaggtgagcaccaacagcgacatcagccagagaaccgacttcgtggaccccttcagccccaagatccaggccaagagcaagagcctgagaggccccagagagaagatccagagactgtggagccagagcgtgagcctgcccagaagactgatgagaaaggtgcccaacagacccgagatcatcgacctgcagcagtggcagggcaccagacagaaggccgagaacgagaacaccggcatctgcaccaacaagagaggcagcagcaaccccctgctgaccaccgaggaggccaacctgaccgagaaggaggagatcagacagggcgagaccctgatgatcgagggcaccgagcagctgaagagcctgagcagcgacagcagcttctgcttccccagaccccacttcagcttcagcaccctgcccaccgtgagcagaaccgtggagctgaagagcgagcccaacgtgatcagcagccccgccgagtgcagcctggagctgagccccagcagaccctgcgtgctgcacagcagcctgagcagaagagagacccccatctgcatgctgcccatcgagaccgagagaaacatcttcgagaacttcgcccacccccccaacatcagccccagcgcctgccccctgcccccccccccccccatcagcccccccagccccccccccgcccccgcccccctggcccccccccccgacatcagccccttcagcctgttctgccccccccccagcccccccagcatccccctgcccctgcccccccccaccttcttccccctgagcgtgagcaccagcggcccccccaccccccccctgctgccccccttccccacccccctgcccccccccccccccagcatcccctgcccccccccccccagcgccagcttcctgagcaccgagtgcgtgtgcatcaccggcgtgaagtgcaccaccaacctgatgcccgccgagaagatcaagagcagcatgacccagctgagcaccaccaccgtgtgcaagaccgacccccagagagagcccaagggcatcctgagacacgtgaagaacctggccgagctggagaagagcgtggccaacatgtacagccagatcgagaagaactacctgagaaccaacgtgagcgagctgcagaccatgtgccccagcgaggtgaccaacatggagatcaccagcgagcagaacaagggcagcctgaacaacatcgtggagggcaccgagaagcagagccacagccagagcaccagcctgtag

SEQ ID NO: 54582 - protein, 1915 aa, Artificial Sequence
  derived and/or modified sequence
MFRQFYLWTCLASGIILGSLFEICLGQYDDDCKLARGGPPATIVAIDEESRNGTILVDNMLIKGTAGGPDPTIELSLKDNVDYWVLMDPVKQMLFLNSTGRVLDRDPPMNIHSIVVQVQCINKKVGTIIYHEVRIVVRDRNDNSPTFKHESYYATVNELTPVGTTIFTGFSGDNGATDIDDGPNGQIEYVIQYNPDDPDRAQNLNERRTTTTTLTVDVLDGDDLGPMFLPCVLVPNTRDCRPLTYQAAIPELRTPEELNPIIVTPPIQAIDQDRNIQPPSDRPGILYSILVGTPEDYPRFFHMHPRTAELSLLEPVNRDFHQKFDLVIKAEQDNGHPLPAFAGLHIEILDENNQSPYFTMPSYQGYILESAPVGATISDSLNLTSPLRIVALDKDIEDTKDPELHLFLNDYTSVFTVTQTGITRYLTLLQPVDREEQQTYTFSITAFDGVQESEPVIVNIQVMDANDNTPTFPEISYDVYVYTDMRPGDSVIQLTAVDADEGSNGEITYEILVGAQGDFIINKTTGLITIAPGVEMIVGRTYALTVQAADNAPPAERRNSICTVYIEVLPPNNQSPPRFPQLMYSLEISEAMRVGAVLLNLQATDREGDSITYAIENGDPQRVFNLSETTGILTLGKALDRESTDRYILIITASDGRPDGTSTATVNIVVTDVNDNAPVFDPYLPRNLSVVEEEANAFVGQVKATDPDAGINGQVHYSLGNFNNLFRITSNGSIYTAVKLNREVRDYYELVVVATDGAVHPRHSTLTLAIKVLDIDDNSPVFTNSTYTVLVEENLPAGTTILQIEAKDVDLGANVSYRIRSPEVKHFFALHPFTGELSLLRSLDYEAFPDQEASITFLVEAFDIYGTMPPGIATVTVIVKDMNDYPPVFSKRIYKGMVAPDAVKGTPITTVYAEDADPPGLPASRVRYRVDDVQFPYPASIFEVEEDSGRVITRVNLNEEPTTIFKLVVVAFDDGEPVMSSSATVKILVLHPGEIPRFTQEEYRPPPVSELATKGTMVGVISAAAINQSIVYSIVSGNEEDTFGINNITGVIYVNGPLDYETRTSYVLRVQADSLEVVLANLRVPSKSNTAKVYIEIQDENNHPPVFQKKFYIGGVSEDARMFTSVLRVKATDKDTGNYSVMAYRLIIPPIKEGKEGFVVETYTGLIKTAMLFHNMRRSYFKFQVIATDDYGKGLSGKADVLVSVVNQLDMQVIVSNVPPTLVEKKIEDLTEILDRYVQEQIPGAKVVVESIGARRHGDAFSLEDYTKCDLTVYAIDPQTNRAIDRNELFKFLDGKLLDINKDFQPYYGEGGRILEIRTPEAVTSIKKRGESLGYTEGALLALAFIIILCCIPAILVVLVSYRQRQAECTKTARIQAALPAAKPAVPAPAPVAAPPPPPPPPPGAHLYEELGDSSILFLLYHFQQSRGNNSVSEDRKHQQVVMPFSSNTIEAHKSAHVDGSLKSNKLKSARKFTFLSDEDDLSAHNPLYKENISQVSTNSDISQRTDFVDPFSPKIQAKSKSLRGPREKIQRLWSQSVSLPRRLMRKVPNRPEIIDLQQWQGTRQKAENENTGICTNKRGSSNPLLTTEEANLTEKEEIRQGETLMIEGTEQLKSLSSDSSFCFPRPHFSFSTLPTVSRTVELKSEPNVISSPAECSLELSPSRPCVLHSSLSRRETPICMLPIETERNIFENFAHPPNISPSACPLPPPPPISPPSPPPAPAPLAPPPDISPFSLFCPPPSPPSIPLPLPPPTFFPLSVSTSGPPTPPLLPPFPTPLPPPPPSIPCPPPPSASFLSTECVCITGVKCTTNLMPAEKIKSSMTQLSTTTVCKTDPQREPKGILRHVKNLAELEKSVANMYSQIEKNYLRTNVSELQTMCPSEVTNMEITSEQNKGSLNNIVEGTEKQSHSQSTSL

SEQ ID NO: 54583 - DNA, 5748 bp, Artificial Sequence
  derived and/or modified sequence
atgttcagacagttttatctgtggacttgcctggccagcgggatcattcttggttccctgtttgagatatgtctagggcagtacgatgatgactgcaaactagctcgcggtggccctcccgccacgattgtcgctatcgatgaagagtcaagaaatggtaccatattggtggataatatgttaatcaaaggcactgcaggcggacctgatcctactatcgagctctcgttgaaagataatgtggattattgggtgctcatggaccccgtcaaacaaatgctgtttctaaacagcacaggaagggttctggatagagaccctcccatgaacatccatagtatcgttgttcaagtacagtgcatcaacaagaaggtgggaacaattatataccacgaagttagaatcgtagttcgcgaccgcaacgacaattccccgaccttcaagcacgagagttactatgccactgtgaatgaactaacacctgtggggacaacaatcttcacaggcttttccggcgacaacggagccactgacatcgatgatgggcccaatggacagattgagtatgttattcagtataatcccgacgatccagacagggcacaaaacctcaatgagcgacgcactaccaccacaactctgacggtggatgtgctcgacggggatgacttaggcccaatgttcctgccttgtgtgctggtccccaacactagggactgtcggccgttaacctaccaggcagcgatcccggagctgagaactcccgaagaacttaaccccatcattgtcacgcccccaatacaagcaattgaccaggatagaaacattcaacctcctagcgaccgcccagggattctgtactctattctggtgggtaccccagaggattacccgcggttttttcacatgcatccacggaccgctgagctgagcctcctagagccagtaaaccgcgatttccaccaaaagttcgatctcgtcatcaaagcagagcaggataacggccaccccttaccagctttcgcaggactgcacatcgaaattctagatgagaacaaccagtcaccatacttcaccatgccctcgtatcagggatacatcctcgagagcgcgcctgtgggcgcaacaatctctgattctctgaatcttacatccccactgagaattgttgccctggacaaagatattgaggatactaaagaccctgagctgcacctgttcttaaatgactatacatcagtcttcaccgtgacccagactgggattacaaggtatctgactttgttgcagcccgtcgatcgcgaggaacagcagacctataccttctccatcacagcattcgacggcgtccaggaaagcgagcctgtgattgtcaacattcaggtcatggacgctaatgataacacccccactttccctgagataagctacgacgtttatgtctacacagatatgcggcctggcgactcagtgattcagttgaccgccgtggacgcagatgaggggagcaacggggagatcacgtatgaaatactggtgggagcccagggagacttcataatcaacaaaacgacaggccttattactatcgctcctggcgttgaaatgatcgtcggaaggacctatgcactcacggtgcaagctgcagataatgcccccccagctgagagaagaaactcaatatgcaccgtgtacatcgaggtattgcctccaaataatcagtctcccccacgattccctcagctgatgtattccttagaaatttccgaggcaatgagggtcggggcagtcctcctgaacctgcaggcaacagatagagaaggagacagcattacctatgcgatagagaatggcgaccctcaaagagtcttcaatctaagcgaaactactggcatccttaccttgggcaaagccctggacagagagagcacagataggtatatactgatcatcacagcatccgatggtcgccccgatgggactagcacagccacggttaatatcgttgttacagatgtgaatgataacgcccctgtgtttgacccctacctgccgcggaatctcagcgttgtggaagaggaggcaaacgctttcgtcggtcaggtgaaagcgacagacccagatgccggaatcaacggacaggtgcattacagtctcggcaattttaataatctgtttcggatcacctccaatggcagcatctacactgccgttaaactgaatagagaagttagagactactatgaacttgtagtggtcgccactgacggcgccgtgcatcctaggcactcaaccctgacattagcgattaaagtacttgatatcgatgataattctccagtcttcactaacagcacctacactgtgctggtggaggaaaatcttcctgccggaactaccattctgcagattgaagccaaagacgttgacctgggcgctaatgtttcgtaccgcatccggtcaccagaggttaagcacttcttcgctctgcatccgttcacaggtgagttaagcctcctgagaagcctggattacgaggcttttcccgaccaggaggctagcatcactttccttgttgaagcttttgacatatacggaacaatgccaccaggcatagctaccgtgacagtaattgtcaaagatatgaacgactacccgcccgtatttagcaaaaggatttacaagggtatggtggctccagatgctgtgaagggaactcccatcaccaccgtttatgcagaggacgccgacccgccaggacttcctgccagcagagtaaggtacagagtggatgacgtccagtttccttaccccgcgtccatcttcgaggtggaagaggattccgggcgtgtgattactcgcgtgaatctaaatgaagaacctaccaccattttcaagctcgtggtggtagcatttgacgatggcgagcccgttatgtccagctccgctacagtcaaaatcctcgtgctgcatccaggggaaattcctcgtttcacacaggaggagtacaggccccctccagtgtccgagctggccacgaaaggcaccatggtcggcgttatctctgctgctgccatcaatcaatccattgtgtacagtatcgtgagcggaaatgaggaagacacctttggcataaataatattactggggtgatttatgtgaatggacccctggattatgagaccaggacttcctacgtgctccgcgtacaagccgattcgctcgaggtagtgctcgccaatctgagagtaccctctaagtctaatactgctaaagtctacattgaaatccaagacgagaataatcatcctccagtgtttcagaaaaagttttacattgggggcgtgtctgaggacgcaaggatgtttacttctgtgctgcgggtgaaagccactgacaaggatacaggcaattacagtgtcatggcataccgtctgattatacctcctatcaaggagggcaaagagggctttgtagtggaaacctacaccggcttaatcaagacagccatgcttttccacaatatgcgaaggtcgtattttaaatttcaggtcatcgctaccgacgattatggaaaggggttgagcgggaaagccgatgtgctcgtgtctgttgtgaaccaactcgatatgcaagttatagtgtcaaatgtcccccccacccttgttgagaaaaagatcgaagatctgacagagatcctggaccgatatgtgcaagaacagatccccggagccaaagtcgtggttgagtccatcggtgctagaagacacggcgacgccttctctctggaagattatacaaaatgcgatcttaccgtgtatgctatcgatcctcagaccaatcgggctatcgaccggaatgaactttttaaattcttggacggtaaattgctcgatatcaacaaagactttcaaccctactacggtgaaggtggacgcatattggagatccggaccccggaagccgtgacaagtatcaaaaaacggggggaaagcctcggatacactgagggagccctgctcgcactggctttcatcatcatcctttgttgcattcccgctatcctcgtggtgctggtgtcttatcgacagcggcaggctgagtgcactaagactgcaagaattcaggcagccctgcctgctgcgaagccagccgttcctgcccccgcacctgtggctgccccgccccctccacctccgcctcccccaggtgcacatttgtacgaagagctgggcgactctagcatcctcttcctcctataccactttcaacagagtaggggtaacaattctgtttcagaggaccgcaagcaccagcaggttgttatgcctttttcatccaatactatagaggctcacaaatccgcacatgtggatggatccctgaagtctaacaagctcaagagtgctcggaaatttacattcctgtccgatgaagacgacctcagcgcccacaaccccctgtataaggagaatatcagccaggtttcgaccaacagcgatatcagtcagcggacagatttcgtcgaccctttttcccccaagatccaagcgaaaagcaagtctcttcggggcccaagagaaaagatccagcggctgtggtctcagtcggtcagtctgcccagacgcctgatgcgaaaagttccaaaccggcccgagattattgacctccagcagtggcaaggtacacgacagaaggcggagaacgagaacacagggatttgtactaataagcggggctctagcaacccactgttaactactgaggaagccaacttgaccgaaaaggaagagattcggcaaggtgagacactgatgattgaaggaaccgaacagttaaagtcactgagcagcgattcgtccttctgtttcccccggccacacttttctttcagcacacttccaactgtgtcccggacagtggagctcaagtcagagcccaatgtgatctcatcaccggccgagtgctcactcgaactgtctcctagtcggccctgcgtgctgcactcctcactcagccgcagggagacacccatctgcatgctgcccatcgaaaccgaacgaaatatctttgaaaatttcgctcacccccctaacatttctccatcagcatgcccgctgccgccaccaccccctatctccccaccaagtccgcccccagcacctgcaccgttggctcctccaccagacatctcaccatttagcttgttttgcccaccacccagtcctccctccattcctctcccgctgcctcctcccacattctttcccctctcagtgagcacaagcggaccacccaccccacccctactcccaccttttcctacaccactcccccccccacccccaagcattccctgcccaccgccgccaagcgcttctttcctgagcaccgagtgtgtttgcattaccggggttaagtgcaccacgaatctgatgcccgccgagaaaataaagagtagcatgacccagctttccacgacaaccgtgtgcaagactgaccctcagagggagcccaaggggattttacgccatgtaaaaaacctggcagagttggagaagtccgttgctaatatgtacagccaaatcgagaagaattacctacgcaccaatgtcagcgagcttcagacaatgtgtccatccgaggtaacaaatatggagatcactagcgaacagaataaagggtctctgaacaacattgtagaaggaaccgagaaacagagtcatagccagagtactagcctgtag

SEQ ID NO: 54584 - DNA, 5748 bp, Artificial Sequence
  derived and/or modified sequence
atgttccggcagttctacctgtggacctgcctggccagcggcatcatcctgggcagcctgtttgagatctgcctgggccagtatgatgatgactgcaagctggcccggggcggccccccagccaccatcgtggccattgatgaggagagcagaaatggcaccatcctggtggacaacatgctgatcaagggcacagctgggggccctgaccccaccatcgagctgagcctgaaggacaacgtggactactgggtgctgatggaccctgtgaagcagatgctgttcctgaacagcacaggccgggtgctggaccgggacccccccatgaacatccacagcatcgtggtgcaggtgcagtgcatcaacaagaaggtgggcaccatcatctaccacgaggtgagaattgtggtgcgggacagaaatgacaacagccccaccttcaagcatgagagctactatgccaccgtgaatgagctgacccctgtgggcaccaccatcttcaccggcttcagcggggacaacggggccacagacattgatgatggccccaacggccagattgaatatgtgatccagtacaacccagatgatcctgaccgggcccagaacctgaatgaaagaaggaccaccaccaccaccctgactgtggatgtgctggatggagatgacctgggccccatgttcctgccctgtgtgctggtgcccaacacccgggactgccggcccctgacctaccaggccgccatccctgagctgcggaccccagaggagctgaaccccatcatcgtgaccccacccatccaggccatcgaccaggacaggaacatccagccccccagcgacaggcctggcatcctgtacagcatcctggtgggcaccccagaggactacccccgcttcttccacatgcaccccaggacagctgagctgagcctgctggagcctgtgaacagagacttccaccagaagtttgacctggtgatcaaggccgagcaggacaatggccaccccctgcctgcctttgctggcctgcacatcgagatcctggatgagaacaaccagagcccctacttcaccatgcccagctaccagggctacatcctggagagcgcccctgtgggcgccaccatcagtgacagcctgaacctgaccagccccctgagaattgtggccctggacaaggacatcgaggacaccaaggaccctgagctgcacctgttcctgaatgactacacctctgtgttcaccgtgacccagacaggcatcacccgctacctgaccctgctgcagcctgtggaccgggaggagcagcagacctacaccttcagcatcacagcctttgatggagtgcaggagagcgagcctgtgattgtgaacatccaggtgatggatgccaatgacaacacccccaccttccctgagatctcctatgatgtgtatgtgtacacagacatgaggcctggggacagcgtcatccagctgacagctgtggatgctgatgagggcagcaatggagagatcacctatgagatcctggtgggcgcccagggcgacttcatcatcaacaagaccaccggcctcatcaccatcgcccctggggtggagatgattgtgggccgcacctacgccctgactgtgcaggccgctgacaatgcccctcctgctgagaggaggaacagcatctgcaccgtgtacatcgaggtgctgccccccaacaaccagagccccccacgcttcccccagctgatgtacagcctggagatcagcgaggccatgagggtgggcgctgtgctgctgaacctgcaggccacagaccgggagggggacagcatcacctacgccattgaaaatggagacccccagagggtcttcaacctgtctgagaccaccggcatcctgaccctgggcaaggccctggaccgggagagcacagaccgctacatcctgatcatcacagccagtgatggccgcccagatggcaccagcacagccaccgtgaacatcgtggtgacagatgtgaatgacaatgcccctgtgtttgacccctacctgcccaggaacctgtctgtggtggaggaggaggccaatgcctttgtgggccaggtgaaggccacagatcctgatgctggcatcaatggccaggtgcactacagcctgggcaacttcaacaacctcttccgcatcaccagcaatggcagcatctacacagctgtgaagctgaaccgggaggtgcgggactactatgagctggtggtggtggccacagatggagctgtgcaccccaggcacagcaccctgaccctggccatcaaggtgctggacattgatgacaacagccctgtgttcaccaacagcacctacacagtgctggtggaggagaacctgcctgctggcaccaccatcctgcagatcgaggccaaggatgtggacctgggcgccaacgtgtcctaccgcatccgcagccctgaggtgaagcacttctttgccctgcaccccttcaccggggagctgagcctgctgcggagcctggactatgaggccttcccagaccaggaggccagcatcaccttcctggtggaggcctttgacatctacggcaccatgcctcctggcatcgccaccgtgaccgtcatcgtgaaggacatgaatgactacccacctgtgttcagcaagaggatctacaagggcatggtggccccagatgctgtgaagggcacccccatcaccaccgtgtatgcagaagatgctgaccccccaggcctgcctgccagccgggtgcgctacagagtggatgatgtgcagttcccctacccagccagcatctttgaggtggaggaggacagcggccgggtcatcaccagggtgaacctgaatgaggagcccaccaccatcttcaagctggtggtggtggcctttgatgatggagagcctgtgatgagcagcagcgccaccgtgaagatcctggtgctgcaccctggagagatcccccgcttcacccaggaggagtacagacctcctcctgtgtctgagctggccaccaagggcaccatggtgggcgtcatctctgctgctgccatcaaccagagcatcgtgtacagcatcgtgtctggaaatgaggaggacaccttcggcatcaacaacatcactggagtcatctacgtgaatggccccctggactatgagaccaggaccagctatgtgctgcgggtgcaggccgacagcctggaggtggtgctggccaacctgcgggtgcccagcaagagcaacacagccaaggtgtacatcgagatccaggatgagaacaaccacccccctgtgttccagaagaagttctacatcggcggcgtgtctgaagatgccaggatgttcacctctgtgctgcgggtgaaggccacagacaaggacaccggcaactacagcgtgatggcctaccgcctcatcatcccccccatcaaggagggcaaggagggctttgtggtggagacctacacaggcctcatcaagacagccatgctgttccacaacatgagaagaagctacttcaagttccaggtgattgccacagatgattatggcaagggcctgagcggcaaggcagatgtgctggtgtctgtggtgaaccagctggacatgcaggtgattgtgtccaatgtgccccccaccctggtggagaagaagattgaggacctgacagagatcctggacagatatgtgcaggagcagatccctggggccaaggtggtggtggagagcatcggggccaggagacatggagatgccttcagcctggaggactacaccaagtgtgacctgactgtgtatgccatcgacccccagaccaacagagccatcgacagaaatgaactcttcaagttcctggatggcaagctgctggacatcaacaaggacttccagccctactacggggagggcggccgcatcctggagatccgcaccccagaggccgtgaccagcatcaagaagagaggagagagcctgggctacacagagggcgccctgctggccctggccttcatcatcatcctgtgctgcatcccagccatcctggtggtgctggtgtcctaccggcagaggcaggccgagtgcaccaagacagcccgcatccaggccgccctgcctgctgccaagccagctgtgcctgccccagcccctgtggccgcccctcctcctcctcctcctcctcctcctggggcccacctgtatgaggagctgggggacagcagcatcctcttcctgctgtaccacttccagcagagccggggcaacaacagcgtgtctgaggacaggaagcaccagcaggtggtgatgcccttcagcagcaacaccatcgaggcccacaagagcgcccacgtggatggcagcctgaagagcaacaagctgaagagcgccaggaagttcaccttcctgagtgatgaagatgacctgagcgcccacaaccccctgtacaaggagaacatcagccaggtgtccaccaacagcgacatcagccagaggacagactttgtggaccccttcagccccaagatccaggccaagagcaagagcctgcggggcccccgggagaagatccagaggctgtggagccagagcgtgtccctgccccggcggctgatgaggaaggtgcccaacagacctgagatcatcgacctgcagcagtggcagggcacccggcagaaggccgagaatgaaaatacaggcatctgcaccaacaagaggggcagcagcaaccccctgctgaccacagaggaggccaacctgacagagaaggaggagatccggcagggcgagaccctgatgattgagggcacagagcagctgaagagcctgagcagtgacagcagcttctgcttcccccggccccacttctccttcagcaccctgcccaccgtgtccaggacagtggagctgaagtctgagcccaacgtcatcagcagccctgcagaatgttccctggagctgagccccagccggccctgtgtgctgcacagcagcctgagccggcgggagacccccatctgcatgctgcccatcgagacagagaggaacatctttgagaactttgcccacccccccaacatcagccccagcgcctgccccctgcccccacctccacccatcagcccccccagccccccaccagccccagcccccctggcccctcctccagacatcagccccttcagcctcttctgccccccacccagccccccatccatccccctgcccctgcccccacccaccttcttccccctgtctgtgtccaccagcggcccccccaccccacccctgctgccccccttccccacccccctgcccccacctccacccagcatcccctgccccccaccacccagcgccagcttcctgagcacagaatgtgtgtgcatcaccggggtgaagtgcaccaccaacctgatgcctgctgagaagatcaagagctccatgacccagctgagcaccaccaccgtgtgcaagacagacccccagcgggagcccaagggcatcctgcggcacgtgaagaacctggccgagctggagaagtctgtggccaacatgtacagccagatcgagaagaactacctgcggaccaacgtgtctgagctgcagaccatgtgccccagcgaggtgaccaacatggagatcaccagcgagcagaacaagggcagcctgaacaacatcgtggagggcacagagaagcagagccacagccagagcaccagcctgtag

SEQ ID NO: 54585 - DNA, 5748 bp, Artificial Sequence
  derived and/or modified sequence
atgttccggcagttctacctgtggacctgcctggccagcggcatcatccttggcagcctatttgagatctgcctcggccagtacgatgacgactgcaaactcgcccgtggaggcccacccgcaactatcgtggccattgatgaggagtcacgcaacgggacaatcttagtcgataatatgctgataaaagggactgcaggcggaccagatcccacaattgagttatctctgaaggataatgtcgattattgggtcctgatggacccagtcaaacagatgctctttctgaatagtactggaagggtattggaccgggaccctcctatgaatatccatagtatcgtggttcaggtccagtgcataaataagaaagtaggaactatcatataccatgaggtccggatcgtggtacgagatagaaatgacaacagccccacgtttaaacacgagtcttactacgccactgtcaatgagctcactcccgtgggaaccactatcttcacaggcttctccggcgataacggcgcgacggatatcgacgacggcccaaacggccagatcgagtatgtcatccaatacaatcctgacgacccagatagagcccagaatctgaacgagcgcagaaccaccaccacaactctgaccgtagacgtgctggacggggacgaccttggcccgatgttcttaccctgtgtgctggtgcccaacacccgggattgtaggcccttaacgtatcaggccgccattcctgaattgcgaacacctgaggaactgaacccgatcattgtcacgcctcccattcaggctatcgatcaagatcgtaacatccagcccccaagtgacagacccggtatcctgtatagcatcttggtaggcacacctgaagattatcctagatttttccatatgcatccgcgaaccgccgagctgtccctgctggagcctgttaatagagattttcaccagaagttcgacctagtgataaaagccgagcaggacaacggccatccactgcccgcgtttgccggtctgcatatcgaaattctggacgagaataaccagagtccttacttcacaatgccttcttaccagggatatatactggagagtgcccccgtaggcgcaacaatttctgactctctgaacctgacaagccccctcagaatcgtggccctcgataaagatattgaagacacaaaagatcccgagctacatctcttcttgaacgattataccagtgtgtttaccgtgacacagacgggcattacacggtacctgactctcttgcagccggtggatagggaagagcaacagacgtatacattctccatcacagcctttgatggtgttcaggaatcggagccagtgattgtcaatatacaggtgatggatgccaatgacaacactcccacatttcccgagatctcttacgatgtgtatgtgtacacagatatgcgaccaggggacagcgttatccaattgacagctgtggatgctgacgaggggtccaacggtgagattacgtacgagatcttggttggagcgcagggagattttattatcaataagactacagggttgatcaccatcgcccctggggttgagatgatcgtgggcagaacttacgccttgacggtccaggccgccgataatgccccgccggccgagaggaggaatagcatttgtacagtctacatcgaggtactgcctcccaataaccaaagtccaccgcgattcccacagctgatgtacagcctagagattagtgaggcgatgcgagtgggagcagtgcttttaaatcttcaggcaacagatcgcgagggagacagtatcacctacgcaatcgaaaatggagacccccagcgcgtttttaacctttctgagactactgggatcttaacacttggtaaggcgctagaccgtgagtctacagacaggtatatcttgataatcacagcctcagatggaaggcccgacggaacaagtacggcaactgtgaatatagtggtcaccgatgtcaacgataacgctcccgtttttgacccgtacctcccaaggaacctatcggtcgtcgaggaagaagcaaatgctttcgtgggccaggtgaaggctacagatccagatgcgggcatcaatggccaggttcattatagccttggaaatttcaataatttgtttaggatcacttccaacggatccatctacaccgcagttaagctcaacagagaggtgagagattattacgagctcgtagtggtcgctactgatggtgcagtgcaccctcgccacagcactcttaccctggcaataaaggtcctcgatatcgatgataattctcctgtgttcacaaacagcacctataccgttcttgttgaagaaaatctgcctgctggaactactatcttgcagatcgaggctaaggacgtggacttaggggccaacgtgagttataggatacgctcccctgaggtgaagcattttttcgcactgcacccatttacaggtgagctgagccttctgcgatctcttgactatgaagcttttcctgaccaagaggcatccataacctttctggtggaagccttcgatatctatggcaccatgccgcccggaatagccacggtgactgtgatcgtgaaggacatgaatgattatcctcctgtgttttccaaacgcatctacaagggcatggtcgcacctgacgcagttaagggcacaccaataacaaccgtctacgccgaggatgccgacccccctggcctgccggcctcacgcgtgaggtaccgcgtggatgatgtccagtttccatatccagccagtatctttgaggtcgaggaggattcaggacgtgtcatcaccagagtgaacctcaacgaagaacccacaacgatcttcaagctcgtggtagttgcgttcgatgatggggagccagtgatgagctcaagcgccactgtcaagatccttgtcctccaccctggggagattcctaggttcactcaggaagaataccgtccacccccagtttcggaactggccaccaaggggactatggtgggcgtcatctctgccgccgcaattaaccagtccattgtttactcaatcgtgagcgggaatgaagaggatacatttggaatcaacaacatcactggcgtgatctacgtgaacggacccctcgactacgagaccagaaccagttacgtgctccgcgtacaggctgacagcctggaggttgtcttggccaacctgagggttcctagcaaatctaatactgccaaagtctacattgagatacaggacgaaaataaccatccacctgtctttcaaaaaaaattctatataggcggcgtgtccgaggacgccagaatgttcacaagtgttctcagagtaaaagcgactgataaagatactggcaactacagtgttatggcgtaccgactcatcattccaccaatcaaagaaggaaaggaaggattcgttgtggaaacctacaccgggctcataaagaccgcaatgctctttcataatatgagacggtcctactttaaatttcaggtgatcgccactgatgattacggtaagggcctgagtgggaaggcggacgtgctggtttccgtcgtgaatcagttagacatgcaggttatcgtcagtaacgtgcctcctacactggtcgaaaaaaaaattgaagacttgactgaaattcttgaccgatacgtccaggagcagatccctggcgcaaaagtcgtcgtagaatccattggggcaagaaggcacggtgatgccttttcactcgaggattataccaagtgcgatctgacagtgtatgctatcgatccccaaactaaccgggccattgaccgtaacgagcttttcaaatttctcgatggaaagctgcttgatattaacaaggatttccagccatactatggagagggaggtcggatcctggagattcgaacccccgaggcagtgacgtcaataaaaaagagaggcgagagcctgggttataccgaaggagcgctcctcgccctggcattcatcattattctctgttgtataccagccattctggtggtgcttgtttcctatcggcagcgccaggcagagtgcactaagacagcaagaatacaggccgcccttcccgccgctaaaccagcagtaccagccccggctcccgtcgctgcacctcctccccccccccccccaccacctggggcacacttatatgaggaactgggcgactcctccattttgtttctgctctaccacttccagcaatctcgggggaacaattccgtctccgaggacaggaagcaccagcaggtcgtgatgccattctccagcaatacaatcgaggcacataagagcgctcatgtcgacggctccttaaagagcaataagttaaagtccgcgaggaaattcacctttctctccgacgaggatgacctgtcagcccataatcccctgtacaaggagaatattagtcaggtgtctactaattcagatatatctcagaggaccgatttcgtggacccatttagtccgaaaatacaggcgaagagcaagagcctgcgcggcccaagggaaaagatccagaggctttggtcacaatcggtgagtctccctcggaggctgatgagaaaggttccaaataggccagaaatcattgatcttcaacagtggcagggcacccgtcagaaggccgaaaatgagaacaccggcatttgtaccaacaaacgtggctctagtaatccactattgacgactgaggaggccaacctcaccgaaaaggaagagataagacagggagaaacactgatgatcgaagggactgagcagctgaaaagcttgtccagtgacagctccttttgcttcccaagaccccattttagtttctcaacgctccccacggtgagtcgaacggttgaactgaaaagcgagcctaacgttatatcttccccggcagagtgtagcctggaactgtctccatcccggccctgtgtgcttcactcctctctttccaggcgggaaacccccatctgtatgttacccatcgagaccgagagaaacatctttgagaacttcgcccacccaccaaatatctccccctcagcctgtccccttccccccccacctcctattagccctccatcccccccccctgcccctgccccgctcgcacctccaccggacatcagccccttctccctgttttgcccacccccttcacctcctagtattccccttccactgccaccccccacctttttccctttgtctgtttccacctcaggccctccaaccccccccctcctacctcccttccccacccccctcccgccacccccaccatccatcccttgcccacctccgcctagcgcctccttcctgagcaccgagtgtgtttgcatcaccggtgtgaaatgtaccaccaacctaatgcccgccgaaaagataaaaagctctatgacgcagctgtctacaacaaccgtttgcaaaaccgaccctcagagagaacctaaaggaattcttaggcatgtaaagaatcttgctgagttagaaaagagtgtggctaacatgtactctcagatcgagaaaaactaccttcgcacgaacgttagcgagcttcagacaatgtgtccgtctgaagttacaaacatggagattacatcggaacagaacaaggggagcctcaacaacattgtcgagggtaccgaaaaacagtcacattctcagagcacttccttgtag

SEQ ID NO: 54586 - DNA, 5748 bp, Artificial Sequence
  derived and/or modified sequence
atgtttaggcagttttatttgtggacttgccttgcctccgggataatcctgggctccctatttgaaatttgcctgggacagtacgatgacgattgtaagttggcgaggggcggaccgcctgctacaattgtcgcgatcgacgaggagtcccggaatggcacaatcctcgttgacaatatgctaatcaagggcactgccggtggtccggacccaaccattgagctgagtctcaaggataacgtggactattgggtgctgatggatccagtaaagcagatgctgtttcttaactctacagggagggtgctggatcgggaccccccaatgaacatccatagcatcgttgtgcaagtacagtgtattaacaagaaagtgggtacaatcatttatcatgaggtgcgtattgtagttcgagatagaaacgacaactcaccaaccttcaaacacgagtcatattatgctaccgtcaatgagctgacgccggtggggaccacaatattcacgggcttttcaggcgacaacggtgctacggacatagacgatggccctaacggccagattgagtacgtcatccagtacaaccccgatgatccagacagggcccaaaatctgaatgaacggagaactacaactacaacccttacagtagacgtgctggacggcgacgatttaggcccaatgtttcttccctgcgtccttgtgcccaacactcgcgattgtcgcccacttacgtatcaggccgcaatcccggagctccggacaccggaggaactgaacccaatcatcgtaactccccctatacaggctatcgaccaggatcgcaatatccagccacccagtgacagaccgggaattctgtactccattctagtgggaactccagaagactacccaaggttctttcatatgcatcccagaactgcggaactgagtcttctggagccggtgaatagggactttcaccaaaagttcgatctggtcataaaggcagaacaggacaatggccacccgctgcctgcgtttgcgggtctccatatcgaaatcttagacgaaaacaatcagtctccatatttcaccatgccatcataccagggctacattcttgagagtgcaccagttggcgcaaccattagcgactcactgaacttaacttctcctctgagaatcgttgcgctggataaagacatcgaagacaccaaggatcccgagctccacctgttcctgaacgattacacatccgtgtttactgtgactcagactggaattacccgctacctcactctgctacagcctgtcgacagggaggagcagcaaacttatacctttagtatcaccgcctttgatggagtccaggagagcgaaccggtcatcgtgaacatccaggtgatggatgcaaatgacaacacccccactttccctgaaatctcttacgatgtctatgtctatactgacatgaggcctggggactctgttatccagctgactgcagttgatgcagacgagggcagcaacggcgagataacttacgaaattctcgtgggggcacaaggcgattttataattaacaagacaacgggtctgatcaccatcgctcctggcgtggaaatgatcgttgggagaacatatgctctcaccgttcaggctgctgataatgccccacctgctgagcggcgaaactcaatctgcacagtctatattgaagtcctgcctccaaacaaccagagtccccctcgatttccccagctgatgtattctttggaaatatcagaggctatgcgggtaggggctgttctgctgaatctgcaggccacagaccgtgagggcgactcgatcacatacgccattgaaaacggtgaccctcagagagtgttcaacctgagtgagacaacaggcatcctgactctaggcaaagcccttgacagggagtccacagacaggtacatcctgattatcactgcaagtgacggtaggccagacgggacaagcacagctacggtgaacattgttgttaccgatgtgaacgacaacgccccagtgtttgatccatatctgccaagaaatctatctgtcgtggaggaagaggccaacgccttcgtcgggcaagtgaaagccacagatccggacgccggaattaacgggcaggtgcactactctctgggcaactttaataacttgtttaggattacctccaacggtagcatttacaccgctgtaaagttaaatcgagaggtacgcgattactacgaactggtggtagtggctactgacggtgcagtccatcctcggcattccaccctcacacttgccataaaagtactggacattgacgacaactcgccagtcttcacgaacagcacctatactgtactcgtggaggagaacctacccgcaggcacgactatcttgcagatcgaggctaaggacgtggacctgggagctaacgtgtcctacaggattaggagccctgaggttaagcacttttttgcactacacccattcacaggcgagctgagtctgctgcggagcctagactacgaagcctttcccgaccaggaggcttcaataacgtttttggtggaggccttcgatatctacggcactatgcctccaggcattgcaacagtgacggtgattgtgaaagatatgaatgactatccaccggtgttttcaaaaagaatctataagggaatggtcgcccctgatgcggtcaagggcacccctatcaccacagtgtatgctgaggatgcagacccccctggactgcccgcttctcgtgtacgctacagagtggacgacgtgcagttcccatacccggctagcatcttcgaagtcgaagaggactccgggagggtcatcacacgcgtgaatttgaacgaagagcccactactatttttaaactcgtggtggtagcctttgatgatggtgaaccagtgatgagtagctcggctaccgtgaaaatcctcgtactgcatcccggagagataccacggttcactcaagaggaatatcgccctcccccagtttctgagctcgcaaccaagggaaccatggtcggcgtgatcagcgccgctgcaatcaatcagtctatagtgtattcaatagtctctggaaacgaagaggacactttcggtatcaacaacatcaccggggttatctacgtgaacggtcccttggattatgagacccggacatcctacgtgctcagggttcaggccgacagcttagaggtggtgctggcgaacctgagagtccctagcaagtccaacacagccaaagtatacattgagattcaggatgagaataaccaccctcctgtcttccagaagaagttctatattgggggtgtgtcagaagatgcaaggatgtttacgagcgttttgcgggtgaaagccaccgataaagacacagggaactatagtgtaatggcctacagactgatcatcccccctatcaaggaagggaaggagggctttgtggtcgagacatacactggattaattaagacggcaatgctcttccacaatatgaggcgatcgtacttcaagtttcaagtgattgcaaccgatgattatggcaaaggactcagcggcaaagccgatgttttagtttctgtcgtgaatcagttggacatgcaggtaatcgtgagcaatgtgccccctaccctcgtcgaaaagaaaatcgaggacttgaccgagatcttggatcgctatgtgcaggaacagatccccggagccaaagtggtcgtggaatcaatcggggcacggcgacacggggatgccttttcactggaggactacaccaaatgtgacttgactgtctatgcaatagatccccagactaacagagcaatcgatagaaatgagctgttcaagttcctcgacggtaagttgctcgatattaataaagatttccagccttattacggtgagggcggtagaatattggaaatccggacgcccgaagccgtgacctcaattaagaaaagaggcgaatctctagggtacacggagggtgcccttctggcccttgcattcattattatcctctgctgtatccctgccattctggtagtactggtctcttatcgtcaacgccaggcggaatgcaccaagaccgctcggatccaggctgcattgcccgctgcaaagccagccgttcccgcacctgcccctgtggccgcaccccctcccccacctcctccacctcccggtgcccacctgtacgaagagctgggcgatagcagcatcttattcctgctgtatcatttccagcagtctcgagggaacaattcagtgtctgaagatcggaaacaccagcaggtggtgatgccattcagctctaacaccattgaagcccataagtcagcacatgttgatggctcactgaagtctaacaaattaaaatcagccagaaagtttaccttcctgagcgacgaggacgacttaagcgctcataatccactatacaaagagaacatatcacaggtgagtacaaacagcgatatctcacagcgaacagatttcgtcgatcctttttctccaaagatccaagctaagtccaaatccctgcggggacctagagaaaaaatccaaaggctgtggtcacagagcgtgtccttgccacgccgactcatgagaaaagtgcctaatcggccagaaatcatcgaccttcagcaatggcaggggacaaggcagaaggcagagaatgagaataccggaatctgtacaaacaagcgtggatcttctaatccattgctgaccaccgaagaggccaacctgacggagaaagaagagattcgccaaggcgagactctgatgatcgaaggcactgagcagttgaagagcctgagctccgatagctcgttctgctttcccagacctcatttttcgttttcaacgttaccaacagtatcacgcacagtggaattgaaatcagaaccaaacgtgatctctagcccggcagaatgcagcctggagctgtctccatctcggccatgtgtgctgcacagcagtctcagtaggcgggaaacccccatctgtatgttgcctattgagactgagaggaatatctttgaaaacttcgcccatccccctaacatctctccttccgcgtgtcccctccctccaccacccccaatctcgcccccatcgccccctcctgcccctgcgccactggcgccacccccagatatttccccattcagccttttttgtcctcctccgtctccgccttctattcctctccccctgcctccaccgaccttcttcccgttgtccgtgagcacatctggtcctcctacacccccactcctgccaccgttcccaacacctttgcctccaccccctccttcgataccgtgcccccctccaccaagtgcatcattcttatccacggagtgcgtgtgcatcacaggtgtgaagtgcacaaccaatctgatgcccgcagagaaaataaagtcttccatgacccagctttctactacaacagtttgcaagaccgaccctcaaagggagcctaagggaattctcagacacgttaaaaacctcgccgagctcgaaaaaagcgtcgcgaatatgtattcgcagatcgagaagaactacctacggaccaatgtgtccgaattgcaaacaatgtgtcccagcgaagttacaaatatggagattacgtccgaacagaacaagggatccttgaacaatatcgttgagggtaccgaaaagcagtctcattctcagagcacaagcctgtac

SEQ ID NO: 54587 - DNA, 6901 bp, Artificial Sequence
  derived and/or modified sequence
caacgtgctgagctaatagcgacagatagagggcagacagattcctgctagcagcttagtgttagttgcttgtggtaactaaggcaggtggcatacatctcagaacgtggagaatgatggtatgctttctgagttaacatgttgaactgttttgcttttctaaaaattttcctagtaacattttcttgatgatatgagagtggatatcaatgcctcacagaaacaagaggtggaacatgtgaatgaatcgtcttggaactagattatgagcactggttctttttaaagggatgtgcaagaggcagccttggcaagaaaacttgctgcataatcttacatggactaaagatgaaactttaaaccgcaaatcagctttgagtgaactttgacagaagatgtttcgacagttttatctctggacatgtttagcttcagggatcatcctgggctctctctttgaaatctgcttgggccagtatgatgatgattgcaaactagctaggggaggaccaccagctaccatagttgctattgatgaagaaagtcggaatggtacaattctggtggacaacatgctgatcaaagggactgctggaggaccagaccccaccatagaactttctttaaaggataatgtggattactgggtgttgatggatcctgttaagcaaatgcttttcctgaacagcaccggaagagttctggatagagatccaccgatgaacatacactccattgtggtgcaggtccagtgcatcaacaaaaaagtgggcactattatctaccatgaagtgcgaatagtggtgagagacaggaatgacaactcacccactttcaagcatgaaagctactatgccacagtgaatgagctcactccagttggtaccacaatattcacaggattttcaggagacaatggagctacagatatagatgatggaccaaatggacagatagagtatgttattcagtataatccagatgatccggaccgtgcccaaaatctgaatgagaggcgaaccaccaccaccactctcacagtggatgttctggatggagatgacttgggtccaatgtttcttccttgtgtccttgtgccaaacactcgtgattgccgtccactcacttatcaagctgccatacctgagttgagaactccggaagaactgaaccccattattgttacgccaccaatccaagccattgatcaggaccggaatattcaaccgccatcagataggccaggaatcctctattccatccttgttgggactcctgaggattacccacgatttttccatatgcatcctaggacagcagaacttagtctcctggagccagtaaacagagactttcaccagaaatttgatttggttattaaggctgaacaagacaatggtcatcctcttcctgcctttgccggtctacacattgaaatactggatgaaaacaatcaaagtccatattttacaatgcccagttatcaaggctatatcctggaatctgccccagtgggagcaaccatttcggacagtctcaatttgacttcacctttaagaatagtagctctggacaaggacatagaagatacaaaagacccagagcttcacctttttctgaatgactacacctcagtcttcaccgtcacacagactggtattactcgctacctcaccttacttcaaccagtggacagggaagaacagcaaacttacaccttttcgataacagcatttgatggtgtacaagaaagtgagccagtcatcgtcaatattcaagtgatggatgcaaatgataacacgccaaccttccctgaaatatcctatgatgtgtatgtttatacagacatgagacctggggacagtgtcatacagctcactgcagtcgacgcagacgaagggtcaaatggggagatcacatatgaaatccttgttggggctcagggagacttcatcatcaataaaacaacagggcttatcaccatcgctccaggggtggaaatgatagtcgggcggacttacgcactcacggtccaagcagcggataatgctcctcctgcagagcgaaggaactccatctgcactgtgtatattgaagtgcttccaccaaataatcaaagccctcctcgcttcccacagctgatgtatagccttgaaattagtgaagccatgagggttggtgctgttttattaaatctacaggcaactgatcgagagggagactcaataacatatgccattgagaatggagatcctcagagagtttttaatctttcagaaaccacggggattctaaccttagggaaagcactggacagggaaagcactgatcgctacattctgatcatcacagcttcagatggcaggccagatgggacctcaactgccacagtaaacatagtggtgacagatgtcaatgacaatgctccagtgtttgatccttatctgccaagaaatttatctgtggtggaagaagaagccaatgcctttgtgggtcaagtaaaagcaacagaccctgatgctggaataaatggtcaagtgcactacagtttgggtaactttaataatctttttcgtatcacatccaatgggagcatttacacagcagtgaagcttaacagagaagtcagggactactatgaacttgttgttgtggcaacagatggagcagtacaccctcgtcattcaactctaaccttggccatcaaggttttggacattgatgataacagtcctgtgttcaccaattcaacatacactgtccttgttgaagagaatttgccagctgggactaccatccttcaaatagaggccaaagatgtcgaccttggagcaaatgtgtcttaccggataagaagcccagaagtgaagcacttttttgcactacatccatttacaggagaactatcgcttttaaggagtttagattatgaggcatttccagaccaagaagcaagtatcacttttctggtagaggcctttgatatttatggaacaatgccacctggtattgctactgtcacagtgattgtaaaggatatgaatgattatcctcctgtctttagtaaacgaatatacaaagggatggtggctccggatgcagtcaagggtacacctatcacaacagtttatgctgaagatgcagaccctcctggattacctgcaagtcgtgtgaggtatagagtagatgatgtacagtttccttaccctgccagtatttttgaagtggaagaagattctggaagagtaataacacgagtcaatcttaatgaagaacctacaacaatttttaagttggtggtggttgcttttgatgatggggagcctgtgatgtccagcagtgccacagtgaagattcttgtcttacatcctggtgagatcccacgcttcacacaggaggaatatagacctcctccagtaagtgaacttgccaccaaagggaccatggttggtgtaatttctgctgctgccattaatcaaagtattgtgtactccattgtttcaggaaatgaagaagatacatttggaattaataacatcacaggtgttatctatgtgaatggacctctggattatgagaccaggacaagctatgtacttcgagtccaagctgattccctggaagtggtccttgccaatctccgagttccttcaaaaagcaatacagctaaagtatacattgagattcaggatgaaaataatcatcccccagtgtttcagaaaaaattctacatcggaggtgtatctgaagatgcaagaatgtttacttctgtactcagagtgaaggctactgataaagatactggcaattatagtgtcatggcctacagactcataataccaccaattaaagagggaaaagaaggatttgtagtggaaacatatacagggcttatcaaaactgctatgctcttccataatatgaggagatcctacttcaagtttcaagttattgcaactgacgactatgggaagggactgagcggcaaagccgatgtactcgtctccgtggtcaatcagctggatatgcaagtcattgtttccaatgtgcctcctactctagtggaaaaaaagatagaagatcttacagagatcttggatcgctatgttcaggaacaaattcctggtgccaaggtcgtagtggagtccattggagctcgccggcatggagatgccttttccctagaagattacaccaaatgtgacttgactgtctatgcaattgacccccaaaccaacagagccatcgatagaaatgagctttttaaatttttggatggcaaactacttgatatcaataaagactttcagccgtattatggggaaggaggacgcattctggagatccggactccagaggcagtgaccagcattaaaaagagaggagaaagtctaggatacacagaaggggccttgttggctctggccttcatcatcatcctctgctgcattcctgccatcttggtggttttggtcagctacagacaacgtcaagctgagtgtacaaagactgcacgaattcaggccgcattacccgcggctaaaccagcagtgccggctcctgcaccagtggcagcgcccccgccgccgccgccgcctccgccaggtgcgcatctctatgaagaacttggagacagctcaattcttttccttctctaccattttcaacaaagcaggggaaataactcagtctcagaagacaggaaacatcaacaagttgtgatgcccttttcttccaatactattgaggctcacaagtcagctcatgtagacggatcacttaagagcaacaaactgaagtctgcaagaaaattcacatttctatctgatgaggatgacttaagtgcccataatcccctttataaggaaaacataagtcaagtatcaacaaattcagacatttcacagagaacagattttgtagacccattttcacccaaaatacaagccaagagtaagtctctgaggggcccaagagaaaagattcagaggctgtggagtcagtcagtcagcttacccaggaggctgatgaggaaagttccaaatagaccagagatcatagatctgcagcagtggcaaggcaccaggcagaaagctgaaaatgaaaacactggaatctgtacaaacaaaagaggtagcagcaatccattgcttacaactgaagaggcaaatttgacagagaaagaggaaataaggcaaggtgaaacactgatgatagaaggaacagaacagttgaaatctctctcttcagactcttcattttgctttcccaggcctcacttctcattctccactttgccaactgtttcaagaactgtggaactcaaatcagaacctaatgtcatcagttctcctgctgagtgttccttggaactttctccttcaaggccttgtgttttacattcttcactctctaggagagagacacctatttgtatgttacctattgaaaccgaaagaaatatttttgaaaattttgcccatccaccaaacatctctccttctgcctgtccccttccccctcctcctcctatttctcctccttctcctcctcctgctcctgctcctcttgctcctcctcctgacatttctcctttttctcttttttgtcctcctccctctcctccttctatccctcttcctcttcctcctcctacattttttccactttccgtttcaacgtctggtcccccaacaccacctcttctacctccatttccaactcctcttcctccaccacctccttctattccttgccctccacctccttcagcttcatttctgtccacagagtgtgtctgtataacaggtgttaaatgcacgaccaacttgatgcctgccgagaaaattaagtcctctatgacacagctatcaacaacgacagtgtgtaaaacagaccctcagagagaaccaaaaggcatcctcagacacgttaaaaacttagcagaacttgaaaaatcagtagctaacatgtacagtcaaatagaaaaaaactatctacgcacaaatgtttcagaacttcaaactatgtgcccttcagaagtaacaaatatggaaatcacatctgaacaaaacaaggggagtttgaacaatattgtcgagggaactgaaaaacaatctcacagtcaatctacttcactgtaatgttgcttttcttattttagtcgggcaaacctcttgttgatcatagtcttcaagttgaacatcaaatttgaacgtcaaagaagactctattattttaccccaaattcaatgaaatgcagttttttttctcgtttttaatttaaaaagatattaacctcatcactactaactcactcatataatagatttaccttactttttaaaaactacaaagtagcataatttgttctacatttatttgaaaagtaagtaattttaatctcttttttagtgggaatatgtgggcatgaaaattagatacccaacttaaaccaaaggcatgtctatcatgtggatgcagtaacatttacatttagtttttgatcgtagttttatatgaatgttccaagaaaaaagcagactgttacaaataagttaaaactgatatgattgataggttctgttttttcttgaagcctatgtatttggtaagaagaaatactaccgaagtaaaatataatgtacctagattgtaggagatgacagacataaggtatttcaaaataaatctcaggtgctataacatgtagtcatctgttttctgataagaacatcttttactctgacttgcttttatcttagtagtatgcttatggatttagtagtatgcttatggatttgataaatcttatactttttcagttgctgtcttattctctttatttctcattgtgctttcccttcccttctttataatgaaaataaatcttgagtcgttg

SEQ ID NO: 54588 - DNA, 5748 bp, Artificial Sequence
  derived and/or modified sequence
atgttcagacagttctacctgtggacctgcctggccagcggcatcatcctgggcagcctgttcgagatctgcctgggccagtacgacgacgactgcaagctggccagaggcggcccccccgccaccatcgtggccatcgacgaggagagcagaaacggcaccatcctggtggacaacatgctgatcaagggcaccgccggcggccccgaccccaccatcgagctgagcctgaaggacaacgtggactactgggtgctgatggaccccgtgaagcagatgctgttcctgaacagcaccggcagagtgctggacagagacccccccatgaacatccacagcatcgtggtgcaggtgcagtgcatcaacaagaaggtgggcaccatcatctaccacgaggtgagaatcgtggtgagagacagaaacgacaacagccccaccttcaagcacgagagctactacgccaccgtgaacgagctgacccccgtgggcaccaccatcttcaccggcttcagcggcgacaacggcgccaccgacatcgacgacggccccaacggccagatcgagtacgtgatccagtacaaccccgacgaccccgacagagcccagaacctgaacgagagaagaaccaccaccaccaccctgaccgtggacgtgctggacggcgacgacctgggccccatgttcctgccctgcgtgctggtgcccaacaccagagactgcagacccctgacctaccaggccgccatccccgagctgagaacccccgaggagctgaaccccatcatcgtgaccccccccatccaggccatcgaccaggacagaaacatccagccccccagcgacagacccggcatcctgtacagcatcctggtgggcacccccgaggactaccccagattcttccacatgcaccccagaaccgccgagctgagcctgctggagcccgtgaacagagacttccaccagaagttcgacctggtgatcaaggccgagcaggacaacggccaccccctgcccgccttcgccggcctgcacatcgagatcctggacgagaacaaccagagcccctacttcaccatgcccagctaccagggctacatcctggagagcgcccccgtgggcgccaccatcagcgacagcctgaacctgaccagccccctgagaatcgtggccctggacaaggacatcgaggacaccaaggaccccgagctgcacctgttcctgaacgactacaccagcgtgttcaccgtgacccagaccggcatcaccagatacctgaccctgctgcagcccgtggacagagaggagcagcagacctacaccttcagcatcaccgccttcgacggcgtgcaggagagcgagcccgtgatcgtgaacatccaggtgatggacgccaacgacaacacccccaccttccccgagatcagctacgacgtgtacgtgtacaccgacatgagacccggcgacagcgtgatccagctgaccgccgtggacgccgacgagggcagcaacggcgagatcacctacgagatcctggtgggcgcccagggcgacttcatcatcaacaagaccaccggcctgatcaccatcgcccccggcgtggagatgatcgtgggcagaacctacgccctgaccgtgcaggccgccgacaacgccccccccgccgagagaagaaacagcatctgcaccgtgtacatcgaggtgctgccccccaacaaccagagcccccccagattcccccagctgatgtacagcctggagatcagcgaggccatgagagtgggcgccgtgctgctgaacctgcaggccaccgacagagagggcgacagcatcacctacgccatcgagaacggcgacccccagagagtgttcaacctgagcgagaccaccggcatcctgaccctgggcaaggccctggacagagagagcaccgacagatacatcctgatcatcaccgccagcgacggcagacccgacggcaccagcaccgccaccgtgaacatcgtggtgaccgacgtgaacgacaacgcccccgtgttcgacccctacctgcccagaaacctgagcgtggtggaggaggaggccaacgccttcgtgggccaggtgaaggccaccgaccccgacgccggcatcaacggccaggtgcactacagcctgggcaacttcaacaacctgttcagaatcaccagcaacggcagcatctacaccgccgtgaagctgaacagagaggtgagagactactacgagctggtggtggtggccaccgacggcgccgtgcaccccagacacagcaccctgaccctggccatcaaggtgctggacatcgacgacaacagccccgtgttcaccaacagcacctacaccgtgctggtggaggagaacctgcccgccggcaccaccatcctgcagatcgaggccaaggacgtggacctgggcgccaacgtgagctacagaatcagaagccccgaggtgaagcacttcttcgccctgcaccccttcaccggcgagctgagcctgctgagaagcctggactacgaggccttccccgaccaggaggccagcatcaccttcctggtggaggccttcgacatctacggcaccatgccccccggcatcgccaccgtgaccgtgatcgtgaaggacatgaacgactacccccccgtgttcagcaagagaatctacaagggcatggtggcccccgacgccgtgaagggcacccccatcaccaccgtgtacgccgaggacgccgacccccccggcctgcccgccagcagagtgagatacagagtggacgacgtgcagttcccctaccccgccagcatcttcgaggtggaggaggacagcggcagagtgatcaccagagtgaacctgaacgaggagcccaccaccatcttcaagctggtggtggtggccttcgacgacggcgagcccgtgatgagcagcagcgccaccgtgaagatcctggtgctgcaccccggcgagatccccagattcacccaggaggagtacagacccccccccgtgagcgagctggccaccaagggcaccatggtgggcgtgatcagcgccgccgccatcaaccagagcatcgtgtacagcatcgtgagcggcaacgaggaggacaccttcggcatcaacaacatcaccggcgtgatctacgtgaacggccccctggactacgagaccagaaccagctacgtgctgagagtgcaggccgacagcctggaggtggtgctggccaacctgagagtgcccagcaagagcaacaccgccaaggtgtacatcgagatccaggacgagaacaaccacccccccgtgttccagaagaagttctacatcggcggcgtgagcgaggacgccagaatgttcaccagcgtgctgagagtgaaggccaccgacaaggacaccggcaactacagcgtgatggcctacagactgatcatcccccccatcaaggagggcaaggagggcttcgtggtggagacctacaccggcctgatcaagaccgccatgctgttccacaacatgagaagaagctacttcaagttccaggtgatcgccaccgacgactacggcaagggcctgagcggcaaggccgacgtgctggtgagcgtggtgaaccagctggacatgcaggtgatcgtgagcaacgtgccccccaccctggtggagaagaagatcgaggacctgaccgagatcctggacagatacgtgcaggagcagatccccggcgccaaggtggtggtggagagcatcggcgccagaagacacggcgacgccttcagcctggaggactacaccaagtgcgacctgaccgtgtacgccatcgacccccagaccaacagagccatcgacagaaacgagctgttcaagttcctggacggcaagctgctggacatcaacaaggacttccagccctactacggcgagggcggcagaatcctggagatcagaacccccgaggccgtgaccagcatcaagaagagaggcgagagcctgggctacaccgagggcgccctgctggccctggccttcatcatcatcctgtgctgcatccccgccatcctggtggtgctggtgagctacagacagagacaggccgagtgcaccaagaccgccagaatccaggccgccctgcccgccgccaagcccgccgtgcccgcccccgcccccgtggccgcccccccccccccccccccccccccccccggcgcccacctgtacgaggagctgggcgacagcagcatcctgttcctgctgtaccacttccagcagagcagaggcaacaacagcgtgagcgaggacagaaagcaccagcaggtggtgatgcccttcagcagcaacaccatcgaggcccacaagagcgcccacgtggacggcagcctgaagagcaacaagctgaagagcgccagaaagttcaccttcctgagcgacgaggacgacctgagcgcccacaaccccctgtacaaggagaacatcagccaggtgagcaccaacagcgacatcagccagagaaccgacttcgtggaccccttcagccccaagatccaggccaagagcaagagcctgagaggccccagagagaagatccagagactgtggagccagagcgtgagcctgcccagaagactgatgagaaaggtgcccaacagacccgagatcatcgacctgcagcagtggcagggcaccagacagaaggccgagaacgagaacaccggcatctgcaccaacaagagaggcagcagcaaccccctgctgaccaccgaggaggccaacctgaccgagaaggaggagatcagacagggcgagaccctgatgatcgagggcaccgagcagctgaagagcctgagcagcgacagcagcttctgcttccccagaccccacttcagcttcagcaccctgcccaccgtgagcagaaccgtggagctgaagagcgagcccaacgtgatcagcagccccgccgagtgcagcctggagctgagccccagcagaccctgcgtgctgcacagcagcctgagcagaagagagacccccatctgcatgctgcccatcgagaccgagagaaacatcttcgagaacttcgcccacccccccaacatcagccccagcgcctgccccctgcccccccccccccccatcagcccccccagccccccccccgcccccgcccccctggcccccccccccgacatcagccccttcagcctgttctgccccccccccagcccccccagcatccccctgcccctgcccccccccaccttcttccccctgagcgtgagcaccagcggcccccccaccccccccctgctgccccccttccccacccccctgcccccccccccccccagcatcccctgcccccccccccccagcgccagcttcctgagcaccgagtgcgtgtgcatcaccggcgtgaagtgcaccaccaacctgatgcccgccgagaagatcaagagcagcatgacccagctgagcaccaccaccgtgtgcaagaccgacccccagagagagcccaagggcatcctgagacacgtgaagaacctggccgagctggagaagagcgtggccaacatgtacagccagatcgagaagaactacctgagaaccaacgtgagcgagctgcagaccatgtgccccagcgaggtgaccaacatggagatcaccagcgagcagaacaagggcagcctgaacaacatcgtggagggcaccgagaagcagagccacagccagagcaccagcctgtag

SEQ ID NO: 54589 - protein, 809 aa, Artificial Sequence
  derived and/or modified sequence
MFRQFYLWTCLASGIILGSLFEICLGQYDDGTILVDNMLIKGTAGGPDPTIELSLKDNVDYWVLMDPVKQMLFLNSTGRVLDRDPPMNIHSIVVQVQCINKKVGTIIYHEVRIVVRDRNDNSPTFKHESYYATVNELTPVGTTIFTGFSGDNGATDIDDGPNGQIEYVIQYNPDDPTSNDTFEIPLMLTGNIVLRKRLNYEDKTRYFVIIQANDRAQNLNERRTTTTTLTVDVLDGDDLGPMFLPCVLVPNTRDCRPLTYQAAIPELRTPEELNPIIVTPPIQAIDQDRNIQPPSDRPGILYSILVGTPEDYPRFFHMHPRTAELSLLEPVNRDFHQKFDLVIKAEQDNGHPLPAFAGLHIEILDENNQSPYFTMPSYQGYILESAPVGATISDSLNLTSPLRIVALDKDIEDTKDPELHLFLNDYTSVFTVTQTGITRYLTLLQPVDREEQQTYTFSITAFDGVQESEPVIVNIQVMDANDNTPTFPEISYDVYVYTDMRPGDSVIQLTAVDADEGSNGEITYEILVGAQGDFIINKTTGLITIAPGVEMIVGRTYALTVQAADNAPPAERRNSICTVYIEVLPPNNQSPPRFPQLMYSLEISEAMRVGAVLLNLQATDREGDSITYAIENGDPQRVFNLSETTGILTLGKALDRESTDRYILIITASDGRPDGTSTATVNIVVTDVNDNAPVFDPYLPRNLSVVEEEANAFVGQVKLSTTTVCKTDPQREPKGILRHVKNLAELEKSVANMYSQIEKNYLRTNVSELQTMCPSEVTNMEITSEQNKGSLNNIVEGTEKQSHSQSTSL

SEQ ID NO: 54590 - DNA, 2430 bp, Artificial Sequence
  derived and/or modified sequence
atgttccgacaattttacctgtggacttgtctagcaagtggcataatcttgggatctctgttcgagatctgcctgggtcagtatgatgatggcaccatcctggttgacaacatgcttattaaaggaaccgcaggtggcccggacccaaccatcgagctgtctctgaaagataacgtcgattattgggtcctgatggatcccgttaagcaaatgctgtttcttaactccaccggaagagttttagatcgggatcccccaatgaatattcatagcatagtcgttcaggtgcagtgtatcaacaaaaaggtcgggaccatcatctaccatgaagtgcgaatcgtcgtccgcgacagaaacgacaattcacccacatttaaacacgagagctactacgcaacagtaaatgagctgacgccggtggggacaacaatttttacaggattcagcggcgacaacggggcaaccgatatcgacgacggccctaatggccagatcgagtatgtcatacaatacaatccagatgaccccacttccaacgatacatttgagatccccctcatgcttacaggcaacattgttttgaggaagcgtctgaactatgaagacaagacccgttatttcgtgattatccaagctaacgatagagctcaaaacctcaacgagaggaggaccactaccacaactctcactgtcgacgtgctggacggggacgacctcggtccaatgttcctcccctgtgtcctcgtgcctaataccagggactgccgcccactgacataccaggcagctatccccgagctgagaactccggaagagctcaatcctatcatagtcacacccccaattcaggcaatcgaccaggatcgcaatattcagccccccagcgacagacctggcatactatacagtattctagtcgggacccctgaggattatccaagattttttcacatgcatcctcgcactgctgaactgtccctgttggagcctgtcaacagggatttccaccagaagttcgatttggtcataaaggcagagcaggacaatgggcacccactccccgccttcgccggcctgcacatcgaaattctggacgagaataaccagtccccgtactttactatgcccagctaccagggctatatcctggaatccgcaccggttggcgccaccattagcgattccttgaacctgaccagcccacttagaattgtagctctggacaaagatatcgaagacacgaaggatcctgaactgcatctcttcctgaatgattatactagtgtgtttactgtgacccagaccgggatcactagatatctgactctgctccagcctgtcgaccgagaagagcagcaaacatatactttttccatcacagcgtttgacggggtgcaggaatctgaacccgtgatcgttaacatccaagttatggatgctaacgataacacacctacatttcctgagattagctatgatgtgtatgtgtacacagacatgcgaccaggtgatagcgttatacagttgacagcggtggacgccgatgagggctcaaatggggaaattacttacgagattctggttggtgcgcagggggatttcattatcaacaagacaactggactgattaccatcgcccctggggtcgaaatgattgtgggccgtacatatgcacttacagtgcaggccgctgacaatgccccacccgctgagcggaggaatagtatttgcacagtttacatcgaggtgttaccaccaaacaaccaaagtccaccaagatttccgcaactgatgtatagtctggaaatctctgaggcaatgcgggtgggcgctgttctattaaacttacaggcaacagatcgagagggtgattctataacatatgcaatcgagaacggagacccgcagagggtgttcaacctaagcgagactacgggaatcctaaccctcggcaaagctctcgaccgggagtctactgataggtacatccttatcatcacagctagcgacgggagaccggacgggacctcaaccgctacagtgaatatcgttgtcaccgatgtcaatgacaacgcccccgtttttgacccttatcttcccaggaatctttcagttgtggaggaagaggcaaacgccttcgtcgggcaggtcaaactgagcaccaccaccgtctgtaagaccgaccctcagagggagcccaagggcattctgagacatgtaaagaatttagctgagctggagaagtctgtagcaaacatgtatagccagattgaaaaaaattacttaaggactaatgtgagcgaattacagacaatgtgcccctctgaggtgacgaatatggagataacaagcgagcagaataaaggctctctgaataatatcgtggaaggtaccgagaagcaatcccactcacagtccacatcactctag

SEQ ID NO: 54591 - DNA, 2430 bp, Artificial Sequence
  derived and/or modified sequence
atgttccggcagttctacctgtggacctgcctggccagcggcatcatcctgggcagcctgtttgagatctgcctgggccagtatgatgatggcaccatcctggtggacaacatgctgatcaagggcacagctgggggccctgaccccaccatcgagctgagcctgaaggacaacgtggactactgggtgctgatggaccctgtgaagcagatgctgttcctgaacagcacaggccgggtgctggaccgggacccccccatgaacatccacagcatcgtggtgcaggtgcagtgcatcaacaagaaggtgggcaccatcatctaccacgaggtgagaattgtggtgcgggacagaaatgacaacagccccaccttcaagcatgagagctactatgccaccgtgaatgagctgacccctgtgggcaccaccatcttcaccggcttcagcggggacaacggggccacagacattgatgatggccccaacggccagattgaatatgtgatccagtacaacccagatgaccccaccagcaatgacacctttgagatccccctgatgctgactggaaacatcgtgctgaggaagaggctgaactatgaggacaagacccgctactttgtgatcatccaggccaatgaccgggcccagaacctgaatgaaagaaggaccaccaccaccaccctgactgtggatgtgctggatggagatgacctgggccccatgttcctgccctgtgtgctggtgcccaacacccgggactgccggcccctgacctaccaggccgccatccctgagctgcggaccccagaggagctgaaccccatcatcgtgaccccacccatccaggccatcgaccaggacaggaacatccagcccccaagtgaccggcccggcatcctgtacagcatcctggtgggcaccccagaggactacccccgcttcttccacatgcaccccaggacagctgagctgagcctgctggagcctgtgaacagagacttccaccagaagtttgacctggtgatcaaggccgagcaggacaatggccaccccctgcctgcctttgctggcctgcacatcgagatcctggatgagaacaaccagagcccctacttcaccatgcccagctaccagggctacatcctggagagcgcccctgtgggcgccaccatcagtgacagcctgaacctgaccagccccctgcgcatcgtggccctggacaaggacatcgaggacaccaaggaccctgagctgcacctgttcctgaatgactacaccagcgtcttcaccgtgacccagacaggcatcacccgctacctgaccctgctgcagcctgtggaccgggaggagcagcagacctacaccttcagcatcacagcctttgatggagtgcaggagagcgagcccgtcatcgtgaacatccaggtgatggatgccaatgacaacacccccaccttccctgagatctcctatgatgtgtatgtgtacacagacatgaggcctggggacagcgtcatccagctgacagctgtggatgctgatgagggcagcaatggagagatcacctatgagatcctggtgggcgcccagggcgacttcatcatcaacaagaccaccggcctcatcaccatcgcccctggggtggagatgattgtgggccgcacctacgccctgactgtgcaggccgctgacaatgcccccccagctgagaggagaaattccatctgcaccgtgtacatcgaggtgctgccccccaacaaccagagccccccacgcttcccccagctgatgtacagcctggagatcagcgaggccatgagggtgggcgctgtgctgctgaacctgcaggccacagaccgggagggggacagcatcacctacgccattgaaaatggagacccccagagggtcttcaacctgtctgagaccaccggcatcctgaccctgggcaaggccctggaccgggagagcacagaccgctacatcctgatcatcacagccagtgatggccgcccagatggcaccagcacagccaccgtgaacatcgtggtgacagatgtgaatgacaatgcccctgtgtttgacccctacctgcccaggaacctgtctgtggtggaggaggaggccaatgcctttgtgggccaggtgaagctgagcaccaccaccgtgtgcaagacagacccccagcgggagcccaagggcatcctgcggcacgtgaagaacctggccgagctggagaagtctgtggccaacatgtacagccagatcgagaagaactacctgcggaccaacgtgtctgagctgcagaccatgtgccccagcgaggtgaccaacatggagatcaccagcgagcagaacaagggcagcctgaacaacatcgtggagggcacagagaagcagagccacagccagagcaccagcctgtag

SEQ ID NO: 54592 - DNA, 2430 bp, Artificial Sequence
  derived and/or modified sequence
atgttccggcagttctacctgtggacctgcctggccagcggcatcatcttggggtcattatttgaaatctgcctgggacagtatgacgatgggactattttggtcgataatatgttaattaagggcacagccggcggacctgatccaaccattgagctgtccttgaaggacaacgtagattactgggttctcatggatccggtgaaacaaatgttgttcctcaatagcacaggtagggttcttgatcgtgatccgccaatgaacattcacagcatagtggtgcaggtccagtgcatcaataagaaggtgggcacaatcatttaccacgaggtgcggattgttgtgcgcgaccgcaacgataatagtccaacctttaaacacgagagttactacgcaacggtgaacgaactcacacccgtggggaccaccattttcactggtttctcaggagataatggggccactgatatcgacgacgggccaaacggtcagatcgagtatgtgatccaatataatcctgatgaccctacatcaaatgatactttcgagattccactaatgcttacaggaaacattgtactgcgtaagaggctaaactacgaagataaaacccgttacttcgtgattatccaggccaacgaccgcgctcaaaatctgaatgaacgcaggacaaccacaaccacattgacagtggatgtgttggacggcgacgatcttggccctatgttcctcccttgtgtattagtccctaatacacgcgactgtcgcccccttacctaccaggccgctatccctgaactccgaacaccagaggaactgaaccccatcatcgtcacacccccaatccaggccatagatcaagaccggaatattcaacctccaagcgatcgcccaggtatactttattccatcctcgttggaaccccagaggactacccacgcttcttccacatgcacccaagaactgcagagttatccttgctcgaacctgtcaatagagattttcaccagaaatttgatctggtgatcaaagcagagcaggacaatgggcaccctttgcctgcgttcgccgggctccatattgagatactggacgaaaataatcagagcccatactttactatgccatcataccaaggctatattctggagtcagctccagtcggcgctacaattagtgactccctcaatttgaccagccccctcagaattgtggctctggataaagatatcgaagacacgaaagacccagagttgcatctgttcctaaatgattacacctccgtgttcaccgtgacacaaaccggaataactagatatctgactctgctgcaacctgtagatcgggaagaacagcaaacatatacattctcaattacggcttttgatggggttcaggagtcagaaccagttatcgtgaatatccaggttatggatgctaacgataacacaccgacattccccgaaatcagttatgacgtctatgtctataccgatatgaggcccggagatagtgtaatccagctgacagccgtggacgccgatgaaggatcaaacggcgagattacctacgagattcttgtgggcgcccaaggagacttcattataaataaaaccaccggtctcatcactattgcacctggagttgaaatgattgtgggtagaacctatgctttaactgtacaggcggccgacaacgcgcctccagccgagaggagaaattctatatgtaccgtgtacatagaagtgctccctccaaataaccagagcccaccaagatttcctcagctgatgtacagcctggagattagcgaggccatgcgcgttggtgccgtcctcctgaacctgcaagctacggacagagagggcgatagtatcacttacgctatcgagaacggcgacccccagcgtgtctttaacctatctgaaacaaccggaatcctcacgctgggcaaggccctcgaccgggaatccacagacaggtacatactcatcatcaccgcttcagacgggagacctgacgggacctcaacggcgactgtgaacatcgtggtgacagacgtgaacgacaacgccccagtgtttgatccctatttgccacggaacctgagtgttgtggaagaggaggccaatgcctttgtgggccaggttaaactgagcaccacgacggtgtgtaagacagacccacagcgcgagccaaaggggatcttgcgccacgtcaagaatctggccgaattggaaaagtcggttgcaaatatgtatagccaaatagagaagaactaccttcggacaaacgtgagcgaactgcaaaccatgtgtccatcggaagttacaaatatggaaattacctcggagcaaaacaaggggtctttgaacaatatcgtggaaggaactgaaaagcagtcgcacagccaatctacctccctgtag

SEQ ID NO: 54593 - DNA, 2430 bp, Artificial Sequence
  derived and/or modified sequence
atgtttcggcagttttatctttggacttgcctcgccagtggcatcattctaggttccttattcgaaatctgcttgggtcagtacgatgacggaacaatactcgtggacaacatgctgataaagggcaccgcaggcggacccgatccaactatagaactttcattaaaagacaatgtagattactgggtgttgatggatcctgtgaagcagatgcttttcctgaacagtacgggccgtgtgctggacagggatccgccaatgaatattcattccattgtggttcaggtgcagtgtatcaacaagaaggtgggaacgatcatctaccatgaggttcgtattgtcgtccgcgatcgcaatgacaactcccccacctttaaacatgagtcatactacgcaactgtgaacgagctcactcccgtggggaccaccatttttacagggttctcgggtgataatggcgctaccgacatagatgatggccctaacggacagatagaatacgttatccaatataacccagacgaccctaccagcaatgacacattcgagattccacttatgctgacaggtaatattgtgctgcggaaacgacttaactacgaggataaaacacgatatttcgtcataatccaggccaacgaccgcgcacagaatctaaacgaaagacgtaccacaacaactaccctgacggtggacgtgctcgatggggatgatctcgggcctatgttcctgccctgcgtcttagtgcctaatacaagggactgcaggcccctgacctaccaggcagccataccagagctgaggacccccgaggagctgaaccctatcatcgttaccccgccaatccaggctattgatcaagaccggaacattcaaccaccctccgacagacctggaattctttattcaattctggttgggactccagaagactaccccagatttttccacatgcatccacgcacagctgagctaagtttgctggagccggtgaatagggactttcatcagaagttcgatcttgtgatcaaagccgaacaggataacggacacccactgcctgcctttgctggattgcacatagaaatcctcgacgaaaacaatcagtcaccctactttactatgccttcgtatcagggatatatcctcgaaagcgcaccagtgggagcgactattagcgatagtctgaacctgacaagccccttgaggattgtcgccctggataaagacattgaagacactaaagaccccgaactacacctgtttctcaacgactacacatctgtgttcaccgtgacgcagacaggtatcacccgttatctgaccctcttacaacctgtggaccgcgaagagcagcaaacatacaccttttccattactgctttcgatggagtgcaagagtccgaaccagtgattgttaacattcaagtcatggatgctaatgacaatacgcccacattcccagagatcagctatgacgtgtacgtatacaccgacatgcgacctggcgatagcgtgattcaactaaccgctgtggatgctgacgaagggtccaacggcgagatcacttacgagatcttggtgggagcccagggggatttcatcattaataagactaccgggctgatcaccattgccccaggagtcgaaatgatcgtcggacggacctatgccttaaccgtccaagcagccgataatgccccaccagccgaacggagaaactccatctgcacagtgtacatcgaagtcttgccaccaaacaatcaatccccacctagattccctcaactgatgtactccctggagatatccgaggctatgcgagtgggagccgtgcttctcaatctgcaggctacagatcgcgagggcgacagtataacttacgccatcgagaatggcgatccccaacgcgtctttaacttaagtgagactaccggcatcttgacactcggaaaggcacttgaccgggagagcaccgataggtacatcctgatcattactgcaagcgacggaaggcctgatggaacttccacagctactgtcaacatcgtggttactgatgtgaatgataatgcccctgtgtttgacccttatctcccgaggaatctctctgtggtagaggaagaggcaaacgcattcgttgggcaggtgaagttaagcaccactacagtttgtaaaacggacccacagcgggaacccaagggcattctccggcatgtgaaaaacctcgctgagctagagaagagtgtggctaacatgtacagccagatcgagaaaaactatcttcgcacaaatgtgagcgagttacagaccatgtgcccatccgaggttaccaacatggaaatcacatcagagcaaaataaggggtcacttaataatatagtggagggaaccgagaaacagtcacattcgcaaagcacttctctctag

SEQ ID NO: 54594 - DNA, 3471 bp, Artificial Sequence
  derived and/or modified sequence
gctatcaggaggagcaaaagggaaggatctgctgctgggggctcgctgggtgaccctttgccagacgaaaagagctggtcgagagagaagcgcttggcaggagctctctgcgggacctaagctccgtggctgctcgggatccctacgtccgctgctgctgaaggagcagaggggaggacgccagcggttgcttactggagcctggaggaaaatggaaacatcattccctagaaacagttgaagttgacagacctagaggttgacaaaaggacacgacactagggaatttgcattgtcatgtttcgaaataccattccaaagacctgcaaataagatcagctttgagtgaactttgacagaagatgtttcgacagttttatctctggacatgtttagcttcagggatcatcctgggctctctctttgaaatctgcttgggccagtatgatgatggtacaattctggtggacaacatgctgatcaaagggactgctggaggaccagaccccaccatagaactttctttaaaggataatgtggattactgggtgttgatggatcctgttaagcaaatgcttttcctgaacagcaccggaagagttctggatagagatccaccgatgaacatacactccattgtggtgcaggtccagtgcatcaacaaaaaagtgggcactattatctaccatgaagtgcgaatagtggtgagagacaggaatgacaactcacccactttcaagcatgaaagctactatgccacagtgaatgagctcactccagttggtaccacaatattcacaggattttcaggagacaatggagctacagatatagatgatggaccaaatggacagatagagtatgttattcagtataatccagatgatccgacatccaatgacacctttgaaattcccctaatgttgactggaaatatagtgttaaggaagaggctcaactatgaagataagactcgctactttgtcataatccaagctaatgaccgtgcccaaaatctgaatgagaggcgaaccaccaccaccactctcacagtggatgttctggatggagatgacttgggtccaatgtttcttccttgtgtccttgtgccaaacactcgtgattgccgtccactcacttatcaagctgccatacctgagttgagaactccggaagaactgaaccccattattgttacgccaccaatccaagccattgatcaggaccggaatattcaaccgccatcagataggccaggaatcctctattccatccttgttgggactcctgaggattacccacgatttttccatatgcatcctaggacagcagaacttagtctcctggagccagtaaacagagactttcaccagaaatttgatttggttattaaggctgaacaagacaatggtcatcctcttcctgcctttgccggtctacacattgaaatactggatgaaaacaatcaaagtccatattttacaatgcccagttatcaaggctatatcctggaatctgccccagtgggagcaaccatttcggacagtctcaatttgacttcacctttaagaatagtagctctggacaaggacatagaagatacaaaagacccagagcttcacctttttctgaatgactacacctcagtcttcaccgtcacacagactggtattactcgctacctcaccttacttcaaccagtggacagggaagaacagcaaacttacaccttttcgataacagcatttgatggtgtacaagaaagtgagccagtcatcgtcaatattcaagtgatggatgcaaatgataacacgccaaccttccctgaaatatcctatgatgtgtatgtttatacagacatgagacctggggacagtgtcatacagctcactgcagtcgacgcagacgaagggtcaaatggggagatcacatatgaaatccttgttggggctcagggagacttcatcatcaataaaacaacagggcttatcaccatcgctccaggggtggaaatgatagtcgggcggacttacgcactcacggtccaagcagcggataatgctcctcctgcagagcgaaggaactccatctgcactgtgtatattgaagtgcttccaccaaataatcaaagccctcctcgcttcccacagctgatgtatagccttgaaattagtgaagccatgagggttggtgctgttttattaaatctacaggcaactgatcgagagggagactcaataacatatgccattgagaatggagatcctcagagagtttttaatctttcagaaaccacggggattctaaccttagggaaagcactggacagggaaagcactgatcgctacattctgatcatcacagcttcagatggcaggccagatgggacctcaactgccacagtaaacatagtggtgacagatgtcaatgacaatgctccagtgtttgatccttatctgccaagaaatttatctgtggtggaagaagaagccaatgcctttgtgggtcaagtaaaactatcaacaacgacagtgtgtaaaacagaccctcagagagaaccaaaaggcatcctcagacacgttaaaaacttagcagaacttgaaaaatcagtagctaacatgtacagtcaaatagaaaaaaactatctacgcacaaatgtttcagaacttcaaactatgtgcccttcagaagtaacaaatatggaaatcacatctgaacaaaacaaggggagtttgaacaatattgtcgagggaactgaaaaacaatctcacagtcaatctacttcactgtaatgttgcttttcttattttagtcgggcaaacctcttgttgatcatagtcttcaagttgaacatcaaatttgaacgtcaaagaagactctattattttaccccaaattcaatgaaatgcagttttttttctcgtttttaatttaaaaagatattaacctcatcactactaactcactcatataatagatttaccttactttttaaaaactacaaagtagcataatttgttctacatttatttgaaaagtaagtaattttaatctcttttttagtgggaatatgtgggcatgaaaattagatacccaacttaaaccaaaggcatgtctatcatgtggatgcagtaacatttacatttagtttttgatcgtagttttatatgaatgttccaagaaaaaagcagactgttacaaataagttaaaactgatatgattgataggttctgttttttcttgaagcctatgtatttggtaagaagaaatactaccgaagtaaaatataatgtacctagattgtaggagatgacagacataaggtatttcaaaataaatctcaggtgctataacatgtagtcatctgttttctgataagaacatcttttactctgacttgcttttatcttagtagtatgcttatggatttagtagtatgcttatggatttgataaatcttatactttttc

SEQ ID NO: 54595 - DNA, 2430 bp, Artificial Sequence
  derived and/or modified sequence
atgttcagacagttctacctgtggacctgcctggccagcggcatcatcctgggcagcctgttcgagatctgcctgggccagtacgacgacggcaccatcctggtggacaacatgctgatcaagggcaccgccggcggccccgaccccaccatcgagctgagcctgaaggacaacgtggactactgggtgctgatggaccccgtgaagcagatgctgttcctgaacagcaccggcagagtgctggacagagacccccccatgaacatccacagcatcgtggtgcaggtgcagtgcatcaacaagaaggtgggcaccatcatctaccacgaggtgagaatcgtggtgagagacagaaacgacaacagccccaccttcaagcacgagagctactacgccaccgtgaacgagctgacccccgtgggcaccaccatcttcaccggcttcagcggcgacaacggcgccaccgacatcgacgacggccccaacggccagatcgagtacgtgatccagtacaaccccgacgaccccaccagcaacgacaccttcgagatccccctgatgctgaccggcaacatcgtgctgagaaagagactgaactacgaggacaagaccagatacttcgtgatcatccaggccaacgacagagcccagaacctgaacgagagaagaaccaccaccaccaccctgaccgtggacgtgctggacggcgacgacctgggccccatgttcctgccctgcgtgctggtgcccaacaccagagactgcagacccctgacctaccaggccgccatccccgagctgagaacccccgaggagctgaaccccatcatcgtgaccccccccatccaggccatcgaccaggacagaaacatccagccccccagcgacagacccggcatcctgtacagcatcctggtgggcacccccgaggactaccccagattcttccacatgcaccccagaaccgccgagctgagcctgctggagcccgtgaacagagacttccaccagaagttcgacctggtgatcaaggccgagcaggacaacggccaccccctgcccgccttcgccggcctgcacatcgagatcctggacgagaacaaccagagcccctacttcaccatgcccagctaccagggctacatcctggagagcgcccccgtgggcgccaccatcagcgacagcctgaacctgaccagccccctgagaatcgtggccctggacaaggacatcgaggacaccaaggaccccgagctgcacctgttcctgaacgactacaccagcgtgttcaccgtgacccagaccggcatcaccagatacctgaccctgctgcagcccgtggacagagaggagcagcagacctacaccttcagcatcaccgccttcgacggcgtgcaggagagcgagcccgtgatcgtgaacatccaggtgatggacgccaacgacaacacccccaccttccccgagatcagctacgacgtgtacgtgtacaccgacatgagacccggcgacagcgtgatccagctgaccgccgtggacgccgacgagggcagcaacggcgagatcacctacgagatcctggtgggcgcccagggcgacttcatcatcaacaagaccaccggcctgatcaccatcgcccccggcgtggagatgatcgtgggcagaacctacgccctgaccgtgcaggccgccgacaacgccccccccgccgagagaagaaacagcatctgcaccgtgtacatcgaggtgctgccccccaacaaccagagcccccccagattcccccagctgatgtacagcctggagatcagcgaggccatgagagtgggcgccgtgctgctgaacctgcaggccaccgacagagagggcgacagcatcacctacgccatcgagaacggcgacccccagagagtgttcaacctgagcgagaccaccggcatcctgaccctgggcaaggccctggacagagagagcaccgacagatacatcctgatcatcaccgccagcgacggcagacccgacggcaccagcaccgccaccgtgaacatcgtggtgaccgacgtgaacgacaacgcccccgtgttcgacccctacctgcccagaaacctgagcgtggtggaggaggaggccaacgccttcgtgggccaggtgaagctgagcaccaccaccgtgtgcaagaccgacccccagagagagcccaagggcatcctgagacacgtgaagaacctggccgagctggagaagagcgtggccaacatgtacagccagatcgagaagaactacctgagaaccaacgtgagcgagctgcagaccatgtgccccagcgaggtgaccaacatggagatcaccagcgagcagaacaagggcagcctgaacaacatcgtggagggcaccgagaagcagagccacagccagagcaccagcctgtag

SEQ ID NO: 54596 - protein, 1785 aa, Artificial Sequence
  derived and/or modified sequence
MFRQFYLWTCLASGIILGSLFEICLGQYDDDCKLARGGPPATIVAIDEESRNGTILVDNMLIKGTAGGPDPTIELSLKDNVDYWVLMDPVKQMLFLNSTGRVLDRDPPMNIHSIVVQVQCINKKVGTIIYHEVRIVVRDRNDNSPTFKHESYYATVNELTPVGTTIFTGFSGDNGATDIDDGPNGQIEYVIQYNPDDPTSNDTFEIPLMLTGNIVLRKRLNYEDKTRYFVIIQANDRAQNLNERRTTTTTLTVDVLDGDDLGPMFLPCVLVPNTRDCRPLTYQAAIPELRTPEELNPIIVTPPIQAIDQDRNIQPPSDRPGILYSILVGTPEDYPRFFHMHPRTAELSLLEPVNRDFHQKFDLVIKAEQDNGHPLPAFAGLHIEILDENNQSPYFTMPSYQGYILESAPVGATISDSLNLTSPLRIVALDKDIEDVPPSGVPTKDPELHLFLNDYTSVFTVTQTGITRYLTLLQPVDREEQQTYTFSITAFDGVQESEPVIVNIQVMDANDNTPTFPEISYDVYVYTDMRPGDSVIQLTAVDADEGSNGEITYEILVGAQGDFIINKTTGLITIAPGVEMIVGRTYALTVQAADNAPPAERRNSICTVYIEVLPPNNQSPPRFPQLMYSLEISEAMRVGAVLLNLQATDREGDSITYAIENGDPQRVFNLSETTGILTLGKALDRESTDRYILIITASDGRPDGTSTATVNIVVTDVNDNAPVFDPYLPRNLSVVEEEANAFVGQVKATDPDAGINGQVHYSLGNFNNLFRITSNGSIYTAVKLNREVRDYYELVVVATDGAVHPRHSTLTLAIKVLDIDDNSPVFTNSTYTVLVEENLPAGTTILQIEAKDVDLGANVSYRIRSPEVKHFFALHPFTGELSLLRSLDYEAFPDQEASITFLVEAFDIYGTMPPGIATVTVIVKDMNDYPPVFSKRIYKGMVAPDAVKGTPITTVYAEDADPPGLPASRVRYRVDDVQFPYPASIFEVEEDSGRVITRVNLNEEPTTIFKLVVVAFDDGEPVMSSSATVKILVLHPGEIPRFTQEEYRPPPVSELATKGTMVGVISAAAINQSIVYSIVSGNEEDTFGINNITGVIYVNGPLDYETRTSYVLRVQADSLEVVLANLRVPSKSNTAKVYIEIQDENNHPPVFQKKFYIGGVSEDARMFTSVLRVKATDKDTGNYSVMAYRLIIPPIKEGKEGFVVETYTGLIKTAMLFHNMRRSYFKFQVIATDDYGKGLSGKADVLVSVVNQLDMQVIVSNVPPTLVEKKIEDLTEILDRYVQEQIPGAKVVVESIGARRHGDAFSLEDYTKCDLTVYAIDPQTNRAIDRNELFKFLDGKLLDINKDFQPYYGEGGRILEIRTPEAVTSIKKRGESLGYTEGALLALAFIIILCCIPAILVVLVSYRQFKVRQAECTKTARIQAALPAAKPAVPAPAPVAAPPPPPPPPPGAHLYEELGDSSMHKYEMPQYGSRRRLLPPAGQEEYGEVVGEAEEEYEEEEEEPKKIKKPKVEIREPSEEEEVVVTIEKPPAAEPTYTTWKRARIFPMIFKKVRGLADKRGIVDLEGEEWQRRLEEEDKDYLKLTLDQEEATESTVESEEESSSDYTEYSEEESEFSESETTEEESESETPSEEEESSTPESEESESTESEGEKARKNIVLARRRPMVEEVKEVKGRKEEPQEEQKEPKMEEEEHSEEEESGPAPVEESTDPEAQDIPEEGSAESASVEGGVESEEESESGSSSSSSESQSGGPWGYQVPAYDRSKNANQKKSPGANSEGYNTAL

SEQ ID NO: 54597 - DNA, 5358 bp, Artificial Sequence
  derived and/or modified sequence
atgtttcgccaattttatctatggacctgtcttgcttccgggatcatactcgggtccctgttcgagatttgtctaggccaatacgacgatgattgtaagttagcgaggggcggaccccctgcaacaatcgttgccattgatgaagaaagccgcaacgggaccattcttgtggacaatatgctgataaaaggtacggcagggggccctgaccccactatagagctgtccctcaaggacaacgtggattattgggtgctcatggatccggtaaaacagatgctctttttgaactcaaccggacgcgtgcttgaccgggatccccccatgaatatccatagtatagtggtgcaggtgcagtgtattaacaagaaagtaggcaccatcatctatcacgaggtgagaatcgtcgttcgagataggaacgataactccccgacctttaaacatgaatcctattacgctacagtcaacgagcttacaccagtcggcacaacaattttcaccgggttttctggggataacggcgccacagatatcgacgatggacccaacggacagattgagtacgtaattcagtacaaccctgatgacccaacatctaacgacactttcgaaattcctttgatgctgacaggcaacattgtgctacgtaaacggttaaactatgaagataagacaagatactttgtgatcatccaggcgaatgatagggcgcagaacctcaacgaacggaggacaaccacaactactctgactgtagatgtcctagacggggatgacctgggacccatgttcctaccctgcgtcttagtgccaaatacaagagattgcaggccgttgacgtaccaggccgctatcccagaactgaggaccccggaagagcttaaccctatcattgttaccccccctattcaggctattgatcaggacaggaatattcagccgccaagcgaccgtcctggcatactctactccatcctggtggggaccccggaagactacccaagatttttccacatgcatcctcgcactgcagagctgtctttactggagcctgtgaatcgggatttccatcagaaattcgaccttgttattaaagcggaacaagataacggtcaccccttaccagctttcgctggcctccacattgagatcctcgatgaaaacaaccagagtccgtattttaccatgccctcctatcaaggctacatcttagagtcagcaccggttggcgctactatcagtgattcattaaatttgacatccccactgagaattgtggccctggataaagacatagaggatgtcccacccagtggcgtgccgactaaagaccctgagctgcatctctttcttaatgactacacatcggtgttcacagtcacacagaccggaatcaccaggtacttgaccctactgcaacctgtggacagagaggagcagcagacttacaccttcagcatcaccgcttttgatggggtgcaggagtctgaacctgttatcgtaaacattcaggtgatggatgccaacgataataccccgacttttccagagatctcgtatgatgtgtacgtgtatacggacatgcggcccggcgacagcgttattcaactgactgctgtagatgcagacgagggctccaatggggaaattacatacgagatcttggttggggcccagggggactttatcatcaacaagacaacaggccttattacaatcgctcctggtgtcgagatgattgtaggtcggacttatgcactgactgtgcaagccgctgacaacgcgcccccagccgaaagacgaaattcaatctgtactgtgtacatagaggtgctgccccccaacaatcagtctccccctcggtttccacagttgatgtattccctggaaatctccgaggccatgagggtgggggccgtactgctgaatctgcaagcaactgatcgtgagggggactccatcacttacgccattgagaacggcgatccacagcgtgtattcaacctatccgagacaactgggatactcacactcggtaaagctttggaccgcgagtcgacagatcggtacatcctgatcattaccgcgagcgacggcagaccagatggcacctccaccgccaccgtaaacatcgtcgtcaccgatgtgaacgataacgccccagtcttcgacccttacctgcccaggaatttatccgtggtggaagaggaggccaacgcatttgtgggccaggtgaaggcaacagacccagacgcaggcatcaacggccaggtccactattctttgggaaacttcaacaacttgtttagaatcacttccaacgggtctatttatactgctgtaaaactgaacagagaggttcgggattactacgagctcgtcgtagtggccactgatggtgctgtccatcctcgccattctaccctgacgctggcgattaaggtgctggacattgatgataactcccccgtgttcacaaattctacctataccgtactagtggaagagaatctgccagcggggaccactattctccagatcgaagctaaagacgtggatctgggcgccaacgtgagttataggattcggagtcctgaagtaaagcatttcttcgccctgcacccttttacaggagaactctccctcctgcggagtctcgattacgaagcgtttccagatcaggaggcgtctatcactttccttgtggaagcctttgatatctacggaactatgccccctgggatagctacagttacagttatagtgaaggatatgaatgattatccgcctgttttctcaaaacgcatctataaaggcatggtggctcccgacgccgtgaaaggaaccccaattactaccgtgtacgcagaagatgcagatcccccgggcctacctgcctcacgcgttagatatcgggtagatgacgtccagtttccttatccagcgagtattttcgaggtcgaagaggatagcgggcgagtcattactcgagtgaacctcaatgaagaaccaactaccattttcaaactagtggtggtggcctttgacgacggggagccagttatgagcagctccgctactgtgaaaatcctagtgctgcaccccggcgagatcccccggtttacacaggaagaatacagacctcctccagtgtcagagctggctactaaagggactatggtgggagttatttctgctgcagccatcaatcaatccatagtttactcaatagtgagcggcaatgaggaggacacgtttgggatcaataatattaccggcgttatttacgtcaatggcccattagactatgaaacccgtactagctatgtgctgagagtccaggccgactccctggaggtggtcctcgccaatcttcgggtgccaagtaagagcaatacagctaaagtgtatatcgaaattcaggatgagaataatcatccccctgtcttccagaagaaattctatatcggaggtgtaagcgaagatgcaaggatgtttaccagcgtgcttcgcgttaaagccaccgacaaggacaccggcaactactcggtgatggcttatagactgatcattccgcccataaaagaggggaaagagggctttgtcgttgagacttacaccggtctcatcaagacggccatgttattccacaatatgcgacgatcctacttcaagttccaggtaatcgctacagacgattacgggaaggggctcagcggcaaggctgacgtacttgtctctgtggtgaatcagcttgatatgcaggtgatagtgtccaacgtgcccccaactttggtcgagaaaaagatagaggatttgactgaaatcttggatagatacgtacaagagcaaatccctggtgccaaggttgtagtcgagtctataggggctcggagacatggggacgccttctctctcgaggattacaccaagtgtgatttgactgtgtatgccatcgacccacagactaacagagctattgaccggaacgaattgttcaaattcctggatggtaagctactcgacatcaataaagacttccagccttattacggggaggggggacgcattcttgagatacgcacccctgaagctgtcacctcaatcaagaaacggggggaaagcttgggatatacagaaggggcattgctcgcgttggcattcatcatcatcctgtgttgtatacctgcaatcctcgtggtccttgtttcatatcgccagttcaaggtacggcaagctgaatgtaccaagaccgcccgtatacaagctgcgcttcctgctgctaaaccagcagtgcctgcacccgcccccgtcgcagcacctccccctcccccacctcctcccccaggggctcacctttatgaggagctgggcgatagcagtatgcacaagtacgaaatgcctcagtatggttccaggaggaggctcctcccacccgcaggtcaagaagaatatggggaggtcgtgggggaagccgaggaggagtacgaggaggaagaagaagagcccaagaaaataaaaaagcctaaggtcgaaatcagagagccctccgaagaagaggaggttgtcgtaaccattgagaaacctcccgccgctgagcccacttacacaacttggaaacgagctcggatttttcccatgattttcaaaaaggtgagaggcctcgccgataagcgggggatcgtggacctggaaggtgaagagtggcagagacgcttggaagaagaagacaaagattatctcaagctcacactggaccaagaggaagctacagagagtacagtcgagtctgaagaggaatcctctagtgattacacagaatactctgaggaggagagtgaatttagcgaatcagagactactgaggaggagtctgagagcgaaacaccctccgaagaagaagagtctagcactcccgaaagtgaagaatccgagtcaacagagagtgagggcgaaaaggcccgaaaaaacattgttctggcaaggcgaagaccaatggtggaagaggttaaggaggtaaaagggaggaaagaggaacctcaggaagagcagaaagagcccaagatggaagaggaagagcacagtgaggaagaggagagtggacctgccccggtcgaggaatccacggatcccgaggcacaagatattcctgaagagggtagcgccgagagcgccagcgtggaagggggggtggaaagcgaggaggagagcgagtctggtagctcctcctctagttctgagtctcagtcgggtggcccgtggggctaccaggtgcccgcttacgaccgcagcaaaaatgcaaaccaaaagaagagcccaggagccaactccgaagggtacaataccgccttgtag

SEQ ID NO: 54598 - DNA, 5358 bp, Artificial Sequence
  derived and/or modified sequence
atgttccggcagttctacctgtggacctgcctggccagcggcatcatcctgggcagcctgtttgagatctgcctgggccagtatgatgatgactgcaagctggcccggggcggccccccagccaccatcgtggccattgatgaggagagcagaaatggcaccatcctggtggacaacatgctgatcaagggcacagctgggggccctgaccccaccatcgagctgagcctgaaggacaacgtggactactgggtgctgatggaccctgtgaagcagatgctgttcctgaacagcacaggccgggtgctggaccgggacccccccatgaacatccacagcatcgtggtgcaggtgcagtgcatcaacaagaaggtgggcaccatcatctaccacgaggtgagaattgtggtgcgggacagaaatgacaacagccccaccttcaagcatgagagctactatgccaccgtgaatgagctgacccctgtgggcaccaccatcttcaccggcttcagcggggacaacggggccacagacattgatgatggccccaacggccagattgaatatgtgatccagtacaacccagatgaccccaccagcaatgacacctttgagatccccctgatgctgactggaaacatcgtgctgaggaagaggctgaactatgaggacaagacccgctactttgtgatcatccaggccaatgaccgggcccagaacctgaatgaaagaaggaccaccaccaccaccctgactgtggatgtgctggatggagatgacctgggccccatgttcctgccctgtgtgctggtgcccaacacccgggactgccggcccctgacctaccaggccgccatccctgagctgcggaccccagaggagctgaaccccatcatcgtgaccccacccatccaggccatcgaccaggacaggaacatccagcccccaagtgaccggcccggcatcctgtacagcatcctggtgggcaccccagaggactacccccgcttcttccacatgcaccccaggacagctgagctgagcctgctggagcctgtgaacagagacttccaccagaagtttgacctggtgatcaaggccgagcaggacaatggccaccccctgcctgcctttgctggcctgcacatcgagatcctggatgagaacaaccagagcccctacttcaccatgcccagctaccagggctacatcctggagagcgcccctgtgggcgccaccatcagtgacagcctgaacctgaccagccccctgcgcatcgtggccctggacaaggacattgaagatgtgcccccatctggagtgcccaccaaggaccctgagctgcacctgttcctgaatgactacacctctgtgttcaccgtgacccagacaggcatcacccgctacctgaccctgctgcagcctgtggaccgggaggagcagcagacctacaccttcagcatcacagcctttgatggagtgcaggagagcgagcctgtgattgtgaacatccaggtgatggatgccaatgacaacacccccaccttccctgagatctcctatgatgtgtatgtgtacacagacatgaggcctggggacagcgtcatccagctgacagctgtggatgctgatgagggcagcaatggagagatcacctatgagatcctggtgggcgcccagggcgacttcatcatcaacaagaccaccggcctcatcaccatcgcccctggggtggagatgattgtgggccgcacctacgccctgactgtgcaggccgctgacaatgcccctcctgctgagaggaggaacagcatctgcaccgtgtacatcgaggtgctgccccccaacaaccagagccccccacgcttcccccagctgatgtacagcctggagatcagcgaggccatgagggtgggcgctgtgctgctgaacctgcaggccacagaccgggagggggacagcatcacctacgccattgaaaatggagacccccagagggtcttcaacctgtctgagaccaccggcatcctgaccctgggcaaggccctggaccgggagagcacagaccgctacatcctgatcatcacagccagtgatggccgcccagatggcaccagcacagccaccgtgaacatcgtggtgacagatgtgaatgacaatgcccctgtgtttgacccctacctgcccaggaacctgtctgtggtggaggaggaggccaatgcctttgtgggccaggtgaaggccacagatcctgatgctggcatcaatggccaggtgcactacagcctgggcaacttcaacaacctcttccgcatcaccagcaatggcagcatctacacagctgtgaagctgaaccgggaggtgcgggactactatgagctggtggtggtggccacagatggagctgtgcaccccaggcacagcaccctgaccctggccatcaaggtgctggacattgatgacaacagccctgtgttcaccaacagcacctacacagtgctggtggaggagaacctgcctgctggcaccaccatcctgcagatcgaggccaaggatgtggacctgggcgccaacgtgtcctaccgcatccgcagccctgaggtgaagcacttctttgccctgcaccccttcaccggggagctgagcctgctgcggagcctggactatgaggccttcccagaccaggaggccagcatcaccttcctggtggaggcctttgacatctacggcaccatgcctcctggcatcgccaccgtgaccgtcatcgtgaaggacatgaatgactacccacctgtgttcagcaagaggatctacaagggcatggtggccccagatgctgtgaagggcacccccatcaccaccgtgtatgcagaagatgctgaccccccaggcctgcctgccagccgggtgcgctacagagtggatgatgtgcagttcccctacccagccagcatctttgaggtggaggaggacagcggccgggtcatcaccagggtgaacctgaatgaggagcccaccaccatcttcaagctggtggtggtggcctttgatgatggagagcctgtgatgagcagcagcgccaccgtgaagatcctggtgctgcaccctggagagatcccccgcttcacccaggaggagtacagacctcctcctgtgtctgagctggccaccaagggcaccatggtgggcgtcatctctgctgctgccatcaaccagagcatcgtgtacagcatcgtgtctggaaatgaggaggacaccttcggcatcaacaacatcactggagtcatctacgtgaatggccccctggactatgagaccaggaccagctatgtgctgcgggtgcaggccgacagcctggaggtggtgctggccaacctgcgggtgcccagcaagagcaacacagccaaggtgtacatcgagatccaggatgagaacaaccacccccctgtgttccagaagaagttctacatcggcggcgtgtctgaagatgccaggatgttcacctctgtgctgcgggtgaaggccacagacaaggacaccggcaactacagcgtgatggcctaccgcctcatcatcccccccatcaaggagggcaaggagggctttgtggtggagacctacacaggcctcatcaagacagccatgctgttccacaacatgagaagaagctacttcaagttccaggtgattgccacagatgattatggcaagggcctgagcggcaaggcagatgtgctggtgtctgtggtgaaccagctggacatgcaggtgattgtgtccaatgtgccccccaccctggtggagaagaagattgaggacctgacagagatcctggacagatatgtgcaggagcagatccctggggccaaggtggtggtggagagcatcggggccaggagacatggagatgccttcagcctggaggactacaccaagtgtgacctgactgtgtatgccatcgacccccagaccaacagagccatcgacagaaatgaactcttcaagttcctggatggcaagctgctggacatcaacaaggacttccagccctactacggggagggcggccgcatcctggagatccgcaccccagaggccgtgaccagcatcaagaagagaggagagagcctgggctacacagagggcgccctgctggccctggccttcatcatcatcctgtgctgcatcccagccatcctggtggtgctggtgtcctaccggcagttcaaggtgcggcaggctgaatgtaccaagacagcccgcatccaggccgccctgcctgctgccaagccagctgtgcctgccccagcccctgtggccgcccctcctcctcctcctcctcctcctcctggggcccacctgtatgaggagctgggggacagctccatgcacaagtatgagatgccccagtatggcagcagaagaaggctgctgcccccagctggccaggaggagtatggagaggtggtgggggaggccgaggaggagtatgaggaggaggaggaggagcccaagaagatcaagaagcccaaggtggagatccgggagcccagcgaggaggaggaggtggtggtgaccatcgagaagcccccagctgctgagcccacctacaccacctggaagagggcccgcatcttccccatgatcttcaagaaggtgcggggcctggccgacaagaggggcatcgtggacctggagggggaggagtggcagaggcggctggaggaggaggacaaggactacctgaagctgaccctggaccaggaggaggccacagagagcacagtggagagcgaggaggagagcagcagtgactacacagagtacagcgaggaggagagcgagttcagcgagagcgagaccacagaggaggagagcgagagcgagacccccagcgaggaggaggagagcagcaccccagagagcgaggagagcgagagcacagagagcgagggggagaaggccaggaagaacatcgtgctggcccggcggcggcccatggtggaggaggtgaaggaggtgaagggcaggaaggaggagccccaggaggagcagaaggagcccaagatggaggaggaggagcacagcgaggaggaggagagcggccctgcccctgtggaggagagcacagatcctgaggcccaggacatccctgaggagggcagcgctgagagcgcctctgtggagggcggcgtggagagcgaggaggagagcgagagcggcagcagcagcagcagcagcgagagccagagcggcggcccctggggctaccaggtgcctgcctatgacaggagcaagaatgccaaccagaagaagagccctggggccaacagcgagggctacaacacagccctgtag

SEQ ID NO: 54599 - DNA, 5358 bp, Artificial Sequence
  derived and/or modified sequence
atgttccggcagttctacctgtggacctgcctggccagcggcatcatcctgggttctttatttgaaatctgccttgggcagtatgatgatgattgcaagttagctcgtggaggaccccccgctacaatcgtggcaatcgatgaggaatctcgcaatggaaccatcttagttgacaatatgctgatcaagggtactgccggtggccccgacccaaccattgaactgtcactcaaggacaacgtggactactgggtgcttatggatcccgtgaagcaaatgctgttcttaaacagcactgggcgcgtcctcgatcgagaccccccaatgaatatacactctattgtggtccaggtccagtgcattaacaagaaggtgggaaccatcatataccacgaggtgcggatagtggtgcgcgaccgcaacgacaacagtccaacatttaaacatgaaagttactacgctaccgtgaatgagctgactcccgtcggaactacaatttttacgggcttcagcggggataacggcgcaacagacatagatgacggtcctaacggacagatcgaatatgtcatccagtacaaccctgacgaccccacctctaatgataccttcgaaatcccgttgatgttaactggtaacatcgtgctccggaagagactgaactacgaggacaagacaagatactttgtgatcatccaggctaacgacagggcacagaatctgaacgagaggcggactaccaccaccaccttgacagttgatgtgttggatggcgacgacctcggcccgatgttcctcccctgcgtacttgttccaaacacgagggattgtcggccgcttacctaccaagccgccattcccgaattacggacaccagaagaattaaatcctatcatagtcacccctcccatccaggccattgatcaagaccggaacatccagccccccagcgataggcccggcatcctctactctattctggtgggtactcccgaggattatccacgattcttccatatgcaccctcggacagccgaactctctcttctcgagcctgtcaaccgagatttccatcagaagtttgacttagtgattaaggcagagcaggacaatggtcatccattgcccgcatttgccggcctacacatagagatattagatgagaacaatcagtctccctacttcactatgccctcctatcaggggtatatactggagagtgcgccagtgggagcaacgatctctgatagtctcaatctgacgtcaccactccgtatagtcgcacttgacaaagatatcgaagacgtgcccccgagtggcgtgcccacgaaggaccctgaacttcacctgtttcttaacgactatacctcggtgtttactgtcactcagaccgggattacgagatacctcactctgctccagcccgtggaccgggaagagcaacagacttacacattcagtatcacagccttcgacggtgtgcaggaaagcgagcccgttattgtgaacatccaggtaatggacgcaaatgataatacccccacttttccagagatatcctatgacgtgtatgtctacaccgacatgcgccccggggactcagtgattcagctgacagcggtggacgctgatgagggctctaatggggagatcacatatgagatcctcgtgggggctcagggcgacttcatcattaacaagacaacagggctcatcacaatcgctcccggggtcgaaatgatagttgggagaacctacgcgctgactgttcaggccgccgataatgccccgcccgcagagcggcgcaatagcatttgtacagtttatatcgaagtgcttcctccaaacaaccagagcccccctcgattcccacaactgatgtacagcctcgaaattagcgaagctatgcgggtaggggctgtgcttctaaatctccaggcaaccgacagggagggcgatagcatcacctacgccattgaaaatggcgatccccagagggtgttcaacttgtccgagacgactggaatcctgacacttgggaaagctcttgatcgcgagtcaacagatcggtacatcctcattataacagcctcagatgggcgcccagatggcacttcgactgccaccgtcaacatcgtcgttacggatgtgaacgataatgcacctgtattcgacccgtatttgcccaggaatctgagcgtcgtggaggaagaggcgaatgcgttcgtgggccaagtgaaggcaacagatcccgacgcaggcattaatgggcaagtgcattactccctgggaaatttcaacaatttgttccgcataacttccaacggctctatttacaccgccgtcaaacttaaccgggaagtgagagactactacgagctggtggttgtggcgactgatggtgccgtgcatcctcggcactctaccctgaccctggctatcaaggtcctggatatagacgacaatagtccggtgttcactaactctacatacaccgtgctcgtcgaggaaaacctgccagccggtactacaattctccagatcgaggctaaggacgtcgacctaggggcgaatgtatcctataggatccggagccctgaggtgaaacatttcttcgctctgcacccattcacaggtgaactctcactgctacgctctctggactacgaggcgtttcccgaccaggaagcctcaattacttttctcgttgaggcttttgacatttatggcactatgcctcctggcatcgctacagttaccgtgattgtcaaggatatgaacgactatcctcctgtgttctcaaaaagaatttataaaggaatggtggcgccagatgctgtcaagggaactcctattactacggtctacgcggaagacgcagacccacccggtttgcctgcctccagggttcggtaccgcgtggatgacgttcagtttccttatcccgcctcgatcttcgaagtcgaggaagacagcggcagggtcatcacaagggtgaacttgaatgaagagccaaccaccatttttaaattagttgtggtcgccttcgacgatggagaaccagtcatgtcgagcagcgcgactgttaagattctggtgctgcatcctggagagatcccccggtttacccaggaggaataccgacccccccccgtgtcggagctggctactaaagggacaatggtgggcgtcatcagtgcggccgccatcaaccagtcaatcgtgtactctattgtatcggggaatgaggaggatacctttggaattaacaacattaccggcgtcatctacgtgaatggacctttggactacgagaccaggacctcatatgtattaagggtgcaggccgactcactggaagtcgtgctggctaacctcagggtgccatcaaaaagcaacacggcgaaagtttatattgagattcaagatgagaataatcaccctcccgtgttccagaaaaaattttatattggcggcgtctctgaggatgcccgtatgttcacttccgttctcagggtgaaggcaacagacaaggataccgggaactatagtgtgatggcatacagactgattatccctcctataaaagaagggaaggagggtttcgtggtggaaacatacaccggcctgatcaaaacagctatgctgtttcacaatatgcggcggtcctattttaagttccaagtcattgcaaccgacgattacggaaagggcctcagcggcaaggctgatgtgctggtgtctgtggttaaccagctggatatgcaggtgatcgtgtctaatgttcctccgaccctggtggaaaagaaaatagaggacctgacagagattctggataggtatgttcaggagcagattcccggcgccaaagtagtcgtcgagtccatcggagccagacgacatggagacgcattcagcttagaggactatactaaatgcgaccttaccgtatacgccatagatccacagaccaatagagccattgaccggaatgaactcttcaagtttttagacggtaagttactagatataaacaaggatttccagccatactatggggagggcggacgcatcctggaaattcgcacaccagaggctgtgacaagcattaaaaagcgaggtgaatctctgggatacaccgagggcgcgcttctcgctctagcgttcatcattatcctgtgttgcatccccgccatcctggtagtcctggtcagctataggcagttcaaagttcgccaggctgaatgtacaaaaaccgcccgtattcaggctgcgcttcctgccgcgaagccggctgttccagcccccgcacctgtggccgctccaccacctccgccacctcctccacccggcgcccatctgtacgaagaactgggagattccagcatgcataagtatgagatgccacaatacggatctcggaggcggcttctccccccagcgggtcaggaagagtacggggaagtggtgggtgaagctgaagaggagtacgaagaggaggaagaagagcctaagaaaattaagaaacccaaagttgaaattagagagccctcagaggaggaagaagtagtggtaaccattgaaaagcccccagcggctgaacccacatatacaacatggaagcgcgctcgcatctttccaatgatcttcaaaaaagtgagaggcctagctgataagagggggatcgtagaccttgaaggggaagagtggcagcggcgattggaagaagaggacaaagactacctgaagttaactttagaccaggaggaagccactgaaagcaccgtggagagcgaggaggagtcctcctccgattacacggagtattcagaggaagaatcagagttctctgaaagcgagacgacagaagaggaaagtgaatctgagaccccaagcgaggaggaagagtcatccaccccagaaagtgaggagagcgaaagtacagaatctgagggtgagaaagcccggaagaatatcgtgttagccaggaggcggcctatggtggaggaggtcaaagaggtgaagggtagaaaggaggagccccaagaggaacaaaaggaaccaaagatggaggaggaggaacactcggaggaggaagagagcggacccgcccctgtcgaggagtctacagatcccgaagctcaagatatccctgaagagggctcggcggagtctgccagtgtggagggcggtgtggagtctgaagaagagagcgagtcgggttcttcctcatctagctccgagtctcagagtggcggaccatggggctatcaggtaccagcctacgacaggtctaagaacgcgaatcaaaagaaaagtccaggggccaacagtgagggatacaacacagctctttag

SEQ ID NO: 54600 - DNA, 5357 bp, Artificial Sequence
  derived and/or modified sequence
atgtttcgtcaattttatctgtggacttgcctggcctccgggataatcctcggaagcctgttcgaaatttgcttgggccagtacgacgacgactgcaaactcgccagggggggacctcccgcaacaattgttgcaatcgacgaggaatccaggaatggcactatcctggtagacaatatgcttattaagggaacagccggtggcccagacccaaccatcgaactgtctctcaaggacaatgtcgactactgggtcctcatggacccagtaaagcagatgttattcctgaactccacaggacgggtgctcgacagagaccccccaatgaacatacattcaattgtagtgcaggtgcaatgcattaacaaaaaggtggggactatcatttaccatgaggtacgcatagtggttcgagatagaaacgataacagtcctacctttaaacacgagtcttattacgccaccgtcaatgagctgacgcctgtcggcaccaccatcttcaccggattctccggcgacaatggagcaaccgatatcgacgatggaccaaacgggcagatcgagtacgttattcagtacaacccggatgaccctacctctaacgatacatttgagatacctctgatgctcactggcaacattgtgctcaggaaacggttaaactacgaggataaaaccaggtacttcgtgataatacaagccaatgatcgggctcagaacctcaatgagcgccgtactacaacaacaacattaacggttgatgtgctggatggggatgacctcggacccatgttcttaccgtgtgtgttggtgcctaataccagagattgcaggccactgacctaccaggcagctataccggagctcagaacccctgaggagctgaacccgataatcgtgacaccccctatccaagccattgatcaggatcgcaatattcagcctccttccgaccggccaggaattctgtattctatcctcgttggaaccccagaggactacccgcgttttttccacatgcaccccagaacagcggagctctctttgttagaaccagtgaatagggatttccaccagaagttcgatctcgtcattaaggcagagcaggacaatgggcatcccctgccggcatttgcaggcttgcatatcgaaattctagacgagaacaaccaatcaccctacttcaccatgcccagttatcaggggtacatcctggaaagcgctcctgtcggagccactattagtgattccttgaacctgaccagccccttgagaattgtagctcttgacaaagatatcgaggatgtcccgcctagtggcgttccaaccaaggaccccgaactgcacctcttcttaaacgactacaccagcgtgttcactgtcacccagaccggtattacaaggtatctgacacttctccagcccgtggaccgcgaggaacagcaaacctataccttttccattacggcctttgacggggtccaggaatcagagcccgtgatcgtcaatatacaggttatggatgccaatgacaacacacctacatttcccgaaatctcatacgacgtttacgtatatactgacatgagacctggtgattccgtgatccagctcacagctgtggatgccgatgagggcagtaacggagaaattacctatgagattctggtaggggcacaaggggattttattatcaacaagacaaccggactgatcaccatcgcaccaggggtcgagatgattgttggaagaacctacgcactgacagtgcaggctgccgataacgctcctcctgcagaacgacgaaacagcatctgcacagtctacattgaggtgttaccccctaataatcagtcacctccacggttcccccagctgatgtattcactggaaatcagtgaggctatgcgggtgggcgcagtgctgcttaatctgcaggccactgaccgtgaaggcgacagcattacctatgccatcgagaatggcgaccctcagagagtatttaatctgtccgagacaactgggatcctcactctaggcaaggccctggatagggagtccaccgaccgatacattctgattattacagcatccgacggaaggccagacggcacaagcacagcaacagtcaacatcgtcgttaccgatgtgaacgacaatgcccctgttttcgacccgtacctccctcgcaatctgtccgtcgtggaggaggaggcgaatgctttcgtcggacaagtcaaagctactgatccagacgctggaatcaacggtcaagtacactactcactgggcaattttaacaacctctttaggatcacatccaacggtagtatttatacagctgtgaagctgaatagagaggtccgtgattactacgagctggtagtcgtggccacagacggtgccgtccaccctagacactcaaccctcacattggcaatcaaggtgttggatatagatgacaattccccagtttttaccaattccacctacactgtgttggtggaggagaatcttcctgcagggacaactatcctgcagatcgaagccaaggacgtggaccttggtgccaatgtcagctacaggatccgctcaccagaggtaaagcacttctttgcattgcatccgttcaccggcgagctctctttactccgtagtctggattatgaggcattcccggatcaggaggcctctatcacctttctggtggaggctttcgatatctatggaaccatgccaccgggaatcgcaacagtgactgtgatcgtcaaggatatgaacgattacccgccagtgttttcgaagcggatttataaaggcatggtcgcccctgacgctgtgaagggtacacccatcacaaccgtatacgcggaagatgccgatccccctgggttacccgcttcccgtgtgcgctaccgagtcgacgacgtgcagttcccctaccctgcctccatatttgaagtggaagaggacagcgggagggtgatcactcgcgtgaatctaaatgaggaaccgaccacaatctttaagctggtggtcgtggccttcgacgatggcgagccagttatgtcatccagcgcaacagtcaaaatccttgtgttgcaccccggagaaattccacgtttcacgcaagaggagtatagacctccccctgtgtctgaactcgccactaagggtaccatggtcggagtgatctccgccgcagcgatcaatcagtccattgtatattccattgtgtcagggaatgaagaggacacttttgggatcaataatattacgggagtgatttatgttaacggacctctcgattatgaaactcggacgtcctacgttctgcgtgtgcaggccgactccctggaggtagtgctcgctaacctcagagtaccctcaaaaagcaataccgccaaagtgtatattgagatccaggacgaaaataaccatcctcccgtgtttcagaaaaagttctatatcggcggtgtctccgaagatgccaggatgttcactagcgtattgcgagtcaaggccaccgataaagacaccgggaactactctgtaatggcctatcgtctcatcatcccccctatcaaggagggcaaggaaggtttcgtggtggaaacttacacaggacttattaagacggcaatgctcttccataatatgagacggagttatttcaagttccaagtcatcgccactgatgactacgggaaggggttgtcaggcaaagccgatgtgctggtgagcgtggtgaaccaactggatatgcaggtgatcgtgagtaatgtaccccctactctggtcgagaaaaagatcgaggatctgacggagatactcgatcggtacgtgcaggaacagattccaggcgcaaaagtcgttgtggagagtatcggagcaagacgacacggtgacgcattttctcttgaagactacactaaatgcgaccttaccgtttatgctatcgatcctcagaccaaccgtgccatagaccgaaatgaactgttcaagtttttggacggcaaattgctggacataaataaggatttccaaccctattatggtgagggcggacgaatccttgagatcaggacccccgaggctgtgacctccattaagaagaggggggaaagtctgggatataccgagggcgcactgttagctctcgcctttatcattattctgtgttgtatcccagcgatcctcgtcgtgctggtctcatatcgacaattcaaagtacgtcaagcagagtgtaccaaaaccgccaggattcaggcagcgctacctgcggctaaacctgccgtacctgctcccgcaccagttgcagcccctccacctcctccccctccaccgcctggtgcacatctgtacgaagagttaggcgactcctctatgcataagtacgagatgccacagtatggctctaggcggagattgctcccaccagccggacaagaggaatacggtgaagtggttggtgaagcagaggaagaatatgaagaggaggaggaggagcccaagaagatcaaaaagcctaaagtcgaaatacgagagccgagcgaggaagaagaagtggtcgtgacaattgagaaacccccagcagctgagcccacatataccacttggaaacgggctcggatctttccaatgatttttaaaaaagtgcgcggattggctgacaaacggggaatcgtggacctggagggtgaagagtggcagagaagactggaagaagaagataaggactaccttaagctgacactggatcaggaggaggcgactgagtccacagtagagtctgaagaagaaagtagcagcgactacaccgagtactccgaagaggagtccgagttcagcgaatccgagacgacagaggaggaaagcgagagtgaaaccccctctgaggaggaggagtctagcactcccgaaagtgaggagtcagaatcaacagaatccgagggagaaaaggcgcgtaagaacatcgtgcttgctcgtcgaagaccgatggtagaggaggtgaaagaggttaaggggagaaaggaagaacctcaagaggagcagaaggagcctaaaatggaggaggaagaacattcagaagaagaggaatcaggccctgcccctgtcgaggaatccacggatccggaggcccaggacatccccgaagaaggttctgctgaaagcgctagcgtagagggcggtgtcgaatccgaagaggaatctgagtctggatcctctagctcttcatccgaatcccagtctgggggaccatggggctaccaggttccggcttacgacagatcaaaaaacgccaaccagaaaaaatctccgggagcgaattccgaaggctacaataccgcgctgta

SEQ ID NO: 54601 - DNA, 5862 bp, Artificial Sequence
  derived and/or modified sequence
caacgtgctgagctaatagcgacagatagagggcagacagattcctgctagcagcttagtgttagttgcttgtggtaactaaggcaggtggcatacatctcagaacgtggagaatgatggtatgctttctgagttaacatgttgaactgttttgcttttctaaaaattttcctagtaacattttcttgatgatatgagagtggatatcaatgcctcacagaaacaagaggtggaacatgtgaatgaatcgtcttggaactagattatgagcactggttctttttaaagggatgtgcaagaggcagccttggcaagaaaacttgctgcataatcttacatggactaaagatgaaactttaaaccgcaaatcagctttgagtgaactttgacagaagatgtttcgacagttttatctctggacatgtttagcttcagggatcatcctgggctctctctttgaaatctgcttgggccagtatgatgatgattgcaaactagctaggggaggaccaccagctaccatagttgctattgatgaagaaagtcggaatggtacaattctggtggacaacatgctgatcaaagggactgctggaggaccagaccccaccatagaactttctttaaaggataatgtggattactgggtgttgatggatcctgttaagcaaatgcttttcctgaacagcaccggaagagttctggatagagatccaccgatgaacatacactccattgtggtgcaggtccagtgcatcaacaaaaaagtgggcactattatctaccatgaagtgcgaatagtggtgagagacaggaatgacaactcacccactttcaagcatgaaagctactatgccacagtgaatgagctcactccagttggtaccacaatattcacaggattttcaggagacaatggagctacagatatagatgatggaccaaatggacagatagagtatgttattcagtataatccagatgatccgacatccaatgacacctttgaaattcccctaatgttgactggaaatatagtgttaaggaagaggctcaactatgaagataagactcgctactttgtcataatccaagctaatgaccgtgcccaaaatctgaatgagaggcgaaccaccaccaccactctcacagtggatgttctggatggagatgacttgggtccaatgtttcttccttgtgtccttgtgccaaacactcgtgattgccgtccactcacttatcaagctgccatacctgagttgagaactccggaagaactgaaccccattattgttacgccaccaatccaagccattgatcaggaccggaatattcaaccgccatcagataggccaggaatcctctattccatccttgttgggactcctgaggattacccacgatttttccatatgcatcctaggacagcagaacttagtctcctggagccagtaaacagagactttcaccagaaatttgatttggttattaaggctgaacaagacaatggtcatcctcttcctgcctttgccggtctacacattgaaatactggatgaaaacaatcaaagtccatattttacaatgcccagttatcaaggctatatcctggaatctgccccagtgggagcaaccatttcggacagtctcaatttgacttcacctttaagaatagtagctctggacaaggacatagaagatgttccacccagtggagttcctacaaaagacccagagcttcacctttttctgaatgactacacctcagtcttcaccgtcacacagactggtattactcgctacctcaccttacttcaaccagtggacagggaagaacagcaaacttacaccttttcgataacagcatttgatggtgtacaagaaagtgagccagtcatcgtcaatattcaagtgatggatgcaaatgataacacgccaaccttccctgaaatatcctatgatgtgtatgtttatacagacatgagacctggggacagtgtcatacagctcactgcagtcgacgcagacgaagggtcaaatggggagatcacatatgaaatccttgttggggctcagggagacttcatcatcaataaaacaacagggcttatcaccatcgctccaggggtggaaatgatagtcgggcggacttacgcactcacggtccaagcagcggataatgctcctcctgcagagcgaaggaactccatctgcactgtgtatattgaagtgcttccaccaaataatcaaagccctcctcgcttcccacagctgatgtatagccttgaaattagtgaagccatgagggttggtgctgttttattaaatctacaggcaactgatcgagagggagactcaataacatatgccattgagaatggagatcctcagagagtttttaatctttcagaaaccacggggattctaaccttagggaaagcactggacagggaaagcactgatcgctacattctgatcatcacagcttcagatggcaggccagatgggacctcaactgccacagtaaacatagtggtgacagatgtcaatgacaatgctccagtgtttgatccttatctgccaagaaatttatctgtggtggaagaagaagccaatgcctttgtgggtcaagtaaaagcaacagaccctgatgctggaataaatggtcaagtgcactacagtttgggtaactttaataatctttttcgtatcacatccaatgggagcatttacacagcagtgaagcttaacagagaagtcagggactactatgaacttgttgttgtggcaacagatggagcagtacaccctcgtcattcaactctaaccttggccatcaaggttttggacattgatgataacagtcctgtgttcaccaattcaacatacactgtccttgttgaagagaatttgccagctgggactaccatccttcaaatagaggccaaagatgtcgaccttggagcaaatgtgtcttaccggataagaagcccagaagtgaagcacttttttgcactacatccatttacaggagaactatcgcttttaaggagtttagattatgaggcatttccagaccaagaagcaagtatcacttttctggtagaggcctttgatatttatggaacaatgccacctggtattgctactgtcacagtgattgtaaaggatatgaatgattatcctcctgtctttagtaaacgaatatacaaagggatggtggctccggatgcagtcaagggtacacctatcacaacagtttatgctgaagatgcagaccctcctggattacctgcaagtcgtgtgaggtatagagtagatgatgtacagtttccttaccctgccagtatttttgaagtggaagaagattctggaagagtaataacacgagtcaatcttaatgaagaacctacaacaatttttaagttggtggtggttgcttttgatgatggggagcctgtgatgtccagcagtgccacagtgaagattcttgtcttacatcctggtgagatcccacgcttcacacaggaggaatatagacctcctccagtaagtgaacttgccaccaaagggaccatggttggtgtaatttctgctgctgccattaatcaaagtattgtgtactccattgtttcaggaaatgaagaagatacatttggaattaataacatcacaggtgttatctatgtgaatggacctctggattatgagaccaggacaagctatgtacttcgagtccaagctgattccctggaagtggtccttgccaatctccgagttccttcaaaaagcaatacagctaaagtatacattgagattcaggatgaaaataatcatcccccagtgtttcagaaaaaattctacatcggaggtgtatctgaagatgcaagaatgtttacttctgtactcagagtgaaggctactgataaagatactggcaattatagtgtcatggcctacagactcataataccaccaattaaagagggaaaagaaggatttgtagtggaaacatatacagggcttatcaaaactgctatgctcttccataatatgaggagatcctacttcaagtttcaagttattgcaactgacgactatgggaagggactgagcggcaaagccgatgtactcgtctccgtggtcaatcagctggatatgcaagtcattgtttccaatgtgcctcctactctagtggaaaaaaagatagaagatcttacagagatcttggatcgctatgttcaggaacaaattcctggtgccaaggtcgtagtggagtccattggagctcgccggcatggagatgccttttccctagaagattacaccaaatgtgacttgactgtctatgcaattgacccccaaaccaacagagccatcgatagaaatgagctttttaaatttttggatggcaaactacttgatatcaataaagactttcagccgtattatggggaaggaggacgcattctggagatccggactccagaggcagtgaccagcattaaaaagagaggagaaagtctaggatacacagaaggggccttgttggctctggccttcatcatcatcctctgctgcattcctgccatcttggtggttttggtcagctacagacagtttaaagtacgtcaagctgagtgtacaaagactgcacgaattcaggccgcattacccgcggctaaaccagcagtgccggctcctgcaccagtggcagcgcccccgccgccgccgccgcctccgccaggtgcgcatctctatgaagaacttggagacagctcaatgcataagtatgaaatgcctcaatatgggagtcgccgtcgattgttaccaccagctggacaggaggaatatggtgaggtggttggtgaagctgaggaagaatatgaggaggaagaggaagagccaaagaaaattaaaaaaccaaaggttgaaattagagagcctagtgaggaggaagaagtagttgtaactatcgaaaaaccaccagcagctgagcctacatacacaacatggaagagagccagaatattccccatgatttttaagaaagttagaggattagctgataaaagaggaatcgttgaccttgagggtgaagagtggcagagacgccttgaggaagaagataaagattatttgaaactcactctggaccaagaggaagcaacagaaagcactgtagaatcagaggaggaatcctccagcgactatactgaatacagtgaagaagagtctgagttcagtgagtctgagactacagaagaggaatctgagtcagagacaccctctgaggaggaggagagttccacccctgaatcagaagaatcggaatccacagagtcagaaggagaaaaagcaaggaaaaacattgtgcttgcaagaagaaggcccatggttgaggaggtcaaggaagtcaagggtaggaaagaggagccacaagaagaacaaaaagaacctaagatggaagaagaagaacactcagaagaagaagaaagtggaccagcccctgtggaagaaagtacagaccctgaagctcaagatatccctgaagagggcagtgcagaatcagcttcggtggaaggaggtgtggaaagtgaggaggaatcagaatcaggtagtagtagcagtagtagcgaaagtcagtctggaggtccatggggctatcaggtaccagcgtatgacagaagcaagaatgcaaaccaaaagaagtcgccaggagcaaactctgaaggttacaacacagcactttgaaagagatcacagtaggtggaagttttgctgtgatgagtgctctcgtgtgcagtgccttctgtgtgttctccaaagtgacacttgaaagggaggaaattgatcaagattt

SEQ ID NO: 54602 - DNA, 5358 bp, Artificial Sequence
  derived and/or modified sequence
atgttcagacagttctacctgtggacctgcctggccagcggcatcatcctgggcagcctgttcgagatctgcctgggccagtacgacgacgactgcaagctggccagaggcggcccccccgccaccatcgtggccatcgacgaggagagcagaaacggcaccatcctggtggacaacatgctgatcaagggcaccgccggcggccccgaccccaccatcgagctgagcctgaaggacaacgtggactactgggtgctgatggaccccgtgaagcagatgctgttcctgaacagcaccggcagagtgctggacagagacccccccatgaacatccacagcatcgtggtgcaggtgcagtgcatcaacaagaaggtgggcaccatcatctaccacgaggtgagaatcgtggtgagagacagaaacgacaacagccccaccttcaagcacgagagctactacgccaccgtgaacgagctgacccccgtgggcaccaccatcttcaccggcttcagcggcgacaacggcgccaccgacatcgacgacggccccaacggccagatcgagtacgtgatccagtacaaccccgacgaccccaccagcaacgacaccttcgagatccccctgatgctgaccggcaacatcgtgctgagaaagagactgaactacgaggacaagaccagatacttcgtgatcatccaggccaacgacagagcccagaacctgaacgagagaagaaccaccaccaccaccctgaccgtggacgtgctggacggcgacgacctgggccccatgttcctgccctgcgtgctggtgcccaacaccagagactgcagacccctgacctaccaggccgccatccccgagctgagaacccccgaggagctgaaccccatcatcgtgaccccccccatccaggccatcgaccaggacagaaacatccagccccccagcgacagacccggcatcctgtacagcatcctggtgggcacccccgaggactaccccagattcttccacatgcaccccagaaccgccgagctgagcctgctggagcccgtgaacagagacttccaccagaagttcgacctggtgatcaaggccgagcaggacaacggccaccccctgcccgccttcgccggcctgcacatcgagatcctggacgagaacaaccagagcccctacttcaccatgcccagctaccagggctacatcctggagagcgcccccgtgggcgccaccatcagcgacagcctgaacctgaccagccccctgagaatcgtggccctggacaaggacatcgaggacgtgccccccagcggcgtgcccaccaaggaccccgagctgcacctgttcctgaacgactacaccagcgtgttcaccgtgacccagaccggcatcaccagatacctgaccctgctgcagcccgtggacagagaggagcagcagacctacaccttcagcatcaccgccttcgacggcgtgcaggagagcgagcccgtgatcgtgaacatccaggtgatggacgccaacgacaacacccccaccttccccgagatcagctacgacgtgtacgtgtacaccgacatgagacccggcgacagcgtgatccagctgaccgccgtggacgccgacgagggcagcaacggcgagatcacctacgagatcctggtgggcgcccagggcgacttcatcatcaacaagaccaccggcctgatcaccatcgcccccggcgtggagatgatcgtgggcagaacctacgccctgaccgtgcaggccgccgacaacgccccccccgccgagagaagaaacagcatctgcaccgtgtacatcgaggtgctgccccccaacaaccagagcccccccagattcccccagctgatgtacagcctggagatcagcgaggccatgagagtgggcgccgtgctgctgaacctgcaggccaccgacagagagggcgacagcatcacctacgccatcgagaacggcgacccccagagagtgttcaacctgagcgagaccaccggcatcctgaccctgggcaaggccctggacagagagagcaccgacagatacatcctgatcatcaccgccagcgacggcagacccgacggcaccagcaccgccaccgtgaacatcgtggtgaccgacgtgaacgacaacgcccccgtgttcgacccctacctgcccagaaacctgagcgtggtggaggaggaggccaacgccttcgtgggccaggtgaaggccaccgaccccgacgccggcatcaacggccaggtgcactacagcctgggcaacttcaacaacctgttcagaatcaccagcaacggcagcatctacaccgccgtgaagctgaacagagaggtgagagactactacgagctggtggtggtggccaccgacggcgccgtgcaccccagacacagcaccctgaccctggccatcaaggtgctggacatcgacgacaacagccccgtgttcaccaacagcacctacaccgtgctggtggaggagaacctgcccgccggcaccaccatcctgcagatcgaggccaaggacgtggacctgggcgccaacgtgagctacagaatcagaagccccgaggtgaagcacttcttcgccctgcaccccttcaccggcgagctgagcctgctgagaagcctggactacgaggccttccccgaccaggaggccagcatcaccttcctggtggaggccttcgacatctacggcaccatgccccccggcatcgccaccgtgaccgtgatcgtgaaggacatgaacgactacccccccgtgttcagcaagagaatctacaagggcatggtggcccccgacgccgtgaagggcacccccatcaccaccgtgtacgccgaggacgccgacccccccggcctgcccgccagcagagtgagatacagagtggacgacgtgcagttcccctaccccgccagcatcttcgaggtggaggaggacagcggcagagtgatcaccagagtgaacctgaacgaggagcccaccaccatcttcaagctggtggtggtggccttcgacgacggcgagcccgtgatgagcagcagcgccaccgtgaagatcctggtgctgcaccccggcgagatccccagattcacccaggaggagtacagacccccccccgtgagcgagctggccaccaagggcaccatggtgggcgtgatcagcgccgccgccatcaaccagagcatcgtgtacagcatcgtgagcggcaacgaggaggacaccttcggcatcaacaacatcaccggcgtgatctacgtgaacggccccctggactacgagaccagaaccagctacgtgctgagagtgcaggccgacagcctggaggtggtgctggccaacctgagagtgcccagcaagagcaacaccgccaaggtgtacatcgagatccaggacgagaacaaccacccccccgtgttccagaagaagttctacatcggcggcgtgagcgaggacgccagaatgttcaccagcgtgctgagagtgaaggccaccgacaaggacaccggcaactacagcgtgatggcctacagactgatcatcccccccatcaaggagggcaaggagggcttcgtggtggagacctacaccggcctgatcaagaccgccatgctgttccacaacatgagaagaagctacttcaagttccaggtgatcgccaccgacgactacggcaagggcctgagcggcaaggccgacgtgctggtgagcgtggtgaaccagctggacatgcaggtgatcgtgagcaacgtgccccccaccctggtggagaagaagatcgaggacctgaccgagatcctggacagatacgtgcaggagcagatccccggcgccaaggtggtggtggagagcatcggcgccagaagacacggcgacgccttcagcctggaggactacaccaagtgcgacctgaccgtgtacgccatcgacccccagaccaacagagccatcgacagaaacgagctgttcaagttcctggacggcaagctgctggacatcaacaaggacttccagccctactacggcgagggcggcagaatcctggagatcagaacccccgaggccgtgaccagcatcaagaagagaggcgagagcctgggctacaccgagggcgccctgctggccctggccttcatcatcatcctgtgctgcatccccgccatcctggtggtgctggtgagctacagacagttcaaggtgagacaggccgagtgcaccaagaccgccagaatccaggccgccctgcccgccgccaagcccgccgtgcccgcccccgcccccgtggccgcccccccccccccccccccccccccccccggcgcccacctgtacgaggagctgggcgacagcagcatgcacaagtacgagatgccccagtacggcagcagaagaagactgctgccccccgccggccaggaggagtacggcgaggtggtgggcgaggccgaggaggagtacgaggaggaggaggaggagcccaagaagatcaagaagcccaaggtggagatcagagagcccagcgaggaggaggaggtggtggtgaccatcgagaagccccccgccgccgagcccacctacaccacctggaagagagccagaatcttccccatgatcttcaagaaggtgagaggcctggccgacaagagaggcatcgtggacctggagggcgaggagtggcagagaagactggaggaggaggacaaggactacctgaagctgaccctggaccaggaggaggccaccgagagcaccgtggagagcgaggaggagagcagcagcgactacaccgagtacagcgaggaggagagcgagttcagcgagagcgagaccaccgaggaggagagcgagagcgagacccccagcgaggaggaggagagcagcacccccgagagcgaggagagcgagagcaccgagagcgagggcgagaaggccagaaagaacatcgtgctggccagaagaagacccatggtggaggaggtgaaggaggtgaagggcagaaaggaggagccccaggaggagcagaaggagcccaagatggaggaggaggagcacagcgaggaggaggagagcggccccgcccccgtggaggagagcaccgaccccgaggcccaggacatccccgaggagggcagcgccgagagcgccagcgtggagggcggcgtggagagcgaggaggagagcgagagcggcagcagcagcagcagcagcgagagccagagcggcggcccctggggctaccaggtgcccgcctacgacagaagcaagaacgccaaccagaagaagagccccggcgccaacagcgagggctacaacaccgccctgtag

SEQ ID NO: 54603 - protein, 1539 aa, Artificial Sequence
  derived and/or modified sequence
MFRQFYLWTCLASGIILGSLFEICLGQYDDDCKLARGGPPATIVAIDEESRNGTILVDNMLIKGTAGGPDPTIELSLKDNVDYWVLMDPVKQMLFLNSTGRVLDRDPPMNIHSIVVQVQCINKKVGTIIYHEVRIVVRDRNDNSPTFKHESYYATVNELTPVGTTIFTGFSGDNGATDIDDGPNGQIEYVIQYNPDDPTSNDTFEIPLMLTGNIVLRKRLNYEDKTRYFVIIQANDRAQNLNERRTTTTTLTVDVLDGDDLGPMFLPCVLVPNTRDCRPLTYQAAIPELRTPEELNPIIVTPPIQAIDQDRNIQPPSDRPGILYSILVGTPEDYPRFFHMHPRTAELSLLEPVNRDFHQKFDLVIKAEQDNGHPLPAFAGLHIEILDENNQSPYFTMPSYQGYILESAPVGATISDSLNLTSPLRIVALDKDIEDTKDPELHLFLNDYTSVFTVTQTGITRYLTLLQPVDREEQQTYTFSITAFDGVQESEPVIVNIQVMDANDNTPTFPEISYDVYVYTDMRPGDSVIQLTAVDADEGSNGEITYEILVGAQGDFIINKTTGLITIAPGVEMIVGRTYALTVQAADNAPPAERRNSICTVYIEVLPPNNQSPPRFPQLMYSLEISEAMRVGAVLLNLQATDREGDSITYAIENGDPQRVFNLSETTGILTLGKALDRESTDRYILIITASDGRPDGTSTATVNIVVTDVNDNAPVFDPYLPRNLSVVEEEANAFVGQVKATDPDAGINGQVHYSLGNFNNLFRITSNGSIYTAVKLNREVRDYYELVVVATDGAVHPRHSTLTLAIKVLDIDDNSPVFTNSTYTVLVEENLPAGTTILQIEAKDVDLGANVSYRIRSPEVKHFFALHPFTGELSLLRSLDYEAFPDQEASITFLVEAFDIYGTMPPGIATVTVIVKDMNDYPPVFSKRIYKGMVAPDAVKGTPITTVYAEDADPPGLPASRVRYRVDDVQFPYPASIFEVEEDSGRVITRVNLNEEPTTIFKLVVVAFDDGEPVMSSSATVKILVLHPGEIPRFTQEEYRPPPVSELATKGTMVGVISAAAINQSIVYSIVSGNEEDTFGINNITGVIYVNGPLDYETRTSYVLRVQADSLEVVLANLRVPSKSNTAKVYIEIQDENNHPPVFQKKFYIGGVSEDARMFTSVLRVKATDKDTGNYSVMAYRLIIPPIKEGKEGFVVETYTGLIKTAMLFHNMRRSYFKFQVIATDDYGKGLSGKADVLVSVVNQLDMQVIVSNVPPTLVEKKIEDLTEILDRYVQEQIPGAKVVVESIGARRHGDAFSLEDYTKCDLTVYAIDPQTNRAIDRNELFKFLDGKLLDINKDFQPYYGEGGRILEIRTPEAVTSIKKRGESLGYTEGALLALAFIIILCCIPAILVVLVSYRQFKVRQAECTKTARIQAALPAAKPAVPAPAPVAAPPPPPPPPPGAHLYEELGDSSMHKNYPWSLELILARNMDKIITVMSMGMKCLNMGVAVDCYHQLDRRNMVRWLVKLRKNMRRKRKSQRKLKNQRLKLESLVRRKK

SEQ ID NO: 54604 - protein, 1150 aa, Artificial Sequence
  derived and/or modified sequence
MPSYQGYILESAPVGATISDSLNLTSPLRIVALDKDIEDVPPSGVPTKDPELHLFLNDYTSVFTVTQTGITRYLTLLQPVDREEQQTYTFSITAFDGVQESEPVIVNIQVMDANDNTPTFPEISYDVYVYTDMRPGDSVIQLTAVDADEGSNGEITYEILVGAQGDFIINKTTGLITIAPGVEMIVGRTYALTVQAADNAPPAERRNSICTVYIEVLPPNNQSPPRFPQLMYSLEISEAMRVGAVLLNLQATDREGDSITYAIENGDPQRVFNLSETTGILTLGKALDRESTDRYILIITASDGRPDGTSTATVNIVVTDVNDNAPVFDPYLPRNLSVVEEEANAFVGQVKATDPDAGINGQVHYSLGNFNNLFRITSNGSIYTAVKLNREVRDYYELVVVATDGAVHPRHSTLTLAIKVLDIDDNSPVFTNSTYTVLVEENLPAGTTILQIEAKDVDLGANVSYRIRSPEVKHFFALHPFTGELSLLRSLDYEAFPDQEASITFLVEAFDIYGTMPPGIATVTVIVKDMNDYPPVFSKRIYKGMVAPDAVKGTPITTVYAEDADPPGLPASRVRYRVDDVQFPYPASIFEVEEDSGRVITRVNLNEEPTTIFKLVVVAFDDGEPVMSSSATVKILVLHPGEIPRFTQEEYRPPPVSELATKGTMVGVISAAAINQSIVYSIVSGNEEDTFGINNITGVIYVNGPLDYETRTSYVLRVQADSLEVVLANLRVPSKSNTAKVYIEIQDENNHPPVFQKKFYIGGVSEDARMFTSVLRVKATDKDTGNYSVMAYRLIIPPIKEGKEGFVVETYTGLIKTAMLFHNMRRSYFKFQVIATDDYGKGLSGKADVLVSVVNQLDMQVIVSNVPPTLVEKKIEDLTEILDRYVQEQIPGAKVVVESIGARRHGDAFSLEDYTKCDLTVYAIDPQTNRAIDRNELFKFLDGKLLDINKDFQPYYGEGGRILEIRTPEAVTSIKKRGESLGYTEGALLALAFIIILCCIPAILVVLVSYRQFKVRQAECTKTARIQAALPAAKPAVPAPAPVAAPPPPPPPPPGAHLYEELGDSSMHKNYPWSLELILARNMDKIITVMSMGMKCLNMGVAVDCYHQLDRRNMVRWLVKLRKNMRRKRKSQRKLKNQRLKLESLVRRKK

SEQ ID NO: 54605 - DNA, 315 bp, Artificial Sequence
  derived and/or modified sequence
atgggcctgggcgaccggcggggccggcggcgggccagcgccagcgcagccttccgaacggcttcctcgagtagctgcaattgtagtcgatgcagctccgccgacacaagatcttccacctcgattcctctcgtgcctgataagctgtcttctggaaggcgcggatcagcaggctgccgcgctactcaagaacttcagtgtcctaggggaccgagccggctccctggatccaagcgaggggcttctcatgctccattcttgtcacggtacctggggcttgggcaccttgatatgtctcagggccgcggcctatag

SEQ ID NO: 54606 - DNA, 4620 bp, Artificial Sequence
  derived and/or modified sequence
atgtttcggcagttctacctgtggacttgtttggctagcggaataatcctgggatccctgtttgaaatttgtctcgggcagtatgatgacgactgcaagctggcccgtggcggccctccagcaacaatcgtcgccattgacgaagaatcacgaaatggcacgattcttgtagacaatatgctcatcaaaggtacggctggaggaccagaccccacgatagaactctcactcaaggataatgtggactattgggtgcttatggatcctgtaaagcagatgctttttctcaatagtaccgggagggttctcgacagggaccctccgatgaatattcactccattgttgttcaggtgcaatgcataaacaagaaagtggggacgatcatctaccacgaggtccgcatcgtggtgagagataggaatgataatagtcccacctttaagcatgagagttactatgctaccgtgaacgagctgacacccgtcggtaccaccatcttcacaggtttcagcggtgacaacggggctacagacatagatgacgggcctaatggccaaattgaatacgttatccagtacaacccggatgatccaacttccaacgacacttttgagatccccctaatgctcacggggaatatcgtactgcgaaagcgcctcaattatgaagataaaacaagatactttgtgataatccaggcaaacgacagggcacagaacctcaatgaaagacggacaaccacgactacattaaccgtggatgtactggatggcgatgacctcggccccatgttcctgccatgcgtgttggtgcccaatacccgcgattgccgccccctcacttaccaggccgccattcccgaactgaggacaccagaagagctgaatcctatcattgtgacacctcctattcaggccatcgatcaggatcgcaacattcagcctccatctgacagacctggaattctgtatagtatattagtgggaacacctgaagactatccccggttctttcacatgcaccctcggactgccgagctctcattgctggagccagtcaaccgcgattttcaccagaagttcgacctcgtcattaaggcggagcaggataacgggcacccattacctgcttttgccggcctccacattgaaattctggatgagaataaccagtcaccctattttaccatgccaagctaccaggggtatatcctagaatctgcacccgttggcgccaccatctctgattctctcaacttgactagtcccttacggatcgtggctctcgataaggacatcgaagacacaaaggatccagagctgcacctgttcctcaatgactacacatctgtctttaccgttacccagaccgggatcactcggtacctcaccctcctccagccagtggacagagaggagcagcaaacctacacattcagtattacagcctttgatggcgtgcaggagtctgagcctgtcattgtgaacatccaggtaatggatgccaatgataataccccgacatttcccgaaataagttacgatgtgtacgtctacacagacatgaggcccggcgatagcgtaatccaattgaccgctgttgatgccgatgagggaagtaatggggagattacgtacgaaatcttggtgggagcccagggggactttattatcaataagacaactggcctgatcactattgcccccggagtagagatgattgtggggcgaacctacgctcttactgtgcaggccgcggataacgcacccccggcagaacggcgcaattcaatttgcaccgtgtatattgaggtactccctccaaataaccagtccccgcctcgatttccccagctgatgtattccctggaaatttccgaagccatgagggtgggggcggttcttttgaatcttcaggcaacagaccgcgagggcgactcaatcacttacgccatcgagaatggcgacccgcaaagagttttcaacctcagcgagactaccgggatactgacgctgggaaaggctctagatcgcgaaagcactgaccgttatattctcataattacagcttcagacggccggcccgacggcacttccacagctacagtgaatatagttgtcaccgacgtgaacgataacgcccccgtgttcgacccctaccttccaagaaacctctcagtcgtggaggaggaggccaacgcattcgtcggacaagtgaaggcaaccgatccagatgccggaattaatggacaggtgcactacagcctcggtaacttcaacaatttgtttcgcattacttctaacggaagcatctacacagctgttaagctcaatcgcgaggtcagagactattacgaactggtcgttgtggcaactgatggtgcagttcacccccgacacagcactcttaccctggcgattaaggttctggacatagatgacaattcaccggtcttcacaaactccacctatacagtgttagtggaggagaatctgccagctggaaccacaatcctgcagattgaagcaaaggatgtcgatctgggggccaacgtatcttaccggattagaagccctgaggttaagcacttcttcgccttgcatccgttcaccggggagctgtctctgctgcgtagtctggactatgaggcctttccagatcaggaggcctccataacattccttgtggaagcattcgacatatacggcacgatgccacccggaatagcaactgtaactgtaatagtgaaggacatgaatgactatccacccgtattctccaagagaatatataagggcatggttgccccagatgccgtcaaagggacgcctatcaccactgtctacgccgaggatgcagatcctcccgggttacctgcgtctcgggtccgatacagggtggacgatgtgcagttcccttatcctgcctccattttcgaagtcgaagaagactctggtagggtgataacccgggtgaatctgaatgaagagcccactaccattttcaaactggtggtggtggcctttgatgacggagagccagtgatgtctagcagtgccaccgtgaagatccttgtgctccatcccggggaaatccctaggtttacccaggaggagtataggcccccaccggtttccgagcttgctactaaaggtacgatggtgggcgttatctccgctgcagccatcaaccaatccattgtatactctatcgtgagtgggaacgaagaagacacattcggaattaacaacataaccggcgtgatctatgtgaacggccctttagactatgagactcggacctcctacgtgctcagggttcaggccgattcactggaagtggttctggctaacttgagagtgccgagcaagagcaacacagccaaagtatacattgagatccaagatgagaacaaccaccccccagtttttcagaaaaaattttatataggaggcgtttcagaggatgcccgcatgttcacttctgtgttacgggtgaaggcgactgacaaggataccgggaactactccgtaatggcttacagacttattatccctcccattaaagagggcaaggaggggtttgtggtcgaaacttacactgggctcatcaaaactgccatgctcttccataatatgagacgaagttactttaagtttcaggttattgccacagacgactatggcaagggcttatctggaaaggcagacgtgttggtctccgtggtgaatcaattggacatgcaggttatagtttctaatgtgccacctaccctggtggaaaaaaaaatcgaagatctaaccgagatactcgaccgatacgtgcaggagcagatacctggtgctaaagtggtggttgagtcaattggagcaagacgccatggagatgctttcagcctcgaagattacaccaagtgcgacctcactgtgtatgcaatcgacccgcagaccaacagggcaattgaccgtaatgaactgttcaagtttcttgatggtaaactgctagatattaataaagattttcagccttactatggggagggcggacgcattctcgaaattaggaccccagaggcagtcaccagcatcaaaaaaagaggcgagagtctgggctataccgaaggagctttgcttgctttggcctttatcatcatcctgtgctgtatccccgccatacttgtggtactggtcagctataggcagtttaaggtgcgccaggccgagtgcaccaagacagctcgcattcaggccgcccttccagctgcgaaaccagcggttcctgctccagctccagttgccgcacctcctccaccccctccccccccacccggagctcatttgtatgaagaactgggggacagttccatgcataagaattatccctggtccctcgaactcatcctggcacgcaatatggataagattattaccgtaatgagcatggggatgaagtgcctgaatatgggggtggcggtcgattgctaccaccaactggaccgccggaatatggtccggtggctggtgaagctcaggaagaatatgagacgtaagagaaaaagtcagaggaagctgaagaaccagaggctgaaacttgagtctctggtccgcaggaaaaaatag

SEQ ID NO: 54607 - DNA, 2160 bp, Artificial Sequence
  derived and/or modified sequence
atgtttagacaattctatctttggacttgtctcgcgtccggcatcattctcggatctttgtttgagatttgccttggccagtatgatgatgactgtaaactcgccaggggcgggcccccagctactattgtggcaatcgacgaggaatcccgtaatgggactatcttagtcgataacatgttgataaaggggacagcaggaggaccagatccgactatcgagcttagcctgaaagataatgtcgattattgggtgcttatggaccctgtgaaacaaatgctgtttttgaactcaactggcagggttctggacagagatcctcctatgaatatccacagcatcgtagtccaggtgcagtgtatcaacaagaaggtgggtaccatcatctatcatgaagtgaggatcgtcgtcagagatagaaatgacaacagtcctacttttaaacatgagtcttactatgccacagttaacgagttgaccccagtcggaaccacgatcttcacaggcttctctggcgataatggcgccacggacattgacgatggtcccaatggacagatcgaatacgtgatccagtataacccggacgatccaactagcaacgacaccttcgaaatacctctgatgctcacgggcaatatagttctccgtaagagattgaattatgaagacaaaactcgctacttcgttattattcaagccaatgatcgcgcccagaatttgaacgagagaaggactacaacaactactctgactgtcgacgtgttggacggcgacgaccttgggcccatgttccttccctgcgttctcgtgcccaacacgcgggattgtagacccctgacttatcaggcggcaatcccagaactgcgcactccagaggagctcaaccccataatcgtcactcccccaatccaggctatcgatcaagatcggaacattcagcctccatcggatcgccccgggatcctctactcaatactcgttggaacccctgaggattacccaaggttcttccatatgcaccctcggacagctgagctaagcctcctagagcctgtcaaccgcgacttccaccaaaagtttgatctggttattaaagcagaacaggacaatggtcaccccttgcccgcctttgcgggactgcacatcgagatcctcgacgagaataatcagtctccatacttcacgatgccctcctatcaaggatacatactggagtctgcgcccgtcggagcaaccatctccgattcactgaacctgactagcccactaagaattgtggcgctcgataaggacatcgaagatgaagaacccaagaagattaagaagcctaaagtagaaatccgcgaaccatccgaggaggaagaagtcgttgtcaccatagaaaagccacccgccgctgaacccacatacacgacctggaagcgagcgcgaatcttccccatgatcttcaaaaaagtgagggggctggctgacaagaggggaattgtggacctggagggcgaggagtggcaacgacgcctggaggaagaggataaggactatcttaaattgactctggatcaagaggaagcaaccgagtccaccgtagagagcgaggaggagagtagctccgactacaccgaatattctgaggaggaaagtgagttctctgaaagcgagacgaccgaggaggagtctgaaagcgagacaccatccgaagaggaggaatctagcacccccgagtcagaggagagtgaaagtactgagtcagaaggcgaaaaggcaaggaaaaacattgttctagcccggcgtagaccaatggtggaagaggtaaaggaggtaaagggccgcaaagaggaacctcaggaagagcagaaggaacccaaaatggaggaagaagaacattcagaggaagaagaaagcggtcctgccccagtcgaggagtcaactgaccctgaggcccaggatatacctgaagaagggtcggccgagtcagctagcgttgagggaggcgtagaatccgaagaggaaagcgaatctggcagctcgtcaagttccagtgaatcccagtcaggcggcccctggggttatcaggtgccggcgtacgatagaagcaaaaatgcaaaccagaagaagagccctggtgctaactctgagggctataacactgcattgtag

SEQ ID NO: 54608 - DNA, 1953 bp, Artificial Sequence
  derived and/or modified sequence
atgtttaggcagttctacttgtggacttgtcttgcctctggaataattctgggtagtctgtttgaaatttgccttgggcagtacgatgatgattgcaagcttgctcgcggtggtccccctgccactatcgtagccatcgatgaggagagcagaaacggtaccattttagtggataatatgcttatcaagggcactgcgggaggccccgaccccactatcgagctgtcactcaaagacaacgtcgattattgggtactgatggacccagtgaaacaaatgctgttcttgaacagcactggcagggttttagacagggaccctcccatgaacattcatagtattgtggtgcaagtgcaatgtattaacaaaaaggtggggactattatctatcatgaagtgcgaatagttgtgcgcgatcgtaatgataactctcctaccttcaagcatgagtcgtactatgctaccgtgaacgagcttacccctgtcggtacaaccatattcactggcttcagcggggacaacggggctactgatatcgatgatgggcccaatgggcaaatcgagtacgtgattcaatacaatcctgatgatcctacaagtaacgacacctttgaaatccctctcatgctcactggaaacatcgttctccgaaaacggctgaattacgaggataaaacgagatattttgttattattcaggcaaatgatcgcgcccagaacctcaatgagcgccggaccaccaccactacactcaccgtggacgtcctcgacggcgatgatttgggaccaatgtttctgccctgtgtgttagttccgaatacccgcgactgtcgtcctctcacctaccaggctgccatacctgagctgagaacgccggaggagctgaaccctataattgtaacccccccgattcaggccatagatcaggatcgaaacattcagcccccaagcgacaggcctggcatactttactctatcctcgtcggtacacccgaggattatccaaggttctttcatatgcaccctcgtactgccgagctatcattacttgaacccgtaaaccgggattttcaccagaagtttgacctcgtcattaaggaggagccgaaaaaaattaagaagcctaaggtagaaattagggaacccagtgaggaggaggaagtggtggtgacaatagagaagccgcccgccgcagagcctacctacactacctggaagagggctcgcatcttcccaatgatcttcaagaaagtcagaggactggccgataagcgcggcatcgttgacctcgaaggtgaagaatggcagcggagactagaggaagaggacaaggactatctgaagttaaccttggaccaggaagaggcgactgagtccaccgtggaaagtgaagaggagagcagttctgattacaccgaatactctgaggaggaaagcgaattctccgagtcagagacaaccgaggaggaatccgagtccgagacaccttcagaagaggaggagtcgagcactccggaaagcgaagaatccgaaagtaccgagtccgagggtgaaaaagcacgaaagaatatagtgctcgcccggaggaggccaatggtcgaagaggtgaaggaggtgaaggggcgcaaagaggagccccaagaggagcagaaggagccaaaaatggaggaggaggagcattccgaagaggaggagagcggaccagctccagtcgaagagagtaccgatcccgaagcacaggacatcccagaggaggggtctgcggagtcagcgagtgtcgagggcggggttgaatcggaggaagagtccgagtctggtagctcctccagctcaagcgagtcccagtctgggggaccttgggggtaccaggtgcccgcctacgacagatcaaaaaatgcgaatcagaagaaatctcctggtgctaactccgaaggttataataccgcgctgtag

SEQ ID NO: 54609 - DNA, 3453 bp, Artificial Sequence
  derived and/or modified sequence
atgcccagctatcaagggtatatactggagagcgccccggtgggagcaactatctcggattcactgaatctgactagccccctgcggatagtagccctggacaaggatattgaggatgtgccgccttcaggggtacccactaaggatccagagcttcatctgtttctgaacgactacacctccgtgttcaccgtgacacagactggcatcaccaggtacctaaccctactgcagcctgtagacagggaggaacaacaaacttacacattctccatcaccgctttcgacggagtgcaggagagtgaaccagtgattgtgaatatccaagtgatggatgctaacgacaacacgcccacctttccggagatatcttatgatgtgtacgtgtatacggatatgcggcccggcgacagcgtaatccagctgacagcagttgacgcagacgaaggttctaacggcgaaatcacctatgagatacttgtaggtgcccaaggagactttataatcaacaaaacgacaggactgataactatcgctcctggggtggaaatgatagtgggtaggacctacgcactgactgtacaggcggccgataacgccccacccgcagaaaggcgcaacagtatatgtacggtatacatcgaggtgctccctccgaacaaccaaagtccgccacgcttcccgcagctaatgtactctcttgagatcagcgaggcgatgcgggtgggcgccgtgttactgaatctacaagccacagacagagagggggattctatcacatacgcaattgagaacggcgaccctcagagagtgtttaatctgtccgagaccactggcatcttaactctgggcaaagcgttagaccgagagtccacggataggtatatactcattattactgccagcgatggccgtccagatggcacgtctaccgccactgttaatatcgtggttacagacgttaatgataacgccccagtgtttgatccttacctaccccggaacctgagtgtcgtggaggaagaggcaaatgccttcgtggggcaagtgaaggctaccgatccagatgccggcatcaatgggcaggtgcactactcccttggtaacttcaacaacctgttccgtattacctctaacggatcgatatacaccgcggtgaaattaaacagggaagtgcgtgactactatgagcttgtcgtggtcgccacagacggtgctgtacatccccggcatagtaccttgactcttgctattaaggtcctcgacatcgacgacaattcacccgtcttcacaaatagcacatacactgtgttagtcgaggaaaatctgcctgctgggactacaattctgcagattgaagccaaagacgtcgacttaggtgcaaacgtgtcatatcggatccggagtcccgaagtcaagcacttttttgccctgcaccctttcactggagagctatctctgttgcggagtctagactatgaggcattccctgaccaggaagcgagtattaccttcctcgtggaggccttcgatatttacggtacaatgccaccgggaatagcgactgtcacagtgatcgttaaggacatgaacgattaccctccagtgttctcgaaaaggatttataaaggaatggtagcgcccgatgccgtcaaagggactccaattactaccgtctacgccgaggacgccgaccctcctggcctgcccgcttctagagtgaggtatagggtagacgacgtccagtttccttatccagcaagtatcttcgaggttgaagaggatagcggaagggtgattactcgcgttaacctgaatgaggagcctactactatatttaaactcgtggtggtggcgttcgatgacggcgaacccgttatgtcctccagtgctacggtgaagatccttgttctgcaccctggggagattccaagatttacccaggaagaataccgaccgccccccgtgtccgagttggccacaaaagggaccatggttggtgttatctcagcagctgcgataaatcagagcatagtgtacagcattgtgtccggcaacgaggaggatacattcggcataaacaacatcaccggggttatatacgtgaatggacccctagattacgagacgcgcaccagttatgtcttgcgcgtccaggccgactcactggaggttgtactcgctaatttgagagtgcctagtaagagcaacaccgccaaggtctatatcgaaatacaggatgagaacaaccaccccccggtgtttcaaaaaaagttttatattggtggtgtttctgaggacgcccggatgttcacgtctgttttgcgggtgaaggcaacggataaagataccgggaactactcagtgatggcttaccggcttatcatcccccccattaaagaaggcaaggagggcttcgtggtggaaacttatactgggctgattaaaaccgctatgctgtttcataacatgagaagatcatatttcaaatttcaggttatagcaaccgacgactatggtaaagggctcagtggcaaagcagatgtgctagtgtcagtcgtcaaccaactggatatgcaggttatagtttctaacgtaccacccactctggtcgaaaagaagatcgaagacttgaccgagattctggatcggtatgttcaggagcagatccctggcgcgaaagttgtggtagaaagcattggcgcccgaagacatggagatgcattttccttggaggactacaccaagtgtgatttgacggtatacgctatagacccacagacaaacagagccatcgacagaaacgaactttttaaatttctggatggcaagctgttggacatcaataaggattttcagccttattacggggaaggcggcagaattttggagattagaacaccagaagccgttactagtatcaaaaagcgcggagagtccctgggatacaccgaaggcgctctcctcgccctcgcttttattattattctttgttgcatacctgcgatcctggttgttctggtcagctataggcagttcaaggtgcgccaggccgaatgtacgaaaacggcgaggatccaggcggctctccccgccgctaagccagccgtgcctgcgccagcgcctgtggctgctccacccccgcccccacctccaccaccaggagcccacctttatgaggagctgggtgacagctccatgcataaaaactacccctggtccctggaattgattctggcgcgcaatatggataaaataatcactgtgatgtccatgggtatgaagtgtcttaatatgggtgttgcggtcgactgctaccaccagctggatagaaggaacatggtgcggtggctggtcaagttgcgaaaaaacatgagacgtaagcgcaaaagtcagcgcaaactgaagaaccagcgcctgaaactggagagtttagtacgtcgcaagaaatag

SEQ ID NO: 54610 - DNA, 990 bp, Artificial Sequence
  derived and/or modified sequence
atgtttcgccagttctatctctggacatgcttggccagcggtataatccttggctccctgtttgagatctgtctcggccagtacgatgacgactgcaagttagcgcgtggggggcctccagccacaatcgtagccattgatgaagagagcagaaatggcactatcttggtggataacatgctcattaagggaaccgccgggggacccgatcccacgatcgagcttagcttgaaagacaatgtcgattactgggtgctcatggatccagtgaagcagatgctgtttcttaacagcacgggacgcgtattggatcgcgatccacccatgaatatacatagcattgtcgtgcaggtacagtgtattaacaagaaggttggcacaatcatctaccacgaggtgcggatcgtggtgagagatcggaacgataacagccctacatttaagcacgagtcatactacgcaactgttaacgaactgacacccgtgggcacaactatctttaccggattcagcggcgataacggcgccacagatatcgacgacggccctaacgggcagatcgaatatgttatacagtacaaccctgatgatcccacatccaatgacaccttcgagatccccctgatgttaaccgggaacattgttctgcgcaaacgcctcaactacgaagacaaaacgaggtatttcgttattattcaagcgaacgatagagcccagaacttaaatgaacgaaggactacgacgactacactcacagtagatgttttggatggcgacgacctggggcctatgttcttgccatgtgtgttggtgccaaacacccgcgattgcaggcctcttacataccaagcagccattcctgagttaagaacgccggacctggggtcactgtgcagcggtactaactcctggtgccagggcagatcgggtgtacactggtcttcgccggcttggaggtgcctgttcccccggaggctccaccagatgtag

SEQ ID NO: 54611 - DNA, 4620 bp, Artificial Sequence
  derived and/or modified sequence
atgttccggcagttctacctgtggacctgcctggccagcggcatcatcctgggcagcctgtttgagatctgcctgggccagtatgatgatgactgcaagctggcccggggcggccccccagccaccatcgtggccattgatgaggagagcagaaatggcaccatcctggtggacaacatgctgatcaagggcacagctgggggccctgaccccaccatcgagctgagcctgaaggacaacgtggactactgggtgctgatggaccctgtgaagcagatgctgttcctgaacagcacaggccgggtgctggaccgggacccccccatgaacatccacagcatcgtggtgcaggtgcagtgcatcaacaagaaggtgggcaccatcatctaccacgaggtgagaattgtggtgcgggacagaaatgacaacagccccaccttcaagcatgagagctactatgccaccgtgaatgagctgacccctgtgggcaccaccatcttcaccggcttcagcggggacaacggggccacagacattgatgatggccccaacggccagattgaatatgtgatccagtacaacccagatgaccccaccagcaatgacacctttgagatccccctgatgctgactggaaacatcgtgctgaggaagaggctgaactatgaggacaagacccgctactttgtgatcatccaggccaatgaccgggcccagaacctgaatgaaagaaggaccaccaccaccaccctgactgtggatgtgctggatggagatgacctgggccccatgttcctgccctgtgtgctggtgcccaacacccgggactgccggcccctgacctaccaggccgccatccctgagctgcggaccccagaggagctgaaccccatcatcgtgaccccacccatccaggccatcgaccaggacaggaacatccagcccccaagtgaccggcccggcatcctgtacagcatcctggtgggcaccccagaggactacccccgcttcttccacatgcaccccaggacagctgagctgagcctgctggagcctgtgaacagagacttccaccagaagtttgacctggtgatcaaggccgagcaggacaatggccaccccctgcctgcctttgctggcctgcacatcgagatcctggatgagaacaaccagagcccctacttcaccatgcccagctaccagggctacatcctggagagcgcccctgtgggcgccaccatcagtgacagcctgaacctgaccagccccctgcgcatcgtggccctggacaaggacatcgaggacaccaaggaccctgagctgcacctgttcctgaatgactacaccagcgtcttcaccgtgacccagacaggcatcacccgctacctgaccctgctgcagcctgtggaccgggaggagcagcagacctacaccttcagcatcacagcctttgatggagtgcaggagagcgagcccgtcatcgtgaacatccaggtgatggatgccaatgacaacacccccaccttccctgagatctcctatgatgtgtatgtgtacacagacatgaggcctggggacagcgtcatccagctgacagctgtggatgctgatgagggcagcaatggagagatcacctatgagatcctggtgggcgcccagggcgacttcatcatcaacaagaccaccggcctcatcaccatcgcccctggggtggagatgattgtgggccgcacctacgccctgactgtgcaggccgctgacaatgcccccccagctgagaggagaaattccatctgcaccgtgtacatcgaggtgctgccccccaacaaccagagccccccacgcttcccccagctgatgtacagcctggagatcagcgaggccatgagggtgggcgctgtgctgctgaacctgcaggccacagaccgggagggggacagcatcacctacgccattgaaaatggagacccccagagggtcttcaacctgtctgagaccaccggcatcctgaccctgggcaaggccctggaccgggagagcacagaccgctacatcctgatcatcacagccagtgatggccgcccagatggcaccagcacagccaccgtgaacatcgtggtgacagatgtgaatgacaatgcccctgtgtttgacccctacctgcccaggaacctgtctgtggtggaggaggaggccaatgcctttgtgggccaggtgaaggccacagatcctgatgctggcatcaatggccaggtgcactacagcctgggcaacttcaacaacctcttccgcatcaccagcaatggcagcatctacacagctgtgaagctgaaccgggaggtgcgggactactatgagctggtggtggtggccacagatggagctgtgcaccccaggcacagcaccctgaccctggccatcaaggtgctggacattgatgacaacagccctgtgttcaccaacagcacctacacagtgctggtggaggagaacctgcctgctggcaccaccatcctgcagatcgaggccaaggatgtggacctgggcgccaacgtgtcctaccgcatccgcagccctgaggtgaagcacttctttgccctgcaccccttcaccggggagctgagcctgctgcggagcctggactatgaggccttcccagaccaggaggccagcatcaccttcctggtggaggcctttgacatctacggcaccatgcctcctggcatcgccaccgtgacagtgattgtgaaggacatgaatgactacccacctgtgttcagcaagaggatctacaagggcatggtggccccagatgctgtgaagggcacccccatcaccaccgtgtatgcagaagatgctgaccccccaggcctgcctgccagccgggtgcgctacagagtggatgatgtgcagttcccctacccagccagcatctttgaggtggaggaggacagcggccgggtcatcaccagggtgaacctgaatgaggagcccaccaccatcttcaagctggtggtggtggcctttgatgatggagagcctgtgatgagcagcagcgccaccgtgaagatcctggtgctgcaccctggagagatcccccgcttcacccaggaggagtaccggcccccacctgtgtctgagctggccaccaagggcaccatggtgggcgtcatctctgctgctgccatcaaccagagcatcgtgtacagcatcgtgtctggaaatgaggaggacaccttcggcatcaacaacatcaccggggtcatctacgtgaatggccccctggactatgagaccaggaccagctatgtgctgcgggtgcaggccgacagcctggaggtggtgctggccaacctgcgggtgcccagcaagagcaacacagccaaggtgtacatcgagatccaggatgagaacaaccacccccctgtgttccagaagaagttctacatcggcggcgtgtctgaagatgccaggatgttcacctctgtgctgcgggtgaaggccacagacaaggacaccggcaactacagcgtgatggcctaccgcctcatcatcccccccatcaaggagggcaaggagggctttgtggtggagacctacacaggcctcatcaagacagccatgctgttccacaacatgaggaggagctacttcaagttccaggtgattgccacagatgattatggcaagggcctgagcggcaaggcagatgtgctggtgtctgtggtgaaccagctggacatgcaggtgattgtgtccaatgtgccccccaccctggtggagaagaagattgaggacctgacagagatcctggaccgctacgtgcaggagcagatccctggggccaaggtggtggtggagagcattggagccaggagacatggagatgccttcagcctggaggactacaccaagtgtgacctgactgtgtatgccatcgacccccagaccaacagagccatcgacagaaatgagctgttcaagttcctggatggcaagctgctggacatcaacaaggacttccagccctactatggagagggcggccgcatcctggagatccgcaccccagaggccgtgaccagcatcaagaagagaggagagagcctgggctacacagaaggagccctgctggccctggccttcatcatcatcctgtgctgcatcccagccatcctggtggtgctggtgtcctaccggcagttcaaggtgcggcaggccgagtgcaccaagacagcccgcatccaggccgccctgcctgctgccaagccagctgtgcctgccccagcccctgtggccgcccctcctcctcctcctcctcctcctcctggggcccacctgtatgaggagctgggggacagctccatgcacaagaactacccctggagcctggagctgatcctggccaggaacatggacaagatcatcaccgtgatgtccatgggcatgaagtgcctgaacatgggcgtggccgtggactgctaccaccagctggacagaagaaacatggtgcgctggctggtgaagctgaggaagaacatgaggaggaagaggaagagccagaggaagctgaagaaccagaggctgaagctggagagcctggtgcggaggaagaagtag

SEQ ID NO: 54612 - DNA, 2160 bp, Artificial Sequence
  derived and/or modified sequence
atgttccggcagttctacctgtggacctgcctggccagcggcatcatcctgggcagcctgtttgagatctgcctgggccagtatgatgatgactgcaagctggcccggggcggccccccagccaccatcgtggccattgatgaggagagcagaaatggcaccatcctggtggacaacatgctgatcaagggcacagctgggggccctgaccccaccatcgagctgagcctgaaggacaacgtggactactgggtgctgatggaccctgtgaagcagatgctgttcctgaacagcacaggccgggtgctggaccgggacccccccatgaacatccacagcatcgtggtgcaggtgcagtgcatcaacaagaaggtgggcaccatcatctaccacgaggtgagaattgtggtgcgggacagaaatgacaacagccccaccttcaagcatgagagctactatgccaccgtgaatgagctgacccctgtgggcaccaccatcttcaccggcttcagcggggacaacggggccacagacattgatgatggccccaacggccagattgaatatgtgatccagtacaacccagatgaccccaccagcaatgacacctttgagatccccctgatgctgactggaaacatcgtgctgaggaagaggctgaactatgaggacaagacccgctactttgtgatcatccaggccaatgaccgggcccagaacctgaatgaaagaaggaccaccaccaccaccctgactgtggatgtgctggatggagatgacctgggccccatgttcctgccctgtgtgctggtgcccaacacccgggactgccggcccctgacctaccaggccgccatccctgagctgcggaccccagaggagctgaaccccatcatcgtgaccccacccatccaggccatcgaccaggacaggaacatccagcccccaagtgaccggcccggcatcctgtacagcatcctggtgggcaccccagaggactacccccgcttcttccacatgcaccccaggacagctgagctgagcctgctggagcctgtgaacagagacttccaccagaagtttgacctggtgatcaaggccgagcaggacaatggccaccccctgcctgcctttgctggcctgcacatcgagatcctggatgagaacaaccagagcccctacttcaccatgcccagctaccagggctacatcctggagagcgcccctgtgggcgccaccatcagtgacagcctgaacctgaccagccccctgcgcatcgtggccctggacaaggacattgaagatgaggagcccaagaagatcaagaagcccaaggtggagatccgggagcccagcgaggaggaggaggtggtggtgaccatcgagaagcccccagctgctgagcccacctacaccacctggaagagggcccgcatcttccccatgatcttcaagaaggtgcggggcctggccgacaagaggggcatcgtggacctggagggggaggagtggcagaggcggctggaggaggaggacaaggactacctgaagctgaccctggaccaggaggaggccacagagagcacagtggagagcgaggaggagagcagcagtgactacacagagtacagcgaggaggagagcgagttcagcgagagcgagaccacagaggaggagagcgagagcgagacccccagcgaggaggaggagagcagcaccccagagagcgaggagagcgagagcacagagagcgagggggagaaggccaggaagaacatcgtgctggcccggcggcggcccatggtggaggaggtgaaggaggtgaagggcaggaaggaggagccccaggaggagcagaaggagcccaagatggaggaggaggagcacagcgaggaggaggagagcggccctgcccctgtggaggagagcacagatcctgaggcccaggacatccctgaggagggcagcgctgagagcgcctctgtggagggcggcgtggagagcgaggaggagagcgagagcggcagcagcagcagcagcagcgagagccagagcggcggcccctggggctaccaggtgcctgcctatgacaggagcaagaatgccaaccagaagaagagccctggggccaacagcgagggctacaacacagccctgtag

SEQ ID NO: 54613 - DNA, 1953 bp, Artificial Sequence
  derived and/or modified sequence
atgttccggcagttctacctgtggacctgcctggccagcggcatcatcctgggcagcctgtttgagatctgcctgggccagtatgatgatgactgcaagctggcccggggcggccccccagccaccatcgtggccattgatgaggagagcagaaatggcaccatcctggtggacaacatgctgatcaagggcacagctgggggccctgaccccaccatcgagctgagcctgaaggacaacgtggactactgggtgctgatggaccctgtgaagcagatgctgttcctgaacagcacaggccgggtgctggaccgggacccccccatgaacatccacagcatcgtggtgcaggtgcagtgcatcaacaagaaggtgggcaccatcatctaccacgaggtgagaattgtggtgcgggacagaaatgacaacagccccaccttcaagcatgagagctactatgccaccgtgaatgagctgacccctgtgggcaccaccatcttcaccggcttcagcggggacaacggggccacagacattgatgatggccccaacggccagattgaatatgtgatccagtacaacccagatgaccccaccagcaatgacacctttgagatccccctgatgctgactggaaacatcgtgctgaggaagaggctgaactatgaggacaagacccgctactttgtgatcatccaggccaatgaccgggcccagaacctgaatgaaagaaggaccaccaccaccaccctgactgtggatgtgctggatggagatgacctgggccccatgttcctgccctgtgtgctggtgcccaacacccgggactgccggcccctgacctaccaggccgccatccctgagctgcggaccccagaggagctgaaccccatcatcgtgaccccacccatccaggccatcgaccaggacaggaacatccagcccccaagtgaccggcccggcatcctgtacagcatcctggtgggcaccccagaggactacccccgcttcttccacatgcaccccaggacagctgagctgagcctgctggagcctgtgaacagagacttccaccagaagtttgacctggtgatcaaggaggagcccaagaagatcaagaagcccaaggtggagatccgggagcccagcgaggaggaggaggtggtggtgaccatcgagaagcccccagctgctgagcccacctacaccacctggaagagggcccgcatcttccccatgatcttcaagaaggtgcggggcctggccgacaagaggggcatcgtggacctggagggggaggagtggcagaggcggctggaggaggaggacaaggactacctgaagctgaccctggaccaggaggaggccacagagagcacagtggagagcgaggaggagagcagcagtgactacacagagtacagcgaggaggagagcgagttcagcgagagcgagaccacagaggaggagagcgagagcgagaccccatctgaggaggaggagagcagcaccccagagagcgaggagagcgagagcacagaaagtgaaggagagaaggccaggaagaacatcgtgctggccaggagaagacccatggtggaggaggtgaaggaggtgaagggcaggaaggaggagccccaggaggagcagaaggagcccaagatggaggaggaggagcacagcgaggaggaggagagcggccctgcccctgtggaggagagcacagatcctgaggcccaggacatccctgaggagggcagcgctgagagcgcctctgtggagggcggcgtggagagcgaggaggagagcgagagcggcagcagcagcagcagcagcgagagccagagcggcggcccctggggctaccaggtgcctgcctatgacaggagcaagaatgccaaccagaagaagagccctggggccaacagcgagggctacaacacagccctgtag

SEQ ID NO: 54614 - DNA, 3453 bp, Artificial Sequence
  derived and/or modified sequence
atgcccagctaccagggctacatcctggagagcgcccctgtgggcgccaccatcagtgacagcctgaacctgaccagccccctgcgcatcgtggccctggacaaggacattgaagatgtgcccccatctggagtgcccaccaaggaccctgagctgcacctgttcctgaatgactacacctctgtgttcaccgtgacccagacaggcatcacccgctacctgaccctgctgcagcctgtggaccgggaggagcagcagacctacaccttcagcatcacagcctttgatggagtgcaggagagcgagcctgtgattgtgaacatccaggtgatggatgccaatgacaacacccccaccttccctgagatctcctatgatgtgtatgtgtacacagacatgaggcctggggacagcgtcatccagctgacagctgtggatgctgatgagggcagcaatggagagatcacctatgagatcctggtgggcgcccagggcgacttcatcatcaacaagaccaccggcctcatcaccatcgcccctggggtggagatgattgtgggccgcacctacgccctgactgtgcaggccgctgacaatgcccctcctgctgagaggaggaacagcatctgcaccgtgtacatcgaggtgctgccccccaacaaccagagccccccacgcttcccccagctgatgtacagcctggagatcagcgaggccatgagggtgggcgctgtgctgctgaacctgcaggccacagaccgggagggggacagcatcacctacgccattgaaaatggagacccccagagggtcttcaacctgtctgagaccaccggcatcctgaccctgggcaaggccctggaccgggagagcacagaccgctacatcctgatcatcacagccagtgatggccgcccagatggcaccagcacagccaccgtgaacatcgtggtgacagatgtgaatgacaatgcccctgtgtttgacccctacctgcccaggaacctgtctgtggtggaggaggaggccaatgcctttgtgggccaggtgaaggccacagatcctgatgctggcatcaatggccaggtgcactacagcctgggcaacttcaacaacctcttccgcatcaccagcaatggcagcatctacacagctgtgaagctgaaccgggaggtgcgggactactatgagctggtggtggtggccacagatggagctgtgcaccccaggcacagcaccctgaccctggccatcaaggtgctggacattgatgacaacagccctgtgttcaccaacagcacctacacagtgctggtggaggagaacctgcctgctggcaccaccatcctgcagatcgaggccaaggatgtggacctgggcgccaacgtgtcctaccgcatccgcagccctgaggtgaagcacttctttgccctgcaccccttcaccggggagctgagcctgctgcggagcctggactatgaggccttcccagaccaggaggccagcatcaccttcctggtggaggcctttgacatctacggcaccatgcctcctggcatcgccaccgtgaccgtcatcgtgaaggacatgaatgactacccacctgtgttcagcaagaggatctacaagggcatggtggccccagatgctgtgaagggcacccccatcaccaccgtgtatgcagaagatgctgaccccccaggcctgcctgccagccgggtgcgctacagagtggatgatgtgcagttcccctacccagccagcatctttgaggtggaggaggacagcggccgggtcatcaccagggtgaacctgaatgaggagcccaccaccatcttcaagctggtggtggtggcctttgatgatggagagcctgtgatgagcagcagcgccaccgtgaagatcctggtgctgcaccctggagagatcccccgcttcacccaggaggagtacagacctcctcctgtgtctgagctggccaccaagggcaccatggtgggcgtcatctctgctgctgccatcaaccagagcatcgtgtacagcatcgtgtctggaaatgaggaggacaccttcggcatcaacaacatcactggagtcatctacgtgaatggccccctggactatgagaccaggaccagctatgtgctgcgggtgcaggccgacagcctggaggtggtgctggccaacctgcgggtgcccagcaagagcaacacagccaaggtgtacatcgagatccaggatgagaacaaccacccccctgtgttccagaagaagttctacatcggcggcgtgtctgaagatgccaggatgttcacctctgtgctgcgggtgaaggccacagacaaggacaccggcaactacagcgtgatggcctaccgcctcatcatcccccccatcaaggagggcaaggagggctttgtggtggagacctacacaggcctcatcaagacagccatgctgttccacaacatgagaagaagctacttcaagttccaggtgattgccacagatgattatggcaagggcctgagcggcaaggcagatgtgctggtgtctgtggtgaaccagctggacatgcaggtgattgtgtccaatgtgccccccaccctggtggagaagaagattgaggacctgacagagatcctggacagatatgtgcaggagcagatccctggggccaaggtggtggtggagagcatcggggccaggagacatggagatgccttcagcctggaggactacaccaagtgtgacctgactgtgtatgccatcgacccccagaccaacagagccatcgacagaaatgaactcttcaagttcctggatggcaagctgctggacatcaacaaggacttccagccctactacggggagggcggccgcatcctggagatccgcaccccagaggccgtgaccagcatcaagaagagaggagagagcctgggctacacagagggcgccctgctggccctggccttcatcatcatcctgtgctgcatcccagccatcctggtggtgctggtgtcctaccggcagttcaaggtgcggcaggctgaatgtaccaagacagcccgcatccaggccgccctgcctgctgccaagccagctgtgcctgccccagcccctgtggccgcccctcctcctcctcctcctcctcctcctggggcccacctgtatgaggagctgggggacagctccatgcacaagaactacccctggagcctggagctgatcctggccaggaacatggacaagatcatcaccgtgatgtccatgggcatgaagtgcctgaacatgggcgtggccgtggactgctaccaccagctggacagaagaaacatggtgcgctggctggtgaagctgaggaagaacatgaggaggaagaggaagagccagaggaagctgaagaaccagaggctgaagctggagagcctggtgcggaggaagaagtag

SEQ ID NO: 54615 - DNA, 990 bp, Artificial Sequence
  derived and/or modified sequence
atgttccggcagttctacctgtggacctgcctggccagcggcatcatcctgggcagcctgtttgagatctgcctgggccagtatgatgatgactgcaagctggcccggggcggccccccagccaccatcgtggccattgatgaggagagcagaaatggcaccatcctggtggacaacatgctgatcaagggcacagctgggggccctgaccccaccatcgagctgagcctgaaggacaacgtggactactgggtgctgatggaccctgtgaagcagatgctgttcctgaacagcacaggccgggtgctggaccgggacccccccatgaacatccacagcatcgtggtgcaggtgcagtgcatcaacaagaaggtgggcaccatcatctaccacgaggtgagaattgtggtgcgggacagaaatgacaacagccccaccttcaagcatgagagctactatgccaccgtgaatgagctgacccctgtgggcaccaccatcttcaccggcttcagcggggacaacggggccacagacattgatgatggccccaacggccagattgaatatgtgatccagtacaacccagatgaccccaccagcaatgacacctttgagatccccctgatgctgactggaaacatcgtgctgaggaagaggctgaactatgaggacaagacccgctactttgtgatcatccaggccaatgaccgggcccagaacctgaatgaaagaaggaccaccaccaccaccctgactgtggatgtgctggatggagatgacctgggccccatgttcctgccctgtgtgctggtgcccaacacccgggactgccggcccctgacctaccaggccgccatccctgagctgcggaccccagacctgggcagcctgtgcagcggcaccaacagctggtgccagggccgctctggagtgcactggagcagccctgcctggcgctgcctcttcccccggcggctgcaccagatgtag

SEQ ID NO: 54616 - DNA, 4620 bp, Artificial Sequence
  derived and/or modified sequence
atgttccggcagttctacctgtggacctgcctggccagcggcatcatcctcggttccctattcgagatatgccttgggcagtatgacgatgactgcaagcttgccagaggcggcccgccagccactatagtggccatagacgaagagtccagaaatggaacaatcctcgtggacaatatgctgatcaaaggcacagcgggcggtccagacccaaccatcgagctgtcactgaaagataatgtcgattactgggtcttaatggatccagtgaagcagatgctattcttgaatagcaccggacgtgtgcttgacagggacccacccatgaatattcactccatcgtcgtgcaggtccaatgtatcaataagaaagtgggaaccatcatctaccatgaggtacggatcgtagtgagagatcggaacgacaatagccccaccttcaaacatgaaagttactatgcaacggttaacgagctcacacccgtgggcaccactatctttaccggcttcagcggcgataacggagccacggatatcgatgacggccccaatggacaaatcgagtacgtgattcaatacaatcccgatgaccctacctcgaacgatacatttgagatcccactgatgcttactggaaacatagtgctgagaaaacgcctcaattatgaggacaaaacgagatacttcgtcatcattcaagcaaacgaccgcgcccaaaacctgaacgaacgccggacaaccaccaccaccctgacagtggacgttctcgacggcgatgatttgggtcctatgttcctcccctgtgttctagttccgaacaccagagactgtcgcccacttacgtatcaggcggccattccagaattgcgtacgccagaagaactgaatcccatcatcgtgacgcctccaatccaagccattgatcaggataggaacatacagcctcctagcgaccggcctggaatcctctactcaatcctggtcggtaccccagaggattaccctaggttttttcacatgcatcccagaaccgccgaattgtcgcttctcgaacctgtgaatagggactttcaccagaaattcgatctggttatcaaggccgagcaagataacgggcacccattgccagcgtttgccgggctgcatattgagattcttgatgagaataatcaaagcccatacttcacaatgccctcataccagggatatatcctagagtccgcccccgtgggagctacaatatcggacagcctaaatctgacgtcgcccctgagaatcgtggcgctggataaggacatagaagataccaaggatcccgaactgcacctttttctgaacgattacacctcagtcttcaccgtgacccagaccggcatcacaaggtatctgactctgctacaacccgtagacagggaagagcaacagacctacactttctccattaccgcattcgacggcgtgcaggagagtgagcctgtcatcgtcaacattcaggtcatggacgccaacgataacaccccaacattccctgagataagctacgacgtgtacgtttataccgacatgcgaccaggtgatagtgtgattcagctgaccgcagtcgacgcggatgagggtagcaacggagagattacctatgaaattctagtgggagctcagggtgatttcatcatcaacaagacgacaggacttatcacaatcgctcccggagttgagatgattgtgggccggacctatgcactgacagtacaggcggccgacaacgcacctcctgccgaacgcagaaacagcatttgcaccgtgtatatcgaagtactgccgccaaataatcagtctcctccgcgctttcctcaactaatgtacagcctggaaatatctgaggcaatgcgcgtcggcgctgttctgctcaatttacaggccacggatagggagggcgatagcataacctatgcaattgaaaacggcgatccccagagggtgtttaacctatccgagacgacagggatcctgacactgggaaaagctctagatcgcgagtctaccgaccgatacattctgattattaccgcatctgacggtaggcccgatggaacctcgactgccactgtcaacattgtcgtgaccgacgtcaacgacaatgcccccgtattcgacccctatctcccgagaaacctgagtgtcgttgaggaggaggcgaatgcgttcgtcgggcaggtgaaggctactgatcctgacgccggcatcaacggccaagtgcactacagcctggggaactttaataatctttttcgtattacctccaatggaagtatttacacagcagtgaaactcaacagggaggtacgtgattactacgagttagtggtagtcgccactgacggcgcagtgcaccccaggcacagtacactaactctggctatcaaggtactggacatagatgacaactctccggtatttaccaacagtacttataccgttttagtcgaggagaatctcccagctggtactacaatattacagattgaggccaaggatgtcgacctcggcgcaaatgtgtcttatcgcatcaggtcccctgaggtcaagcacttctttgcgctgcacccctttacaggagaactgagtttattaaggtcactggattatgaagcatttccagatcaagaggcctctataaccttcttggtggaagcctttgacatctatggaacaatgcctcccggcatcgccactgtgacggtgattgtcaaagacatgaacgattaccctccagtgttctcaaagcgaatttataaggggatggtcgcccccgacgccgtgaaggggaccccaataacaactgtctacgctgaggacgccgatcccccgggcctgcccgcatctcgggttcgctatagagttgatgatgtccaatttccctaccccgcctctatatttgaagtggaggaagatagtggacgggtcattacccgagtcaatctcaacgaggaacccaccacaatattcaagctggttgtggttgcatttgatgacggcgagcctgtcatgagtagcagtgccacggtcaagattcttgtactgcaccccggcgaaatcccccgcttcacacaagaggaatacaggccgccacccgtaagcgaactggcaacaaagggtaccatggttggagtgatttcagctgccgcgatcaaccagagcatagtttactctatcgtgagcgggaatgaagaagacacttttggaattaataatataaccggcgtcatctatgtcaatggaccattggactacgagacaagaaccagttatgtgttaagagtgcaggctgacagtttggaggtggttcttgccaatcttcgggtcccctctaaaagtaatactgccaaggtgtatatcgagatccaggacgagaataaccacccacccgtatttcagaagaagttctacattggcggcgtgtcagaagatgcaagaatgttcacatccgttctccgggtgaaggcaaccgacaaggatactggtaactattccgtgatggcttatagactcattattccacctataaaggaagggaaggagggattcgtcgtggaaacgtacacagggttaataaagacagctatgctatttcacaacatgcgcaggtcctattttaagttccaggtgattgcaacggacgactacggaaaaggtctgtctgggaaggccgacgtactggtctcggtcgtgaaccagctagacatgcaagttatagtgagcaatgtgccacctaccttagtcgaaaagaagatcgaagacctcactgagatcttagatagatacgtccaggagcagatacccggtgcgaaggtggtcgtggagtccattggagcccgtcggcatggggatgcctttagccttgaggactacacaaaatgcgacctcacagtatacgctatcgaccctcagacaaaccgggccatcgacagaaacgaactgttcaagttcctggatggcaagctcctggacatcaataaggatttccagccttactacggcgagggaggacgaatactagaaatcagaacccctgaggctgtgacatcaattaaaaagcgcggggaatccctgggatacacggagggagcgttgcttgccttagcttttatcatcatcctgtgctgcattcctgcaattcttgtggtgctcgtctcctacagacagtttaaggttcggcaggctgaatgcacaaagactgcccgtattcaagcggccctgcccgccgccaagccagctgtccccgcacccgcgcccgtggcagcacccccccctcctccgccccccccccctggagcccatctgtacgaggaactgggggatagcagtatgcacaagaactacccttggtccctggagcttatactggccagaaacatggacaaaattattaccgtgatgtctatggggatgaagtgtctaaacatgggagtcgccgtagactgctatcatcagctagaccggagaaatatggttaggtggctggtaaaactccggaaaaacatgcgccgaaaaagaaagagtcagcggaaattaaagaaccaaaggctcaagcttgagtcactggttcggagaaagaagtag

SEQ ID NO: 54617 - DNA, 2160 bp, Artificial Sequence
  derived and/or modified sequence
atgttccggcagttctacctgtggacctgcctggccagcggcatcattcttggatccctttttgagatatgtctgggccagtatgacgatgattgtaagctggctcgcggtgggccacccgcaaccattgtagccatcgatgaggagtcacggaacggaactatcctggtggacaatatgttgatcaagggcactgcaggtggccccgaccctacgattgagctgtcacttaaggataacgtcgattactgggtccttatggatcccgtaaagcaaatgctttttttaaattcgaccgggcgggtgttggaccgggacccccctatgaatattcacagcattgtagttcaggtgcaatgcatcaacaaaaaggtgggcaccatcatataccacgaggtgcgtatcgtcgtgcgcgacaggaacgataattcacccactttcaagcatgaatcatactacgccaccgtgaatgaactaacaccagtgggtacgactattttcacagggttttcgggggataatggcgcaaccgacatagatgatggccctaacggtcagatagagtacgttatccagtacaatcctgacgatcctaccagtaatgacacgttcgagattcccctgatgctaacagggaatatagtcctcagaaagagactaaactatgaagataaaacaaggtactttgttattattcaggccaacgacagggcacagaacttgaacgaacgtcgaacaaccacaaccaccctcacagtggatgttctcgacggggacgacctcggcccaatgttcctgccctgcgttctagtgcccaatacaagggattgtagaccattgacctaccaggcagcaatacccgaacttcgtactccagaggagcttaatccaatcatagtaaccccccctatccaggccattgaccaggatagaaatatacagcctcccagtgatcgccccggtattttgtactccatactcgtcggcactcccgaggattatcctcgctttttccacatgcatcctcgcacagccgagctgtcactgctggaacccgtgaacagagactttcatcagaagttcgacctcgtcataaaggccgagcaggacaatggacatcctctccctgccttcgctgggctgcatattgagatcttagatgagaataatcagtccccatactttacaatgccctcataccaaggatacatactggagtctgcaccagtgggggctaccattagcgacagtctgaatcttactagccctctcaggatagtggcgcttgataaggacatagaggatgaggagcccaagaagatcaaaaagcccaaagttgagatacgggagcctagcgaagaggaggaggtggtagtgacaatagagaaaccacctgcagcagaaccaacctacaccacatggaaacgtgctcggatatttcccatgatctttaaaaaagttaggggactagctgataaacggggaatcgtcgatctggagggtgaggagtggcagcgccgactggaggaggaggacaaagattacctgaaactgaccttggatcaggaggaagcaacagaatctaccgtcgagtctgaggaggagagcagtagtgactataccgagtacagcgaggaagaatccgaattcagtgagtcagagacaacagaagaggaaagcgagtctgaaacaccctccgaggaggaggaaagtagcacacctgagtcagaagaaagcgagtctactgagtcagaaggcgagaaagcccggaaaaatatcgtgcttgcacggaggcggcccatggtggaggaggtgaaagaggttaagggacggaaggaggaaccccaggaggaacagaaagaacccaagatggaggaggaagaacactccgaggaggaagagagcggtcccgcccccgtggaagaatctactgatcccgaggcacaagatattcctgaagagggatctgctgagagcgcctctgtggaaggcggagtagaatccgaggaagagtccgaatctggctccagctcctccagcagcgagtcacagagcggaggcccttggggctaccaagtgcctgcgtacgacagatccaaaaatgctaaccagaagaagtctcccggagcgaattctgaaggatacaataccgcattatag

SEQ ID NO: 54618 - DNA, 1953 bp, Artificial Sequence
  derived and/or modified sequence
atgttccggcagttctacctgtggacctgcctggccagcggcatcatactgggaagcctgtttgaaatttgtcttggccagtacgacgatgattgcaaactagcacgtggaggccctcccgctacgatcgtggccatcgatgaggagtctcggaatggcaccattctcgtggacaatatgctaattaaaggtacagctgggggccctgatccaacaatcgagctgagtctgaaagacaacgtagattactgggttctgatggaccctgtcaaacagatgctatttttaaattcaaccgggcgcgtgcttgacagggatccaccaatgaacatccactctatcgttgtgcaggtgcagtgtattaataagaaggtggggactatcatttaccacgaggttcgcattgtagtccgtgaccgaaatgataacagtcctaccttcaaacacgaaagctattacgctactgtcaacgagttaaccccagtggggactactatttttacagggtttagtggggataacggagctaccgacatagacgatggccctaacggacagattgagtacgtcatacagtacaaccctgatgatcctacaagcaatgatacttttgagatcccactgatgctaaccggcaatatagtgctgcgcaaacgcctgaactacgaggataaaacccgctactttgtcattatccaggcaaacgatagagcccagaatttgaatgagcggcggaccactaccactactctgaccgtggatgtgttagacggggatgatctcggccctatgttcctgccatgtgtgttggttcctaataccagagactgcagacccctgacctaccaggctgcaatccctgagctgcgcacccctgaagagctgaatccaattatagtcacacccccgatacaagccattgaccaggatagaaacattcagcctccgagcgatcgacctggcatcctgtactctatcctcgtgggtactcctgaagattacccccggttttttcacatgcatcctcgcactgccgagttatcactgctggaacccgtaaatagggatttccatcagaaattcgatctggttattaaggaagagcctaagaaaatcaaaaagcctaaagttgaaattcgagagcccagcgaggaagaggaagtggttgtcactattgaaaaacccccggcagccgagccaacatacacgacctggaagcgtgccaggatattccctatgatattcaagaaagtaagaggccttgccgataagcgggggattgtggacctggagggcgaagagtggcagcgtaggcttgaagaggaggacaaagactatttgaaactgacgctggaccaggaagaggccacagaatccacggtggagtctgaagaggagtcaagtagcgattataccgaatactctgaggaggaatctgaattcagcgagtccgagaccactgaagaagaatcagagtcggagacgccgtccgaagaagaggagagcagcaccccggagagtgaggagtctgagagcactgaaagcgaaggcgaaaaggcgaggaagaatatcgtcctggcaagacgccgacccatggttgaggaagtgaaagaagtgaagggccgtaaagaggagcctcaagaggagcagaaggagcctaagatggaggaagaagagcactctgaagaagaggagtccggacccgcacccgtcgaggagagcacagaccctgaggcccaagacattcctgaggaggggtctgccgagagcgcctcagtagagggtggagtagagtccgaggaagagtcagagtctggctcctcctcaagttcatcagagagtcaatctggtggcccctgggggtaccaggtgcctgcatatgataggtctaagaatgccaatcagaaaaagagccccggagctaatagcgagggctataatacagctctttag

SEQ ID NO: 54619 - DNA, 3453 bp, Artificial Sequence
  derived and/or modified sequence
atgcccagctaccagggctacatcctggagagcgcccccgtgggcgccacgatcagcgacagcctgaatctcacaagccccttacgcattgtggcactcgataaagacattgaggacgttcccccctcgggcgtaccgacaaaagatcccgagcttcatttgtttctgaatgactatacttccgtgtttactgtgacacaaaccggaataactaggtaccttacactccttcaacctgtggatagagaggaacagcagacatatacattcagcatcaccgcctttgatggcgtacaagaatccgagcccgttatcgtgaacatccaagttatggacgcaaatgacaataccccaacattcccggaaatctcctacgatgtgtacgtgtataccgacatgcgacctggcgactccgtgatacagctcactgccgttgacgccgacgagggtagcaacggcgagattacctacgagattctcgttggcgctcagggcgactttattatcaacaagacaacaggcctcatcacaattgccccaggtgtagagatgatagttggccgcacatacgcactgactgttcaagctgcggataacgcgccccccgcggaaaggcgtaacagtatctgcaccgtatacattgaggttttaccccccaataaccagagtccaccacggttcccccagctgatgtacagtctggagatttctgaagccatgagggtgggggcagtccttttaaatcttcaggccactgacagagaaggtgactcaattacatacgctatcgagaacggcgacccgcagcgagtgttcaatttgtcggaaactaccggaattttaacccttgggaaggctctggaccgggaaagcacagatagatatattctgatcatcacggcttctgatggacgtcccgatggtacaagcacagcaaccgttaacatcgtggtgaccgacgttaacgacaatgcacctgtgttcgatccttatcttccgaggaatctctcagtggtggaagaagaagccaatgcctttgtgggccaagtgaaggccaccgacccagatgcaggtattaatgggcaggtccattattcccttgggaactttaacaacctgttccgcatcactagcaacggatcaatatataccgctgttaaacttaatcgtgaggtccgcgattattacgaactggtcgtggtcgccacagatggggcagtccacccccgtcactcaaccctgacgctggctataaaagtactggatatcgatgataattcgccagtcttcacaaactccacatacactgtgcttgtagaggaaaatctgcctgccggaaccacaatcctgcaaatcgaggccaaagatgtcgatttaggggccaatgtgtcttaccgcatacgatctccagaagtgaaacattttttcgcactccatccattcacaggcgagctctctctactcagatcccttgactacgaggctttccccgaccaagaggcctccatcacttttcttgttgaggcttttgacatttacggaacgatgccacccgggatcgctaccgtgacagtgatagtgaaggatatgaatgattatccccccgtgtttagtaagcgaatatataaaggcatggtcgcgcctgacgcggttaaaggcactcccatcaccacagtgtacgcagaggacgctgacccccccggcctccccgcaagcagggtgagatatagggtcgacgacgtacagttcccctatcctgcctcaatttttgaggtggaggaggactcagggagagtgataacaagggttaacttgaacgaagagccaaccacgattttcaaactcgtcgtggtggccttcgacgacggcgaacccgtgatgagctcaagcgctactgtgaaaatactggttctccacccgggggaaatacctaggttcacccaagaagagtatcggccaccccccgtgtccgagctggccaccaaagggacaatggtcggggtaatcagtgcggcggccataaaccagagcatcgtctattcgatagtcagcgggaatgaggaggacacttttggtatcaataacataactggcgtaatttacgtgaatggccccctcgactacgagacgcgcacatcctatgtcctccgtgtacaggccgactcattggaagtcgtactggccaatctaagagtcccatcaaaatctaacaccgccaaagtgtacatcgaaatccaagatgaaaataatcatcctcccgtatttcagaaaaagttctacatcggaggcgtcagtgaggacgcccggatgtttacctcagttctgagggtcaaagccacagacaaggacaccggcaattatagcgtgatggcttaccggctgataataccccccattaaggaaggcaaggagggctttgtggtcgaaacatatacaggactaatcaagacggccatgctctttcacaacatgcgtaggagctactttaaatttcaggtcattgccaccgacgactacggcaaaggcctgtccggcaaggccgacgttctggtcagcgttgttaatcagctcgatatgcaggtaatcgtatctaatgtgcccccaactttggtggaaaaaaagatcgaggaccttaccgagattctcgacagatatgtgcaggagcagattcccggggccaaggtggtcgtggagagcatcggggccagacgccatggagatgcattttcacttgaagattatactaaatgcgacctgacggtgtatgctatcgatccgcaaacaaatagggctatcgatcgaaatgagctttttaagttcctggacgggaaactgctggatatcaataaggactttcagccatactatggcgagggaggaaggattttggagatcagaacacctgaagctgtcacctcgatcaagaagagaggtgaatcattgggctacacagagggcgcactgttagcgttagccttcatcatcatattgtgctgtatccctgccatactcgtggttttggtgagttacaggcaattcaaagtgaggcaggcggaatgcaccaaaaccgccaggattcaggcagccttacccgctgccaaacccgcggtacccgccccagctcccgtggcggcccctccacctccgccaccccctcctcccggagcccatctgtacgaggagttgggggacagctccatgcacaagaactacccatggtctctcgagctcatcctcgcccggaacatggacaaaattattactgtgatgtcaatgggcatgaaatgtctcaatatgggcgtggctgtcgactgctaccatcagctggacagaagaaatatggtccgctggctggtcaagttaaggaagaatatgagaaggaagcgcaagagccagaggaagctaaaaaaccagagattaaagctcgaatccctggtgcgccggaagaagtag

SEQ ID NO: 54620 - DNA, 990 bp, Artificial Sequence
  derived and/or modified sequence
atgttccggcagttctacctgtggacctgcctggccagcggcatcattctggggtcgctctttgaaatctgtctggggcaatatgacgatgactgcaagctcgcgcggggagggcccccggccacaattgtggctatagatgaagagtctcggaatggaaccattttggtggacaacatgctcataaaagggactgctggtggccctgaccctacaatcgagctgtctttaaaggataatgtggattactgggtcctgatggacccggttaagcagatgctttttctgaactctacaggaagggtgctcgacagggatcccccgatgaatatccattctattgtggttcaagtacaatgcatcaataaaaaagtcggcaccatcatttatcatgaagtgagaattgttgtgcgagaccgcaacgacaactcccccaccttcaaacacgaatcatactatgctactgtcaatgagctgactccagtgggaactaccatcttcaccggatttagtggggataacggagccaccgacattgatgatggacccaacggccagattgagtatgtaattcaatacaacccagacgaccctacctctaatgatactttcgaaatcccactcatgttaaccggcaatatagtcctaaggaagagactgaattatgaggataagacgagatattttgtgatcatccaggctaacgaccgggctcagaaccttaacgagcgacgtaccacaacaactacactgaccgtcgacgtgcttgatggggacgacctgggccctatgtttctgccatgtgtgttggtcccaaatactagagattgccgacccttgacatatcaggccgctatccccgagctgcggaccccggatctgggaagtctctgctcaggcaccaattcatggtgtcaggggcgttctggcgtgcactggagctcccctgcttggcggtgtctatttccgcgccggctgcatcagatgtag

SEQ ID NO: 54621 - DNA, 4620 bp, Artificial Sequence
  derived and/or modified sequence
atgtttaggcagttctatttgtggacatgtctggcttccggcatcattcttggctccctgttcgagatttgtctagggcagtacgacgacgactgtaaactggccagaggcggtccccctgccacaattgtggccattgatgaggaatccaggaatggtaccatcttggtcgacaatatgttaatcaagggcaccgccggtggtccagacccaactattgagttgagcctcaaggacaacgtcgattactgggtgttgatggaccctgttaaacagatgctgtttctcaattcgacgggccgagtgctggaccgggaccctcctatgaacatccatagtatcgtcgtacaggttcaatgtataaacaaaaaagtgggtactatcatctaccatgaagttcgcatcgtggtgcgggataggaacgacaactctcccaccttcaaacacgagagctattacgcaactgtgaatgagcttacgccggtcggaactacgatcttcacaggctttagcggcgataatggggcaacggacatcgacgacggaccaaatgggcaaattgagtacgttatacagtacaaccctgacgatccaacatcgaacgacacattcgaaatcccccttatgctcaccggcaacatcgtcctcaggaagcgactgaattatgaagacaaaacgaggtactttgtgattattcaggccaatgaccgtgcccagaatttgaatgagaggaggactaccacaacaacacttaccgtggatgtgctggacggggatgatctgggtccaatgttcttgccctgtgtcctagttccgaataccagagactgtcggccattgacataccaggccgcaatccccgagctgcgcaccccagaggagcttaaccccataatcgtaacccctccaatccaagcgatcgatcaggacaggaatatccaacccccatccgataggccaggcattctctattctattctcgtgggcaccccggaggactatccaagattctttcatatgcatccccgaaccgccgagctctccctcttggaaccagtgaatcgcgattttcaccagaagtttgacctcgtcatcaaggccgagcaggacaatgggcaccccctccctgcgttcgccggattacacattgagatcttggatgagaataatcagagtccatacttcacgatgcctagctaccagggctacattctcgaatctgcccctgtgggggcaacaatcagtgatagcctgaacttaaccagcccactcagaatcgttgcactcgataaggatatcgaggatactaaggaccctgagctgcatcttttcttgaatgattacaccagtgtcttcactgtgactcagacagggattacacgctacctgaccctgctgcaacccgtggatcgagaagagcagcaaacgtataccttctctatcaccgccttcgatggggtacaggagtcggagcctgttattgtgaatattcaggtcatggatgcaaatgataacacacctacttttcctgagatttcctacgacgtctacgtttataccgatatgcgtcccggtgattcagttatacagctgaccgccgtggacgctgacgagggatcaaatggagagattacatatgaaatcctggtcggagcccaaggtgattttattatcaataagaccactggtctcatcactattgcaccgggagtggaaatgattgttggcagaacttatgcccttaccgtgcaggccgctgacaatgccccacccgcagaaaggcgtaattcgatctgtaccgtgtacatcgaagttttgcccccaaataaccagtcacctccgaggtttcctcagctgatgtacagcttggagatctcagaggcaatgcgggtcggggctgtgctcctgaatctccaggctaccgatcgcgagggggactccattacatatgcaatcgagaacggagaccctcagcgtgtgttcaatctctctgaaaccaccggtatcctgacgctgggcaaggcactggaccgtgaatctaccgatcggtacattttgattattacagcctccgatggtcggcctgatggaacgtccaccgctacagtgaatatcgtggtaaccgatgttaatgacaatgcacccgttttcgatccttatctccctcggaacttatcagtggtggaagaggaagccaacgcctttgtgggacaggttaaggccactgacccggatgcaggtattaatggtcaggtccactattcactgggaaattttaacaatctattccgtataacctcgaacgggtccatttacactgccgtaaaattgaatagagaggttcgggactactatgagttagttgtcgtggctacagacggtgctgtgcacccgagacactccacactcactctggctatcaaggtgctggatattgatgacaattcgcctgtattcaccaattcaacttacacagtcctggtggaagaaaatcttccggcaggtactacaatcctgcagatcgaggcgaaggacgtggacctgggggctaatgtgtcatataggatccgctcccctgaggtcaagcatttcttcgccctgcatccttttacaggagagctgtccctgctccgatcactagactacgaggctttccccgatcaggaggcttctattacttttctagttgaagcctttgatatctacggaaccatgcctcctgggatcgctacagtcaccgtgattgtgaaagatatgaacgattaccctcctgtgttttccaagaggatttataaggggatggtggcaccagatgctgtaaaaggcacccccatcacaactgtgtatgctgaggacgcagaccccccaggactcccagcgtccagggtgaggtacagggtggacgacgtccaattcccttaccccgcatccatatttgaggtcgaagaagactctggacgtgtgataaccagagttaacctgaatgaagagccaaccaccatcttcaagctcgtcgttgtggcttttgacgacggggaaccggtgatgagctcatccgccactgttaaaatcttggtgctccacccaggagaaatacctcggttcacacaggaggaatatcggcctccccctgtatcagaactggcaactaagggtacaatggtcggagtcatctccgccgctgcaattaaccaaagcattgtgtacagcattgtttctggcaacgaggaggatacctttggtatcaacaatatcaccggggtcatttacgtgaatggcccactagattacgagactcggaccagctacgttctcagggttcaagcagattccttagaggtggtgctagctaacctgcgcgttccatccaagtctaacacagccaaagtctacatcgagatccaagatgagaacaaccatccacccgtgtttcagaagaagttttacatcggcggtgtgagtgaggacgcccgaatgtttacctccgtactgcgcgttaaagctactgataaagacacgggaaattacagcgtgatggcgtatcgcttgatcattccaccgattaaagagggcaaagaggggtttgtcgtagagacatacactggactgataaaaacagcaatgctgtttcacaatatgcggcgttcgtatttcaagtttcaggtgatcgccacagatgattacgggaaaggactctccggtaaggcagacgttctggtttctgtagtaaatcaactcgacatgcaagtgattgtcagtaatgttccaccaactctggtggagaaaaagatcgaagacctaaccgaaatactcgatcggtacgtacaggagcagataccaggcgctaaggttgtcgtcgagagtataggagctagacgccatggggacgcattcagtcttgaggattataccaagtgcgaccttacagtctatgcaatagatccccagactaacagagccatcgataggaacgaactgttcaagttcctggacggaaaactcctcgatataaataaggacttccagccctattatggagagggcggaagaatccttgagattcggactcccgaggccgtaacatccatcaagaaaaggggagagagcttgggctacaccgagggcgctctccttgccctcgcctttattatcatcctttgttgcattccagcaatactcgtggtcctggtcagctaccgccagttcaaggtgcgccaggcagaatgtactaaaacggctcggatacaggctgctctgccagcggcaaagcctgccgtaccagcacctgctccagtggctgctcctccgccacccccacctcctccacctggtgcacacctgtacgaagaattaggggacagttctatgcataaaaactacccatggtccctagagctcatcttagcacgaaacatggacaaaataattacggttatgagcatgggcatgaagtgcctgaatatgggcgtcgccgttgattgctatcaccagctggataggcgaaatatggtaagatggttggtcaagttgcgcaagaatatgagacggaagaggaagtcacagcgtaaattgaaaaaccagaggttaaaattagaatccctcgtgagacggaaaaaatag

SEQ ID NO: 54622 - DNA, 2160 bp, Artificial Sequence
  derived and/or modified sequence
atgtttcgacagttctatttgtggacttgcctggccagtggcatcatcctcgggtctctctttgaaatttgtttgggccagtacgacgacgactgtaaactcgccagaggaggtcctcctgcaaccatagtggctatcgacgaagaaagtaggaatgggacgattcttgtcgataacatgctgattaagggaaccgctggaggtcccgaccctacaatagagttgtcattgaaagacaatgtagattattgggtgctgatggaccccgtcaaacagatgctctttctgaatagtaccggacgagtgttagatagggaccctcccatgaatatccactctatcgtggtgcaggtacaatgtatcaacaagaaggtgggaactattatatatcatgaggttcgtattgtggtgagagaccgcaatgataattctcctacgtttaagcatgagtcttactatgcaaccgtgaacgagctgacgccagtaggtaccaccatcttcacaggcttcagtggcgataacggagccactgacatcgacgacggccctaacggtcagatcgagtacgtgatccagtacaatcctgacgaccctacaagcaacgacacctttgagatccccctcatgctgactggcaacatagtacttaggaagaggctgaattacgaggacaagacaagatactttgtgatcatccaggcaaacgacagagcacaaaatctaaacgagaggcgcaccacgacaaccaccctgacggtggacgttcttgacggagacgatctggggcctatgttcctcccctgcgtgctggttcctaatacacgagattgtaggcccctgacctaccaggccgcaatcccagaactccggacaccagaagaacttaacccaattatagtgacaccccctatccaggctatcgaccaggacaggaatatccaacctccaagtgaccgtcctggaattttatattcgatcctagtgggcacaccagaggattacccacggttcttccatatgcatccaagaactgcagagctatctctgctggagcccgtcaatagagattttcaccagaagtttgacctcgtgattaaagccgagcaagataatggccatcccctgcctgcctttgccggactgcatattgaaatactcgatgagaataatcagtcaccatactttaccatgccgagttaccaggggtacatcctggagtctgctccagttggggctacaatctctgactccctgaatcttacatcccccctgcgcatagtggctcttgacaaagatatcgaggacgaagaacctaaaaaaatcaagaagcctaaagttgaaattcgggaacccagcgaggaagaagaggtcgtcgtgaccattgagaaacctccagcagcagaacctacatacactacgtggaaacgggcaaggattttcccgatgatatttaaaaaggtccggggtttagcggataaacggggaattgtggatctggagggcgaggaatggcagagacgtctagaggaggaggacaaagattatctgaagctcactctggaccaggaggaagcgacggaaagtaccgtggaatccgaggaagagtcgagcagcgactacacggagtattccgaagaggagagtgaattttctgaatctgagaccaccgaagaggagtcagaaagcgagaccccaagcgaagaagaggagagcagtacaccagagtccgaggagagcgagtccactgaatccgagggcgaaaaggcccgaaagaacatcgtcctggccaggagacggccaatggtggaggaggtcaaggaagtgaagggcagaaaggaggagccccaggaggagcaaaaggaaccaaaaatggaggaggaggagcactctgaggaggaggagtccggtcctgctcccgttgaagagtcaacggatccagaggcccaggacatccccgaagaagggtccgctgagtcagcgtcagtcgagggaggcgtcgagtctgaagaggaatcagaatctgggtcttcatcttctagctctgagtctcagagtggcggaccctggggatatcaggttccagcatacgaccgcagcaaaaatgctaaccagaaaaagtctcctggtgctaatagtgaaggctacaacacggctctctag

SEQ ID NO: 54623 - DNA, 1953 bp, Artificial Sequence
  derived and/or modified sequence
atgttccggcagttttatctctggacctgtcttgcctccggcatcatcctgggaagcctgtttgaaatctgcctgggccagtacgacgatgattgcaagctcgcgcgtgggggaccacctgcaaccatcgtggccatcgatgaggagtcgcgtaacggcactattctggtggacaacatgctcattaagggtacagctggcggaccggaccccacaattgaattaagcttgaaggacaatgtggactattgggtactgatggatcctgttaagcaaatgctctttctaaatagcacagggcgtgtgctggaccgtgatcctcccatgaatatacactcgattgtggtacaagtgcagtgcataaacaagaaggttggtaccatcatatatcacgaagttaggattgtcgtcagggatcggaatgataatagcccgacctttaagcacgaatcctactatgccacagtgaatgagctgactcccgtggggacgacaatatttaccggtttttcaggagacaatggagccaccgacatcgacgacggtcctaacggccaaatcgagtacgtgattcagtataaccctgacgatcccacaagtaatgacacttttgaaatccccctgatgctgacggggaacatcgtgttaagaaagagactcaattatgaagacaaaacccgatactttgtcatcattcaagcaaatgaccgcgctcagaacctcaacgagcggcgtaccactacaacgacactgaccgtcgatgtgctggatggagatgaccttgggccaatgttcctgccctgtgttcttgtgcccaatactagagactgccgccctctcacttatcaggccgcaattcctgagctgcgtacacccgaagaactcaaccccataatcgttacacccccaatccaggctatcgatcaggaccggaatatccagccaccaagcgatcgtcccggtatcctgtatagtatcttggtcggcaccccagaagattacccgaggttctttcacatgcacccacgaaccgccgagttatctttactcgagcccgtgaatcgcgatttccatcaaaagttcgatctggtgatcaaagaggagccaaaaaagataaagaagcccaaggtggagattagagagccaagcgaagaggaggaagtcgtcgtgactatagaaaaacccccagccgctgagcctacctacacaacatggaaaagagcccgaatttttcccatgatcttcaagaaggttcgaggactcgctgataaaagaggcattgtggatctagaaggggaagaatggcagcgcagacttgaagaggaggataaggattatctaaagttaaccctggaccaggaggaggcaactgaatcaacggtggagtcagaggaggagagttcctctgactatacagaatactcagaagaggaaagcgaatttagtgaatcagagacaaccgaagaggaatccgagagcgagacacctagcgaagaagaggagagtagtacccccgagtccgaggagagcgagagtaccgaatctgaaggcgagaaagcgaggaagaacattgtgctcgctcgccgaaggcccatggttgaagaggtaaaagaggttaagggaagaaaggaggagccccaggaagagcagaaagaacccaaaatggaagaggaagaacacagtgaggaggaggaatccggacctgcccctgtggaggagtctactgatcctgaggcacaggatatccccgaggaagggtccgccgagagtgcaagcgtggaggggggtgtcgagtctgaggaagaatccgagagcggaagttcctcatcatcaagcgaaagccagtccggaggtccatggggttaccaggtgcccgcatacgacaggtctaagaatgcgaatcagaaaaaatctcccggagctaacagcgaggggtacaatacagccctatag

SEQ ID NO: 54624 - DNA, 3453 bp, Artificial Sequence
  derived and/or modified sequence
atgcctagttaccagggatatattctggaatcagcccctgttggcgctacaatttccgactcattaaatctgacaagccccctgagaatcgtggcactggacaaggacatagaagatgttccaccgtcaggggtaccaactaaagatcccgaacttcatctcttcctgaatgactacaccagcgtgttcaccgtgacacaaaccgggattactcgctacctgacgctgcttcaaccggtggaccgcgaggagcaacagacttatacctttagtatcactgccttcgatggtgtgcaagagtcggagcccgttatcgttaatatccaagttatggacgctaacgataacacacccaccttcccagaaatctcatacgatgtatatgtgtataccgacatgagaccgggtgatagcgtcattcagcttacagcggtcgacgctgacgagggttccaacggcgagatcacctacgagatcttggtcggggctcagggggatttcataattaataagaccactggcctgataactattgctccaggcgtggagatgatagttgggagaacctatgcactcactgtgcaggctgcagataatgctcctcccgcagagagaagaaactccatttgcactgtctatatcgaagtgttgcccccaaataaccagtcaccaccgcgttttcctcagctaatgtatagtcttgagatttcagaagctatgcgagttggcgctgttctgttgaatttacaggctaccgaccgagagggggacagtatcacttatgctattgaaaacggcgacccacagagagtgttcaacctgtccgaaacaactggcattctcacactcggcaaggccctagatcgagagagtacagacaggtacatcctcattattaccgcttcagacgggcgtcctgacggaacatctaccgccaccgtgaacattgtggttacagacgtcaatgacaacgccccagtgtttgacccttatctccctaggaatctgagtgtggtggaggaggaggctaatgcgttcgttggtcaggtgaaagcaacagaccctgatgcgggaatcaacggacaggtgcactactctctgggcaacttcaataatctgtttcggatcactagtaacggatccatctacaccgccgtgaaattaaatagagaagtgcgggactattacgaactggtggtggttgcaacagatggggcagtgcacccaagacatagtaccctgactctggctataaaggtcctggacatagatgacaatagtccggtgttcacgaatagcacatatacagtcctcgtggaagaaaacttgcccgcagggaccaccatactgcagatagaggccaaggatgtcgatctgggcgcaaatgtgtcatacaggatccggagccccgaagtgaaacactttttcgctctccatccatttactggggaactctctttgctgcgaagcctggactacgaggcattccccgatcaggaggcatccatcacgttcctggtggaagcctttgatatctatgggacaatgccaccgggaattgccactgtcaccgtcattgtgaaggatatgaacgactaccccccagtgttttccaagcgcatatacaagggaatggttgccccagatgctgttaagggaacaccgatcaccactgtgtatgcagaggatgctgatcctccgggtttacccgcaagtcgagtccggtaccgggtcgacgatgtgcagtttccctaccccgctagcatcttcgaggttgaggaagatagcggccgtgtcattacaagagtgaatcttaatgaggaacctacaaccattttcaagctcgtggtggtggccttcgacgatggagagccagtgatgtcaagctctgccacagtcaaaatcttggtgctacatcccggtgagatcccccgattcactcaggaagagtatcggcctcccccagtctcggagctcgcaacaaaaggcaccatggtgggcgtcatcagcgcagctgccataaaccaaagtatcgtctatagcatcgtgtctggcaacgaagaggacacatttggcatcaataacatcactggagtcatctatgttaacggccctctggactatgagaccaggacctcctatgtgcttcgggtgcaagccgactcccttgaagttgtgctggcaaacttgagagtgccctcgaaaagcaatacagccaaggtgtatatagagatacaagacgaaaataaccacccgcctgtattccagaaaaagttctacatcgggggtgtgtcagaagacgccagaatgtttacctccgtactgcgggttaaggcaaccgacaaggataccgggaactactccgtcatggcttatcgattaataattccccctattaaagaaggtaaggaggggtttgtcgtggagacgtataccggtcttatcaaaaccgctatgctgtttcataatatgcgacgctcttattttaaatttcaagtgattgccactgacgattatgggaaagggctgagcggaaaagcagatgttttggtatctgtcgttaaccaacttgatatgcaggtcattgtatccaacgtaccccctacgctagtggagaaaaagatcgaagacttgacagagatcctcgacagatacgtgcaggagcagatccctggagcaaaggttgtggtggagagcatcggggcaagaaggcacggagatgccttttcgttggaagactacaccaaatgtgacttaaccgtctacgcaatcgatccacaaaccaacagagctattgatcggaatgaactgtttaaatttttggatgggaaactccttgatatcaacaaagactttcagccttactatggagaaggcggtcggattcttgagatccggacgccagaagctgtgacttctatcaaaaagagaggcgaaagcctcggttacactgagggcgctttgctggctctggcctttattatcatcctgtgctgtatccctgccatcctcgtggtgctggtgtcctatcgtcagtttaaagtgcgccaagcagagtgcacaaagaccgctcgtatccaggccgcattgcccgcagctaaacctgccgttcctgcacctgccccagtggctgccccacctccacctccacctccccctcccggagctcacttgtacgaagaacttggggactcaagcatgcataaaaactatccctggagccttgagctgatcctggcacggaatatggataagattataacggtgatgtcgatgggaatgaagtgtttgaatatgggggtggccgtagattgttatcatcagctcgatcgcaggaatatggtgcggtggctggtgaagctgcggaaaaacatgcgcagaaaaagaaagagccaacgcaagctgaagaaccagagactgaagctcgaatctctcgttcgccgtaagaaatag

SEQ ID NO: 54625 - DNA, 990 bp, Artificial Sequence
  derived and/or modified sequence
atgtttcgccagttctatctgtggacgtgtctggcaagtggcattatccttggctccctctttgagatctgcctggggcaatacgacgacgattgcaagctggcaagaggcggtcccccagccaccatagtagccattgatgaggaaagccggaacggaaccatccttgtcgacaacatgttaatcaaagggaccgccggtgggccagaccccacaatcgagctttcgctcaaggataatgtggactattgggtgcttatggaccccgtgaaacaaatgctcttcctcaactcaacaggccgagttcttgaccgagatccaccgatgaatattcattctatcgtcgtgcaagtgcagtgcataaataagaaagttggcaccatcatctaccacgaggtaagaatcgtggtgagagaccgtaatgataactcccctacattcaaacatgagtcctactacgccacggtgaacgaactgaccccggtagggacgaccatctttaccggttttagcggcgacaatggagcaactgacatcgatgatggccctaatggccagatagagtacgtaattcagtacaatccagatgaccctacaagcaatgatactttcgagattcccctgatgctcacaggaaatatcgtattgaggaaacgtctgaactacgaggacaagacaagatacttcgtgattattcaggctaatgatcgcgctcagaatttaaacgagcgtaggactacaactaccaccctcaccgtcgacgtgctggatggtgatgacttggggccaatgttcctgccatgtgtgctggttccaaatactagagattgccggccactcacttaccaggctgctattccagagttacggacaccagacttaggatcgctgtgctcgggaactaattcgtggtgccaaggccgttctggcgttcattggtcttccccagcttggcgatgcctgtttccccgtcgcttgcatcagatgtag

SEQ ID NO: 54626 - DNA, 6044 bp, Artificial Sequence
  derived and/or modified sequence
caacgtgctgagctaatagcgacagatagagggcagacagattcctgctagcagcttagtgttagttgcttgtggtaactaaggcaggtggcatacatctcagaacgtggagaatgatggtatgctttctgagttaacatgttgaactgttttgcttttctaaaaattttcctagtaacattttcttgatgatatgagagtggatatcaatgcctcacagaaacaagaggtggaacatgtgaatgaatcgtcttggaactagattatgagcactggttctttttaaagggatgtgcaagaggcagccttggcaagaaaacttgctgcataatcttacatggactaaagatgaaactttaaaccgcaaatcagctttgagtgaactttgacagaagatgtttcgacagttttatctctggacatgtttagcttcagggatcatcctgggctctctctttgaaatctgcttgggccagtatgatgatgattgcaaactagctaggggaggaccaccagctaccatagttgctattgatgaagaaagtcggaatggtacaattctggtggacaacatgctgatcaaagggactgctggaggaccagaccccaccatagaactttctttaaaggataatgtggattactgggtgttgatggatcctgttaagcaaatgcttttcctgaacagcaccggaagagttctggatagagatccaccgatgaacatacactccattgtggtgcaggtccagtgcatcaacaaaaaagtgggcactattatctaccatgaagtgcgaatagtggtgagagacaggaatgacaactcacccactttcaagcatgaaagctactatgccacagtgaatgagctcactccagttggtaccacaatattcacaggattttcaggagacaatggagctacagatatagatgatggaccaaatggacagatagagtatgttattcagtataatccagatgatccgacatccaatgacacctttgaaattcccctaatgttgactggaaatatagtgttaaggaagaggctcaactatgaagataagactcgctactttgtcataatccaagctaatgaccgtgcccaaaatctgaatgagaggcgaaccaccaccaccactctcacagtggatgttctggatggagatgacttgggtccaatgtttcttccttgtgtccttgtgccaaacactcgtgattgccgtccactcacttatcaagctgccatacctgagttgagaactccggaagaactgaaccccattattgttacgccaccaatccaagccattgatcaggaccggaatattcaaccgccatcagataggccaggaatcctctattccatccttgttgggactcctgaggattacccacgatttttccatatgcatcctaggacagcagaacttagtctcctggagccagtaaacagagactttcaccagaaatttgatttggttattaaggctgaacaagacaatggtcatcctcttcctgcctttgccggtctacacattgaaatactggatgaaaacaatcaaagtccatattttacaatgcccagttatcaaggctatatcctggaatctgccccagtgggagcaaccatttcggacagtctcaatttgacttcacctttaagaatagtagctctggacaaggacatagaagatacaaaagacccagagcttcacctttttctgaatgactacacctcagtcttcaccgtcacacagactggtattactcgctacctcaccttacttcaaccagtggacagggaagaacagcaaacttacaccttttcgataacagcatttgatggtgtacaagaaagtgagccagtcatcgtcaatattcaagtgatggatgcaaatgataacacgccaaccttccctgaaatatcctatgatgtgtatgtttatacagacatgagacctggggacagtgtcatacagctcactgcagtcgacgcagacgaagggtcaaatggggagatcacatatgaaatccttgttggggctcagggagacttcatcatcaataaaacaacagggcttatcaccatcgctccaggggtggaaatgatagtcgggcggacttacgcactcacggtccaagcagcggataatgctcctcctgcagagcgaaggaactccatctgcactgtgtatattgaagtgcttccaccaaataatcaaagccctcctcgcttcccacagctgatgtatagccttgaaattagtgaagccatgagggttggtgctgttttattaaatctacaggcaactgatcgagagggagactcaataacatatgccattgagaatggagatcctcagagagtttttaatctttcagaaaccacggggattctaaccttagggaaagcactggacagggaaagcactgatcgctacattctgatcatcacagcttcagatggcaggccagatgggacctcaactgccacagtaaacatagtggtgacagatgtcaatgacaatgctccagtgtttgatccttatctgccaagaaatttatctgtggtggaagaagaagccaatgcctttgtgggtcaagtaaaagcaacagaccctgatgctggaataaatggtcaagtgcactacagtttgggtaactttaataatctttttcgtatcacatccaatgggagcatttacacagcagtgaagcttaacagagaagtcagggactactatgaacttgttgttgtggcaacagatggagcagtacaccctcgtcattcaactctaaccttggccatcaaggttttggacattgatgataacagtcctgtgttcaccaattcaacatacactgtccttgttgaagagaatttgccagctgggactaccatccttcaaatagaggccaaagatgtcgaccttggagcaaatgtgtcttaccggataagaagcccagaagtgaagcacttttttgcactacatccatttacaggagaactatcgcttttaaggagtttagattatgaggcatttccagaccaagaagcaagtatcacttttctggtagaggcctttgatatttatggaacaatgccacctggtattgctactgtcacagtgattgtaaaggatatgaatgattatcctcctgtctttagtaaacgaatatacaaagggatggtggctccggatgcagtcaagggtacacctatcacaacagtttatgctgaagatgcagaccctcctggattacctgcaagtcgtgtgaggtatagagtagatgatgtacagtttccttaccctgccagtatttttgaagtggaagaagattctggaagagtaataacacgagtcaatcttaatgaagaacctacaacaatttttaagttggtggtggttgcttttgatgatggggagcctgtgatgtccagcagtgccacagtgaagattcttgtcttacatcctggtgagatcccacgcttcacacaggaggaatatagacctcctccagtaagtgaacttgccaccaaagggaccatggttggtgtaatttctgctgctgccattaatcaaagtattgtgtactccattgtttcaggaaatgaagaagatacatttggaattaataacatcacaggtgttatctatgtgaatggacctctggattatgagaccaggacaagctatgtacttcgagtccaagctgattccctggaagtggtccttgccaatctccgagttccttcaaaaagcaatacagctaaagtatacattgagattcaggatgaaaataatcatcccccagtgtttcagaaaaaattctacatcggaggtgtatctgaagatgcaagaatgtttacttctgtactcagagtgaaggctactgataaagatactggcaattatagtgtcatggcctacagactcataataccaccaattaaagagggaaaagaaggatttgtagtggaaacatatacagggcttatcaaaactgctatgctcttccataatatgaggagatcctacttcaagtttcaagttattgcaactgacgactatgggaagggactgagcggcaaagccgatgtactcgtctccgtggtcaatcagctggatatgcaagtcattgtttccaatgtgcctcctactctagtggaaaaaaagatagaagatcttacagagatcttggatcgctatgttcaggaacaaattcctggtgccaaggtcgtagtggagtccattggagctcgccggcatggagatgccttttccctagaagattacaccaaatgtgacttgactgtctatgcaattgacccccaaaccaacagagccatcgatagaaatgagctttttaaatttttggatggcaaactacttgatatcaataaagactttcagccgtattatggggaaggaggacgcattctggagatccggactccagaggcagtgaccagcattaaaaagagaggagaaagtctaggatacacagaaggggccttgttggctctggccttcatcatcatcctctgctgcattcctgccatcttggtggttttggtcagctacagacagtttaaagtacgtcaagctgagtgtacaaagactgcacgaattcaggccgcattacccgcggctaaaccagcagtgccggctcctgcaccagtggcagcgcccccgccgccgccgccgcctccgccaggtgcgcatctctatgaagaacttggagacagctcaatgcataagaattatccatggagtctggaattgatcctggccaggaatatggacaagattattacagttatgagcatgggtatgaaatgcctcaatatgggagtcgccgtcgattgttaccaccagctggacaggaggaatatggtgaggtggttggtgaagctgaggaagaatatgaggaggaagaggaagagccaaagaaaattaaaaaaccaaaggttgaaattagagagcctagtgaggaggaagaagtagttgtaactatcgaaaaaccaccagcagctgagcctacatacacaacatggaagagagccagaatattccccatgatttttaagaaagttagaggattagctgataaaagaggaatcgttgaccttgagggtgaagagtggcagagacgccttgaggaagaagataaagattatttgaaactcactctggaccaagaggaagcaacagaaagcactgtagaatcagaggaggaatcctccagcgactatactgaatacagtgaagaagagtctgagttcagtgagtctgagactacagaagaggaatctgagtcagagacaccctctgaggaggaggagagttccacccctgaatcagaagaatcggaatccacagagtcagaaggagaaaaagcaaggaaaaacattgtgcttgcaagaagaaggcccatggttgaggaggtcaaggaagtcaagggtaggaaagaggagccacaagaagaacaaaaagaacctaagatggaagaagaagaacactcagaagaagaagaaagtggaccagcccctgtggaagaaagtacagaccctgaagctcaagatatccctgaagagggcagtgcagaatcagcttcggtggaaggaggtgtggaaagtgaggaggaatcagaatcaggtagtagtagcagtagtagcgaaagtcagtctggaggtccatggggctatcaggtaccagcgtatgacagaagcaagaatgcaaaccaaaagaagtcgccaggagcaaactctgaaggttacaacacagcactttgaaagagatcacagtaggtggaagttttgctgtgatgagtgctctcgtgtgcagtgccttctgtgtgttctccaaagtgacacttgaaagggaggaaattgatcaagattttgatatgacttatgatcagaagcatgccagaaaagtgaatatatatgttgtccaaatccatttgtatattagactgtattagagtaaaactgactaatccttcctatattagtaaatcagaacacatgcaat

SEQ ID NO: 54627 - DNA, 2664 bp, Artificial Sequence
  derived and/or modified sequence
caacgtgctgagctaatagcgacagatagagggcagacagattcctgctagcagcttagtgttagttgcttgtggtaactaaggcaggtggcatacatctcagaacgtggagaatgatggtatgctttctgagttaacatgttgaactgttttgcttttctaaaaattttcctagtaacattttcttgatgatatgagagtggatatcaatgcctcacagaaacaagaggtggaacatgtgaatgaatcgtcttggaactagattatgagcactggttctttttaaagggatgtgcaagaggcagccttggcaagaaaacttgctgcataatcttacatggactaaagatgaaactttaaaccgcaaatcagctttgagtgaactttgacagaagatgtttcgacagttttatctctggacatgtttagcttcagggatcatcctgggctctctctttgaaatctgcttgggccagtatgatgatgattgcaaactagctaggggaggaccaccagctaccatagttgctattgatgaagaaagtcggaatggtacaattctggtggacaacatgctgatcaaagggactgctggaggaccagaccccaccatagaactttctttaaaggataatgtggattactgggtgttgatggatcctgttaagcaaatgcttttcctgaacagcaccggaagagttctggatagagatccaccgatgaacatacactccattgtggtgcaggtccagtgcatcaacaaaaaagtgggcactattatctaccatgaagtgcgaatagtggtgagagacaggaatgacaactcacccactttcaagcatgaaagctactatgccacagtgaatgagctcactccagttggtaccacaatattcacaggattttcaggagacaatggagctacagatatagatgatggaccaaatggacagatagagtatgttattcagtataatccagatgatccgacatccaatgacacctttgaaattcccctaatgttgactggaaatatagtgttaaggaagaggctcaactatgaagataagactcgctactttgtcataatccaagctaatgaccgtgcccaaaatctgaatgagaggcgaaccaccaccaccactctcacagtggatgttctggatggagatgacttgggtccaatgtttcttccttgtgtccttgtgccaaacactcgtgattgccgtccactcacttatcaagctgccatacctgagttgagaactccggaagaactgaaccccattattgttacgccaccaatccaagccattgatcaggaccggaatattcaaccgccatcagataggccaggaatcctctattccatccttgttgggactcctgaggattacccacgatttttccatatgcatcctaggacagcagaacttagtctcctggagccagtaaacagagactttcaccagaaatttgatttggttattaaggctgaacaagacaatggtcatcctcttcctgcctttgccggtctacacattgaaatactggatgaaaacaatcaaagtccatattttacaatgcccagttatcaaggctatatcctggaatctgccccagtgggagcaaccatttcggacagtctcaatttgacttcacctttaagaatagtagctctggacaaggacatagaagatgaagagccaaagaaaattaaaaaaccaaaggttgaaattagagagcctagtgaggaggaagaagtagttgtaactatcgaaaaaccaccagcagctgagcctacatacacaacatggaagagagccagaatattccccatgatttttaagaaagttagaggattagctgataaaagaggaatcgttgaccttgagggtgaagagtggcagagacgccttgaggaagaagataaagattatttgaaactcactctggaccaagaggaagcaacagaaagcactgtagaatcagaggaggaatcctccagcgactatactgaatacagtgaagaagagtctgagttcagtgagtctgagactacagaagaggaatctgagtcagagacaccctctgaggaggaggagagttccacccctgaatcagaagaatcggaatccacagagtcagaaggagaaaaagcaaggaaaaacattgtgcttgcaagaagaaggcccatggttgaggaggtcaaggaagtcaagggtaggaaagaggagccacaagaagaacaaaaagaacctaagatggaagaagaagaacactcagaagaagaagaaagtggaccagcccctgtggaagaaagtacagaccctgaagctcaagatatccctgaagagggcagtgcagaatcagcttcggtggaaggaggtgtggaaagtgaggaggaatcagaatcaggtagtagtagcagtagtagcgaaagtcagtctggaggtccatggggctatcaggtaccagcgtatgacagaagcaagaatgcaaaccaaaagaagtcgccaggagcaaactctgaaggttacaacacagcactttgaaagagatcacagtaggtggaagttttgctgtgatgagtgctctcgtgtgcagtgccttctgtgtgttctccaaagtgacacttgaaagggaggaaattgatcaagattt

SEQ ID NO: 54628 - DNA, 2457 bp, Artificial Sequence
  derived and/or modified sequence
caacgtgctgagctaatagcgacagatagagggcagacagattcctgctagcagcttagtgttagttgcttgtggtaactaaggcaggtggcatacatctcagaacgtggagaatgatggtatgctttctgagttaacatgttgaactgttttgcttttctaaaaattttcctagtaacattttcttgatgatatgagagtggatatcaatgcctcacagaaacaagaggtggaacatgtgaatgaatcgtcttggaactagattatgagcactggttctttttaaagggatgtgcaagaggcagccttggcaagaaaacttgctgcataatcttacatggactaaagatgaaactttaaaccgcaaatcagctttgagtgaactttgacagaagatgtttcgacagttttatctctggacatgtttagcttcagggatcatcctgggctctctctttgaaatctgcttgggccagtatgatgatgattgcaaactagctaggggaggaccaccagctaccatagttgctattgatgaagaaagtcggaatggtacaattctggtggacaacatgctgatcaaagggactgctggaggaccagaccccaccatagaactttctttaaaggataatgtggattactgggtgttgatggatcctgttaagcaaatgcttttcctgaacagcaccggaagagttctggatagagatccaccgatgaacatacactccattgtggtgcaggtccagtgcatcaacaaaaaagtgggcactattatctaccatgaagtgcgaatagtggtgagagacaggaatgacaactcacccactttcaagcatgaaagctactatgccacagtgaatgagctcactccagttggtaccacaatattcacaggattttcaggagacaatggagctacagatatagatgatggaccaaatggacagatagagtatgttattcagtataatccagatgatccgacatccaatgacacctttgaaattcccctaatgttgactggaaatatagtgttaaggaagaggctcaactatgaagataagactcgctactttgtcataatccaagctaatgaccgtgcccaaaatctgaatgagaggcgaaccaccaccaccactctcacagtggatgttctggatggagatgacttgggtccaatgtttcttccttgtgtccttgtgccaaacactcgtgattgccgtccactcacttatcaagctgccatacctgagttgagaactccggaagaactgaaccccattattgttacgccaccaatccaagccattgatcaggaccggaatattcaaccgccatcagataggccaggaatcctctattccatccttgttgggactcctgaggattacccacgatttttccatatgcatcctaggacagcagaacttagtctcctggagccagtaaacagagactttcaccagaaatttgatttggttattaaggaagagccaaagaaaattaaaaaaccaaaggttgaaattagagagcctagtgaggaggaagaagtagttgtaactatcgaaaaaccaccagcagctgagcctacatacacaacatggaagagagccagaatattccccatgatttttaagaaagttagaggattagctgataaaagaggaatcgttgaccttgagggtgaagagtggcagagacgccttgaggaagaagataaagattatttgaaactcactctggaccaagaggaagcaacagaaagcactgtagaatcagaggaggaatcctccagcgactatactgaatacagtgaagaagagtctgagttcagtgagtctgagactacagaagaggaatctgagtcagagacaccctctgaggaggaggagagttccacccctgaatcagaagaatcggaatccacagagtcagaaggagaaaaagcaaggaaaaacattgtgcttgcaagaagaaggcccatggttgaggaggtcaaggaagtcaagggtaggaaagaggagccacaagaagaacaaaaagaacctaagatggaagaagaagaacactcagaagaagaagaaagtggaccagcccctgtggaagaaagtacagaccctgaagctcaagatatccctgaagagggcagtgcagaatcagcttcggtggaaggaggtgtggaaagtgaggaggaatcagaatcaggtagtagtagcagtagtagcgaaagtcagtctggaggtccatggggctatcaggtaccagcgtatgacagaagcaagaatgcaaaccaaaagaagtcgccaggagcaaactctgaaggttacaacacagcactttgaaagagatcacagtaggtggaagttttgctgtgatgagtgctctcgtgtgcagtgccttctgtgtgttctccaaagtgacacttgaaagggaggaaattgatcaagattt

SEQ ID NO: 54629 - DNA, 5058 bp, Artificial Sequence
  derived and/or modified sequence
caacgtgctgagctaatagcgacagatagagggcagacagattcctgctagcagcttagtgttagttgcttgtggtaactaaggcaggtggcatacatctcagaacgtggagaatgatggtatgctttctgagttaacatgttgaactgttttgcttttctaaaaattttcctagtaacattttcttgatgatatgagagtggatatcaatgcctcacagaaacaagaggtggaacatgtgaatgaatcgtcttggaactagattatgagcactggttctttttaaagggatgtgcaagaggcagccttggcaagaaaacttgctgcataatcttacatggactaaagatgaaactttaaaccgcaaatcagctttgagtgaactttgacagaagatgtttcgacagttttatctctggacatgtttagcttcagggatcatcctgggctctctctttgaaatctgcttgggccagtatgatgatggctgaacaagacaatggtcatcctcttcctgcctttgccggtctacacattgaaatactggatgaaaacaatcaaagtccatattttacaatgcccagttatcaaggctatatcctggaatctgccccagtgggagcaaccatttcggacagtctcaatttgacttcacctttaagaatagtagctctggacaaggacatagaagatgttccacccagtggagttcctacaaaagacccagagcttcacctttttctgaatgactacacctcagtcttcaccgtcacacagactggtattactcgctacctcaccttacttcaaccagtggacagggaagaacagcaaacttacaccttttcgataacagcatttgatggtgtacaagaaagtgagccagtcatcgtcaatattcaagtgatggatgcaaatgataacacgccaaccttccctgaaatatcctatgatgtgtatgtttatacagacatgagacctggggacagtgtcatacagctcactgcagtcgacgcagacgaagggtcaaatggggagatcacatatgaaatccttgttggggctcagggagacttcatcatcaataaaacaacagggcttatcaccatcgctccaggggtggaaatgatagtcgggcggacttacgcactcacggtccaagcagcggataatgctcctcctgcagagcgaaggaactccatctgcactgtgtatattgaagtgcttccaccaaataatcaaagccctcctcgcttcccacagctgatgtatagccttgaaattagtgaagccatgagggttggtgctgttttattaaatctacaggcaactgatcgagagggagactcaataacatatgccattgagaatggagatcctcagagagtttttaatctttcagaaaccacggggattctaaccttagggaaagcactggacagggaaagcactgatcgctacattctgatcatcacagcttcagatggcaggccagatgggacctcaactgccacagtaaacatagtggtgacagatgtcaatgacaatgctccagtgtttgatccttatctgccaagaaatttatctgtggtggaagaagaagccaatgcctttgtgggtcaagtaaaagcaacagaccctgatgctggaataaatggtcaagtgcactacagtttgggtaactttaataatctttttcgtatcacatccaatgggagcatttacacagcagtgaagcttaacagagaagtcagggactactatgaacttgttgttgtggcaacagatggagcagtacaccctcgtcattcaactctaaccttggccatcaaggttttggacattgatgataacagtcctgtgttcaccaattcaacatacactgtccttgttgaagagaatttgccagctgggactaccatccttcaaatagaggccaaagatgtcgaccttggagcaaatgtgtcttaccggataagaagcccagaagtgaagcacttttttgcactacatccatttacaggagaactatcgcttttaaggagtttagattatgaggcatttccagaccaagaagcaagtatcacttttctggtagaggcctttgatatttatggaacaatgccacctggtattgctactgtcacagtgattgtaaaggatatgaatgattatcctcctgtctttagtaaacgaatatacaaagggatggtggctccggatgcagtcaagggtacacctatcacaacagtttatgctgaagatgcagaccctcctggattacctgcaagtcgtgtgaggtatagagtagatgatgtacagtttccttaccctgccagtatttttgaagtggaagaagattctggaagagtaataacacgagtcaatcttaatgaagaacctacaacaatttttaagttggtggtggttgcttttgatgatggggagcctgtgatgtccagcagtgccacagtgaagattcttgtcttacatcctggtgagatcccacgcttcacacaggaggaatatagacctcctccagtaagtgaacttgccaccaaagggaccatggttggtgtaatttctgctgctgccattaatcaaagtattgtgtactccattgtttcaggaaatgaagaagatacatttggaattaataacatcacaggtgttatctatgtgaatggacctctggattatgagaccaggacaagctatgtacttcgagtccaagctgattccctggaagtggtccttgccaatctccgagttccttcaaaaagcaatacagctaaagtatacattgagattcaggatgaaaataatcatcccccagtgtttcagaaaaaattctacatcggaggtgtatctgaagatgcaagaatgtttacttctgtactcagagtgaaggctactgataaagatactggcaattatagtgtcatggcctacagactcataataccaccaattaaagagggaaaagaaggatttgtagtggaaacatatacagggcttatcaaaactgctatgctcttccataatatgaggagatcctacttcaagtttcaagttattgcaactgacgactatgggaagggactgagcggcaaagccgatgtactcgtctccgtggtcaatcagctggatatgcaagtcattgtttccaatgtgcctcctactctagtggaaaaaaagatagaagatcttacagagatcttggatcgctatgttcaggaacaaattcctggtgccaaggtcgtagtggagtccattggagctcgccggcatggagatgccttttccctagaagattacaccaaatgtgacttgactgtctatgcaattgacccccaaaccaacagagccatcgatagaaatgagctttttaaatttttggatggcaaactacttgatatcaataaagactttcagccgtattatggggaaggaggacgcattctggagatccggactccagaggcagtgaccagcattaaaaagagaggagaaagtctaggatacacagaaggggccttgttggctctggccttcatcatcatcctctgctgcattcctgccatcttggtggttttggtcagctacagacagtttaaagtacgtcaagctgagtgtacaaagactgcacgaattcaggccgcattacccgcggctaaaccagcagtgccggctcctgcaccagtggcagcgcccccgccgccgccgccgcctccgccaggtgcgcatctctatgaagaacttggagacagctcaatgcataagaattatccatggagtctggaattgatcctggccaggaatatggacaagattattacagttatgagcatgggtatgaaatgcctcaatatgggagtcgccgtcgattgttaccaccagctggacaggaggaatatggtgaggtggttggtgaagctgaggaagaatatgaggaggaagaggaagagccaaagaaaattaaaaaaccaaaggttgaaattagagagcctagtgaggaggaagaagtagttgtaactatcgaaaaaccaccagcagctgagcctacatacacaacatggaagagagccagaatattccccatgatttttaagaaagttagaggattagctgataaaagaggaatcgttgaccttgagggtgaagagtggcagagacgccttgaggaagaagataaagattatttgaaactcactctggaccaagaggaagcaacagaaagcactgtagaatcagaggaggaatcctccagcgactatactgaatacagtgaagaagagtctgagttcagtgagtctgagactacagaagaggaatctgagtcagagacaccctctgaggaggaggagagttccacccctgaatcagaagaatcggaatccacagagtcagaaggagaaaaagcaaggaaaaacattgtgcttgcaagaagaaggcccatggttgaggaggtcaaggaagtcaagggtaggaaagaggagccacaagaagaacaaaaagaacctaagatggaagaagaagaacactcagaagaagaagaaagtggaccagcccctgtggaagaaagtacagaccctgaagctcaagatatccctgaagagggcagtgcagaatcagcttcggtggaaggaggtgtggaaagtgaggaggaatcagaatcaggtagtagtagcagtagtagcgaaagtcagtctggaggtccatggggctatcaggtaccagcgtatgacagaagcaagaatgcaaaccaaaagaagtcgccaggagcaaactctgaaggttacaacacagcactttgaaagagatcacagtaggtggaagttttgctgtgatgagtgctctcgtgtgcagtgccttctgtgtgttctccaaagtgacacttgaaagggaggaaattgatcaagattttgatatgacttatgatcagaagcatgccagaaaagtgaatatatatgttgtccaaatccatttgtatattagactgtattagagtaaaactgactaatccttcctatattagtaaatcagaacacatgcaat

SEQ ID NO: 54630 - DNA, 2905 bp, Artificial Sequence
  derived and/or modified sequence
caacgtgctgagctaatagcgacagatagagggcagacagattcctgctagcagcttagtgttagttgcttgtggtaactaaggcaggtggcatacatctcagaacgtggagaatgatggtatgctttctgagttaacatgttgaactgttttgcttttctaaaaattttcctagtaacattttcttgatgatatgagagtggatatcaatgcctcacagaaacaagaggtggaacatgtgaatgaatcgtcttggaactagattatgagcactggttctttttaaagggatgtgcaagaggcagccttggcaagaaaacttgctgcataatcttacatggactaaagatgaaactttaaaccgcaaatcagctttgagtgaactttgacagaagatgtttcgacagttttatctctggacatgtttagcttcagggatcatcctgggctctctctttgaaatctgcttgggccagtatgatgatgattgcaaactagctaggggaggaccaccagctaccatagttgctattgatgaagaaagtcggaatggtacaattctggtggacaacatgctgatcaaagggactgctggaggaccagaccccaccatagaactttctttaaaggataatgtggattactgggtgttgatggatcctgttaagcaaatgcttttcctgaacagcaccggaagagttctggatagagatccaccgatgaacatacactccattgtggtgcaggtccagtgcatcaacaaaaaagtgggcactattatctaccatgaagtgcgaatagtggtgagagacaggaatgacaactcacccactttcaagcatgaaagctactatgccacagtgaatgagctcactccagttggtaccacaatattcacaggattttcaggagacaatggagctacagatatagatgatggaccaaatggacagatagagtatgttattcagtataatccagatgatccgacatccaatgacacctttgaaattcccctaatgttgactggaaatatagtgttaaggaagaggctcaactatgaagataagactcgctactttgtcataatccaagctaatgaccgtgcccaaaatctgaatgagaggcgaaccaccaccaccactctcacagtggatgttctggatggagatgacttgggtccaatgtttcttccttgtgtccttgtgccaaacactcgtgattgccgtccactcacttatcaagctgccatacctgagttgagaactccggatcttggatcgctatgttcaggaacaaattcctggtgccaaggtcgtagtggagtccattggagctcgccggcatggagatgccttttccctagaagattacaccaaatgtgacttgactgtctatgcaattgacccccaaaccaacagagccatcgatagaaatgagctttttaaatttttggatggcaaactacttgatatcaataaagactttcagccgtattatggggaaggaggacgcattctggagatccggactccagaggcagtgaccagcattaaaaagagaggagaaagtctaggatacacagaaggggccttgttggctctggccttcatcatcatcctctgctgcattcctgccatcttggtggttttggtcagctacagacagtttaaagtacgtcaagctgagtgtacaaagactgcacgaattcaggccgcattacccgcggctaaaccagcagtgccggctcctgcaccagtggcagcgcccccgccgccgccgccgcctccgccaggtgcgcatctctatgaagaacttggagacagctcaatgtatgaaatgcctcaatatgggagtcgccgtcgattgttaccaccagctggacaggaggaatatggtgaggtggttggtgaagctgaggaagaatatgaggaggaagaggaagagccaaagaaaattaaaaaaccaaaggttgaaattagagagcctagtgaggaggaagaagtagttgtaactatcgaaaaaccaccagcagctgagcctacatacacaacatggaagagagccagaatattccccatgatttttaagaaagttagaggattagctgataaaagaggaatcgttgaccttgagggtgaagagtggcagagacgccttgaggaagaagataaagattatttgaaactcactctggaccaagaggaagcaacagaaagcactgtagaatcagaggaggaatcctccagcgactatactgaatacagtgaagaagagtctgagttcagtgagtctgagactacagaagaggaatctgagtcagagacaccctctgaggaggaggagagttccacccctgaatcagaagaatcggaatccacagagtcagaaggagaaaaagcaaggaaaaacattgtgcttgcaagaagaaggcccatggttgaggaggtcaaggaagtcaagggtaggaaagaggagccacaagaagaacaaaaagaacctaagatggaagaagaagaacactcagaagaagaagaaagtggaccagcccctgtggaagaaagtacagaccctgaagctcaagatatccctgaagagggcagtgcagaatcagcttcggtggaaggaggtgtggaaagtgaggaggaatcagaatcaggtagtagtagcagtagtagcgaaagtcagtctggaggtccatggggctatcaggtaccagcgtatgacagaagcaagaatgcaaaccaaaagaagtcgccaggagcaaactctgaaggttacaacacagcactttgaaagagatcacagtaggtggaagttttgctgtgatgagtgctctcgtgtgcagtgccttctgtgtgttctccaaagtgacacttgaaagggaggaaattgatcaagattt

SEQ ID NO: 54631 - DNA, 4620 bp, Artificial Sequence
  derived and/or modified sequence
atgttcagacagttctacctgtggacctgcctggccagcggcatcatcctgggcagcctgttcgagatctgcctgggccagtacgacgacgactgcaagctggccagaggcggcccccccgccaccatcgtggccatcgacgaggagagcagaaacggcaccatcctggtggacaacatgctgatcaagggcaccgccggcggccccgaccccaccatcgagctgagcctgaaggacaacgtggactactgggtgctgatggaccccgtgaagcagatgctgttcctgaacagcaccggcagagtgctggacagagacccccccatgaacatccacagcatcgtggtgcaggtgcagtgcatcaacaagaaggtgggcaccatcatctaccacgaggtgagaatcgtggtgagagacagaaacgacaacagccccaccttcaagcacgagagctactacgccaccgtgaacgagctgacccccgtgggcaccaccatcttcaccggcttcagcggcgacaacggcgccaccgacatcgacgacggccccaacggccagatcgagtacgtgatccagtacaaccccgacgaccccaccagcaacgacaccttcgagatccccctgatgctgaccggcaacatcgtgctgagaaagagactgaactacgaggacaagaccagatacttcgtgatcatccaggccaacgacagagcccagaacctgaacgagagaagaaccaccaccaccaccctgaccgtggacgtgctggacggcgacgacctgggccccatgttcctgccctgcgtgctggtgcccaacaccagagactgcagacccctgacctaccaggccgccatccccgagctgagaacccccgaggagctgaaccccatcatcgtgaccccccccatccaggccatcgaccaggacagaaacatccagccccccagcgacagacccggcatcctgtacagcatcctggtgggcacccccgaggactaccccagattcttccacatgcaccccagaaccgccgagctgagcctgctggagcccgtgaacagagacttccaccagaagttcgacctggtgatcaaggccgagcaggacaacggccaccccctgcccgccttcgccggcctgcacatcgagatcctggacgagaacaaccagagcccctacttcaccatgcccagctaccagggctacatcctggagagcgcccccgtgggcgccaccatcagcgacagcctgaacctgaccagccccctgagaatcgtggccctggacaaggacatcgaggacaccaaggaccccgagctgcacctgttcctgaacgactacaccagcgtgttcaccgtgacccagaccggcatcaccagatacctgaccctgctgcagcccgtggacagagaggagcagcagacctacaccttcagcatcaccgccttcgacggcgtgcaggagagcgagcccgtgatcgtgaacatccaggtgatggacgccaacgacaacacccccaccttccccgagatcagctacgacgtgtacgtgtacaccgacatgagacccggcgacagcgtgatccagctgaccgccgtggacgccgacgagggcagcaacggcgagatcacctacgagatcctggtgggcgcccagggcgacttcatcatcaacaagaccaccggcctgatcaccatcgcccccggcgtggagatgatcgtgggcagaacctacgccctgaccgtgcaggccgccgacaacgccccccccgccgagagaagaaacagcatctgcaccgtgtacatcgaggtgctgccccccaacaaccagagcccccccagattcccccagctgatgtacagcctggagatcagcgaggccatgagagtgggcgccgtgctgctgaacctgcaggccaccgacagagagggcgacagcatcacctacgccatcgagaacggcgacccccagagagtgttcaacctgagcgagaccaccggcatcctgaccctgggcaaggccctggacagagagagcaccgacagatacatcctgatcatcaccgccagcgacggcagacccgacggcaccagcaccgccaccgtgaacatcgtggtgaccgacgtgaacgacaacgcccccgtgttcgacccctacctgcccagaaacctgagcgtggtggaggaggaggccaacgccttcgtgggccaggtgaaggccaccgaccccgacgccggcatcaacggccaggtgcactacagcctgggcaacttcaacaacctgttcagaatcaccagcaacggcagcatctacaccgccgtgaagctgaacagagaggtgagagactactacgagctggtggtggtggccaccgacggcgccgtgcaccccagacacagcaccctgaccctggccatcaaggtgctggacatcgacgacaacagccccgtgttcaccaacagcacctacaccgtgctggtggaggagaacctgcccgccggcaccaccatcctgcagatcgaggccaaggacgtggacctgggcgccaacgtgagctacagaatcagaagccccgaggtgaagcacttcttcgccctgcaccccttcaccggcgagctgagcctgctgagaagcctggactacgaggccttccccgaccaggaggccagcatcaccttcctggtggaggccttcgacatctacggcaccatgccccccggcatcgccaccgtgaccgtgatcgtgaaggacatgaacgactacccccccgtgttcagcaagagaatctacaagggcatggtggcccccgacgccgtgaagggcacccccatcaccaccgtgtacgccgaggacgccgacccccccggcctgcccgccagcagagtgagatacagagtggacgacgtgcagttcccctaccccgccagcatcttcgaggtggaggaggacagcggcagagtgatcaccagagtgaacctgaacgaggagcccaccaccatcttcaagctggtggtggtggccttcgacgacggcgagcccgtgatgagcagcagcgccaccgtgaagatcctggtgctgcaccccggcgagatccccagattcacccaggaggagtacagacccccccccgtgagcgagctggccaccaagggcaccatggtgggcgtgatcagcgccgccgccatcaaccagagcatcgtgtacagcatcgtgagcggcaacgaggaggacaccttcggcatcaacaacatcaccggcgtgatctacgtgaacggccccctggactacgagaccagaaccagctacgtgctgagagtgcaggccgacagcctggaggtggtgctggccaacctgagagtgcccagcaagagcaacaccgccaaggtgtacatcgagatccaggacgagaacaaccacccccccgtgttccagaagaagttctacatcggcggcgtgagcgaggacgccagaatgttcaccagcgtgctgagagtgaaggccaccgacaaggacaccggcaactacagcgtgatggcctacagactgatcatcccccccatcaaggagggcaaggagggcttcgtggtggagacctacaccggcctgatcaagaccgccatgctgttccacaacatgagaagaagctacttcaagttccaggtgatcgccaccgacgactacggcaagggcctgagcggcaaggccgacgtgctggtgagcgtggtgaaccagctggacatgcaggtgatcgtgagcaacgtgccccccaccctggtggagaagaagatcgaggacctgaccgagatcctggacagatacgtgcaggagcagatccccggcgccaaggtggtggtggagagcatcggcgccagaagacacggcgacgccttcagcctggaggactacaccaagtgcgacctgaccgtgtacgccatcgacccccagaccaacagagccatcgacagaaacgagctgttcaagttcctggacggcaagctgctggacatcaacaaggacttccagccctactacggcgagggcggcagaatcctggagatcagaacccccgaggccgtgaccagcatcaagaagagaggcgagagcctgggctacaccgagggcgccctgctggccctggccttcatcatcatcctgtgctgcatccccgccatcctggtggtgctggtgagctacagacagttcaaggtgagacaggccgagtgcaccaagaccgccagaatccaggccgccctgcccgccgccaagcccgccgtgcccgcccccgcccccgtggccgcccccccccccccccccccccccccccccggcgcccacctgtacgaggagctgggcgacagcagcatgcacaagaactacccctggagcctggagctgatcctggccagaaacatggacaagatcatcaccgtgatgagcatgggcatgaagtgcctgaacatgggcgtggccgtggactgctaccaccagctggacagaagaaacatggtgagatggctggtgaagctgagaaagaacatgagaagaaagagaaagagccagagaaagctgaagaaccagagactgaagctggagagcctggtgagaagaaagaagtag

SEQ ID NO: 54632 - DNA, 2160 bp, Artificial Sequence
  derived and/or modified sequence
atgttcagacagttctacctgtggacctgcctggccagcggcatcatcctgggcagcctgttcgagatctgcctgggccagtacgacgacgactgcaagctggccagaggcggcccccccgccaccatcgtggccatcgacgaggagagcagaaacggcaccatcctggtggacaacatgctgatcaagggcaccgccggcggccccgaccccaccatcgagctgagcctgaaggacaacgtggactactgggtgctgatggaccccgtgaagcagatgctgttcctgaacagcaccggcagagtgctggacagagacccccccatgaacatccacagcatcgtggtgcaggtgcagtgcatcaacaagaaggtgggcaccatcatctaccacgaggtgagaatcgtggtgagagacagaaacgacaacagccccaccttcaagcacgagagctactacgccaccgtgaacgagctgacccccgtgggcaccaccatcttcaccggcttcagcggcgacaacggcgccaccgacatcgacgacggccccaacggccagatcgagtacgtgatccagtacaaccccgacgaccccaccagcaacgacaccttcgagatccccctgatgctgaccggcaacatcgtgctgagaaagagactgaactacgaggacaagaccagatacttcgtgatcatccaggccaacgacagagcccagaacctgaacgagagaagaaccaccaccaccaccctgaccgtggacgtgctggacggcgacgacctgggccccatgttcctgccctgcgtgctggtgcccaacaccagagactgcagacccctgacctaccaggccgccatccccgagctgagaacccccgaggagctgaaccccatcatcgtgaccccccccatccaggccatcgaccaggacagaaacatccagccccccagcgacagacccggcatcctgtacagcatcctggtgggcacccccgaggactaccccagattcttccacatgcaccccagaaccgccgagctgagcctgctggagcccgtgaacagagacttccaccagaagttcgacctggtgatcaaggccgagcaggacaacggccaccccctgcccgccttcgccggcctgcacatcgagatcctggacgagaacaaccagagcccctacttcaccatgcccagctaccagggctacatcctggagagcgcccccgtgggcgccaccatcagcgacagcctgaacctgaccagccccctgagaatcgtggccctggacaaggacatcgaggacgaggagcccaagaagatcaagaagcccaaggtggagatcagagagcccagcgaggaggaggaggtggtggtgaccatcgagaagccccccgccgccgagcccacctacaccacctggaagagagccagaatcttccccatgatcttcaagaaggtgagaggcctggccgacaagagaggcatcgtggacctggagggcgaggagtggcagagaagactggaggaggaggacaaggactacctgaagctgaccctggaccaggaggaggccaccgagagcaccgtggagagcgaggaggagagcagcagcgactacaccgagtacagcgaggaggagagcgagttcagcgagagcgagaccaccgaggaggagagcgagagcgagacccccagcgaggaggaggagagcagcacccccgagagcgaggagagcgagagcaccgagagcgagggcgagaaggccagaaagaacatcgtgctggccagaagaagacccatggtggaggaggtgaaggaggtgaagggcagaaaggaggagccccaggaggagcagaaggagcccaagatggaggaggaggagcacagcgaggaggaggagagcggccccgcccccgtggaggagagcaccgaccccgaggcccaggacatccccgaggagggcagcgccgagagcgccagcgtggagggcggcgtggagagcgaggaggagagcgagagcggcagcagcagcagcagcagcgagagccagagcggcggcccctggggctaccaggtgcccgcctacgacagaagcaagaacgccaaccagaagaagagccccggcgccaacagcgagggctacaacaccgccctgtag

SEQ ID NO: 54633 - DNA, 1953 bp, Artificial Sequence
  derived and/or modified sequence
atgttcagacagttctacctgtggacctgcctggccagcggcatcatcctgggcagcctgttcgagatctgcctgggccagtacgacgacgactgcaagctggccagaggcggcccccccgccaccatcgtggccatcgacgaggagagcagaaacggcaccatcctggtggacaacatgctgatcaagggcaccgccggcggccccgaccccaccatcgagctgagcctgaaggacaacgtggactactgggtgctgatggaccccgtgaagcagatgctgttcctgaacagcaccggcagagtgctggacagagacccccccatgaacatccacagcatcgtggtgcaggtgcagtgcatcaacaagaaggtgggcaccatcatctaccacgaggtgagaatcgtggtgagagacagaaacgacaacagccccaccttcaagcacgagagctactacgccaccgtgaacgagctgacccccgtgggcaccaccatcttcaccggcttcagcggcgacaacggcgccaccgacatcgacgacggccccaacggccagatcgagtacgtgatccagtacaaccccgacgaccccaccagcaacgacaccttcgagatccccctgatgctgaccggcaacatcgtgctgagaaagagactgaactacgaggacaagaccagatacttcgtgatcatccaggccaacgacagagcccagaacctgaacgagagaagaaccaccaccaccaccctgaccgtggacgtgctggacggcgacgacctgggccccatgttcctgccctgcgtgctggtgcccaacaccagagactgcagacccctgacctaccaggccgccatccccgagctgagaacccccgaggagctgaaccccatcatcgtgaccccccccatccaggccatcgaccaggacagaaacatccagccccccagcgacagacccggcatcctgtacagcatcctggtgggcacccccgaggactaccccagattcttccacatgcaccccagaaccgccgagctgagcctgctggagcccgtgaacagagacttccaccagaagttcgacctggtgatcaaggaggagcccaagaagatcaagaagcccaaggtggagatcagagagcccagcgaggaggaggaggtggtggtgaccatcgagaagccccccgccgccgagcccacctacaccacctggaagagagccagaatcttccccatgatcttcaagaaggtgagaggcctggccgacaagagaggcatcgtggacctggagggcgaggagtggcagagaagactggaggaggaggacaaggactacctgaagctgaccctggaccaggaggaggccaccgagagcaccgtggagagcgaggaggagagcagcagcgactacaccgagtacagcgaggaggagagcgagttcagcgagagcgagaccaccgaggaggagagcgagagcgagacccccagcgaggaggaggagagcagcacccccgagagcgaggagagcgagagcaccgagagcgagggcgagaaggccagaaagaacatcgtgctggccagaagaagacccatggtggaggaggtgaaggaggtgaagggcagaaaggaggagccccaggaggagcagaaggagcccaagatggaggaggaggagcacagcgaggaggaggagagcggccccgcccccgtggaggagagcaccgaccccgaggcccaggacatccccgaggagggcagcgccgagagcgccagcgtggagggcggcgtggagagcgaggaggagagcgagagcggcagcagcagcagcagcagcgagagccagagcggcggcccctggggctaccaggtgcccgcctacgacagaagcaagaacgccaaccagaagaagagccccggcgccaacagcgagggctacaacaccgccctgtag

SEQ ID NO: 54634 - DNA, 3453 bp, Artificial Sequence
  derived and/or modified sequence
atgcccagctaccagggctacatcctggagagcgcccccgtgggcgccaccatcagcgacagcctgaacctgaccagccccctgagaatcgtggccctggacaaggacatcgaggacgtgccccccagcggcgtgcccaccaaggaccccgagctgcacctgttcctgaacgactacaccagcgtgttcaccgtgacccagaccggcatcaccagatacctgaccctgctgcagcccgtggacagagaggagcagcagacctacaccttcagcatcaccgccttcgacggcgtgcaggagagcgagcccgtgatcgtgaacatccaggtgatggacgccaacgacaacacccccaccttccccgagatcagctacgacgtgtacgtgtacaccgacatgagacccggcgacagcgtgatccagctgaccgccgtggacgccgacgagggcagcaacggcgagatcacctacgagatcctggtgggcgcccagggcgacttcatcatcaacaagaccaccggcctgatcaccatcgcccccggcgtggagatgatcgtgggcagaacctacgccctgaccgtgcaggccgccgacaacgccccccccgccgagagaagaaacagcatctgcaccgtgtacatcgaggtgctgccccccaacaaccagagcccccccagattcccccagctgatgtacagcctggagatcagcgaggccatgagagtgggcgccgtgctgctgaacctgcaggccaccgacagagagggcgacagcatcacctacgccatcgagaacggcgacccccagagagtgttcaacctgagcgagaccaccggcatcctgaccctgggcaaggccctggacagagagagcaccgacagatacatcctgatcatcaccgccagcgacggcagacccgacggcaccagcaccgccaccgtgaacatcgtggtgaccgacgtgaacgacaacgcccccgtgttcgacccctacctgcccagaaacctgagcgtggtggaggaggaggccaacgccttcgtgggccaggtgaaggccaccgaccccgacgccggcatcaacggccaggtgcactacagcctgggcaacttcaacaacctgttcagaatcaccagcaacggcagcatctacaccgccgtgaagctgaacagagaggtgagagactactacgagctggtggtggtggccaccgacggcgccgtgcaccccagacacagcaccctgaccctggccatcaaggtgctggacatcgacgacaacagccccgtgttcaccaacagcacctacaccgtgctggtggaggagaacctgcccgccggcaccaccatcctgcagatcgaggccaaggacgtggacctgggcgccaacgtgagctacagaatcagaagccccgaggtgaagcacttcttcgccctgcaccccttcaccggcgagctgagcctgctgagaagcctggactacgaggccttccccgaccaggaggccagcatcaccttcctggtggaggccttcgacatctacggcaccatgccccccggcatcgccaccgtgaccgtgatcgtgaaggacatgaacgactacccccccgtgttcagcaagagaatctacaagggcatggtggcccccgacgccgtgaagggcacccccatcaccaccgtgtacgccgaggacgccgacccccccggcctgcccgccagcagagtgagatacagagtggacgacgtgcagttcccctaccccgccagcatcttcgaggtggaggaggacagcggcagagtgatcaccagagtgaacctgaacgaggagcccaccaccatcttcaagctggtggtggtggccttcgacgacggcgagcccgtgatgagcagcagcgccaccgtgaagatcctggtgctgcaccccggcgagatccccagattcacccaggaggagtacagacccccccccgtgagcgagctggccaccaagggcaccatggtgggcgtgatcagcgccgccgccatcaaccagagcatcgtgtacagcatcgtgagcggcaacgaggaggacaccttcggcatcaacaacatcaccggcgtgatctacgtgaacggccccctggactacgagaccagaaccagctacgtgctgagagtgcaggccgacagcctggaggtggtgctggccaacctgagagtgcccagcaagagcaacaccgccaaggtgtacatcgagatccaggacgagaacaaccacccccccgtgttccagaagaagttctacatcggcggcgtgagcgaggacgccagaatgttcaccagcgtgctgagagtgaaggccaccgacaaggacaccggcaactacagcgtgatggcctacagactgatcatcccccccatcaaggagggcaaggagggcttcgtggtggagacctacaccggcctgatcaagaccgccatgctgttccacaacatgagaagaagctacttcaagttccaggtgatcgccaccgacgactacggcaagggcctgagcggcaaggccgacgtgctggtgagcgtggtgaaccagctggacatgcaggtgatcgtgagcaacgtgccccccaccctggtggagaagaagatcgaggacctgaccgagatcctggacagatacgtgcaggagcagatccccggcgccaaggtggtggtggagagcatcggcgccagaagacacggcgacgccttcagcctggaggactacaccaagtgcgacctgaccgtgtacgccatcgacccccagaccaacagagccatcgacagaaacgagctgttcaagttcctggacggcaagctgctggacatcaacaaggacttccagccctactacggcgagggcggcagaatcctggagatcagaacccccgaggccgtgaccagcatcaagaagagaggcgagagcctgggctacaccgagggcgccctgctggccctggccttcatcatcatcctgtgctgcatccccgccatcctggtggtgctggtgagctacagacagttcaaggtgagacaggccgagtgcaccaagaccgccagaatccaggccgccctgcccgccgccaagcccgccgtgcccgcccccgcccccgtggccgcccccccccccccccccccccccccccccggcgcccacctgtacgaggagctgggcgacagcagcatgcacaagaactacccctggagcctggagctgatcctggccagaaacatggacaagatcatcaccgtgatgagcatgggcatgaagtgcctgaacatgggcgtggccgtggactgctaccaccagctggacagaagaaacatggtgagatggctggtgaagctgagaaagaacatgagaagaaagagaaagagccagagaaagctgaagaaccagagactgaagctggagagcctggtgagaagaaagaagtag

SEQ ID NO: 54635 - DNA, 990 bp, Artificial Sequence
  derived and/or modified sequence
atgttcagacagttctacctgtggacctgcctggccagcggcatcatcctgggcagcctgttcgagatctgcctgggccagtacgacgacgactgcaagctggccagaggcggcccccccgccaccatcgtggccatcgacgaggagagcagaaacggcaccatcctggtggacaacatgctgatcaagggcaccgccggcggccccgaccccaccatcgagctgagcctgaaggacaacgtggactactgggtgctgatggaccccgtgaagcagatgctgttcctgaacagcaccggcagagtgctggacagagacccccccatgaacatccacagcatcgtggtgcaggtgcagtgcatcaacaagaaggtgggcaccatcatctaccacgaggtgagaatcgtggtgagagacagaaacgacaacagccccaccttcaagcacgagagctactacgccaccgtgaacgagctgacccccgtgggcaccaccatcttcaccggcttcagcggcgacaacggcgccaccgacatcgacgacggccccaacggccagatcgagtacgtgatccagtacaaccccgacgaccccaccagcaacgacaccttcgagatccccctgatgctgaccggcaacatcgtgctgagaaagagactgaactacgaggacaagaccagatacttcgtgatcatccaggccaacgacagagcccagaacctgaacgagagaagaaccaccaccaccaccctgaccgtggacgtgctggacggcgacgacctgggccccatgttcctgccctgcgtgctggtgcccaacaccagagactgcagacccctgacctaccaggccgccatccccgagctgagaacccccgacctgggcagcctgtgcagcggcaccaacagctggtgccagggcagaagcggcgtgcactggagcagccccgcctggagatgcctgttccccagaagactgcaccagatgtag

SEQ ID NO: 54636 - protein, 1681 aa, Artificial Sequence
  derived and/or modified sequence
MFRQFYLWTCLASGIILGSLFEICLGQYDDGWRYMYCKLARGGPPATIVAIDEESRNGTILVDNMLIKGTAGGPDPTIELSLKDNVDYWVLMDPVKQMLFLNSTGRVLDRDPPMNIHSIVVQVQCINKKVGTIIYHEVRIVVRDRNDNSPTFKHESYYATVNELTPVGTTIFTGFSGDNGATDIDDGPNGQIEYVIQYNPDDPTSNDTFEIPLMLTGNIVLRKRLNYEDKTRYFVIIQANDRAQNLNERRTTTTTLTVDVLDGDDLGPMFLPCVLVPNTRDCRPLTYQAAIPELRTPEELNPIIVTPPIQAIDQDRNIQPPSDRPGILYSILVGTPEDYPRFFHMHPRTAELSLLEPVNRDFHQKFDLVIKAEQDNGHPLPAFAGLHIEILDENNQSPYFTMPSYQGYILESAPVGATISDSLNLTSPLRIVALDKDIEDTKDPELHLFLNDYTSVFTVTQTGITRYLTLLQPVDREEQQTYTFSITAFDGVQESEPVIVNIQVMDANDNTPTFPEISYDVYVYTDMRPGDSVIQLTAVDADEGSNGEITYEILVGAQGDFIINKTTGLITIAPGVEMIVGRTYALTVQAADNAPPAERRNSICTVYIEVLPPNNQSPPRFPQLMYSLEISEAMRVGAVLLNLQATDREGDSITYAIENGDPQRVFNLSETTGILTLGKALDRESTDRYILIITASDGRPDGTSTATVNIVVTDVNDNAPVFDPYLPRNLSVVEEEANAFVGQVKATDPDAGINGQVHYSLGNFNNLFRITSNGSIYTAVKLNREVRDYYELVVVATDGAVHPRHSTLTLAIKVLDIDDNSPVFTNSTYTVLVEENLPAGTTILQIEAKDVDLGANVSYRIRSPEVKHFFALHPFTGELSLLRSLDYEAFPDQEASITFLVEAFDIYGTMPPGIATVTVIVKDMNDYPPVFSKRIYKGMVAPDAVKGTPITTVYAEDADPPGLPASRVRYRVDDVQFPYPASIFEVEEDSGRVITRVNLNEEPTTIFKLVVVAFDDGEPVMSSSATVKILVLHPGEIPRFTQEEYRPPPVSELATKGTMVGVISAAAINQSIVYSIVSGNEEDTFGINNITGVIYVNGPLDYETRTSYVLRVQADSLEVVLANLRVPSKSNTAKVYIEIQDENNHPPVFQKKFYIGGVSEDARMFTSVLRVKATDKDTGNYSVMAYRLIIPPIKEGKEGFVVETYTGLIKTAMLFHNMRRSYFKFQVIATDDYGKGLSGKADVLVSVVNQLDMQVIVSNVPPTLVEKKIEDLTEILDRYVQEQIPGAKVVVESIGARRHGDAFSLEDYTKCDLTVYAIDPQTNRAIDRNELFKFLDGKLLDINKDFQPYYGEGGRILEIRTPEAVTSIKKRGESLGYTEGALLALAFIIILCCIPAILVVLVSYRQRQAECTKTARIQAALPAAKPAVPAPAPVAAPPPPPPPPPGAHLYEELGDSSILYYRYEMPQYGSRRRLLPPAGQEEYGEVVGEAEEEYEEEEWARKRMIKLVVDREYETSSTGEDSAPECQRNRLHHPSIHSNINGNIYIAQNGSVVRTRRACLTDNLKVASPVRLGGPFKKLDKLAVTHEENVPLNTLSKGPFSTEKMNARPTLVTFAPCPVGTDNTAVKPLRNRLKSTVEQESMIDSKNIKEALEFHSDHTQSDDEELWMGPWNNLHIPMTKL

SEQ ID NO: 54637 - DNA, 5046 bp, Artificial Sequence
  derived and/or modified sequence
atgtttcgacaattttatttatggacgtgcttggcgtccggtatcatcctgggatccctgttcgagatttgtctgggccagtacgatgacgggtggagatatatgtactgcaagctggccagaggcggccccccagcaacaatcgtggcgatagacgaggagtcacgcaatggtactatcctggtggataacatgctgattaaaggcacagctggcggccccgacccaaccatcgaactgtcgctgaaggataacgtcgactactgggtgttaatggacccagtgaagcagatgctctttctgaatagcaccggcagggtcctcgacagggatccacccatgaacatccattcaatcgttgtacaggtccagtgcatcaacaaaaaggtggggacaatcatctaccacgaggtgcggatagtggtccgcgataggaatgacaattccccaaccttcaaacacgagagttactatgccaccgttaacgaacttactcccgtggggacgacaatctttaccggcttcagtggcgacaacggggcaacagacattgacgatggtcctaacgggcagatagaatacgtgatccaatacaatccagacgatcccacaagcaacgacaccttcgagattcctctcatgctgacaggcaacattgttcttcgcaagcgcctgaattatgaggataagacacgatatttcgtaatcatccaagcgaatgacagagcccagaatctcaacgaacgtcgtacaactaccacaaccttaacagtagacgtcctggacggcgacgacttgggtccgatgttcctgccctgcgtgttggtccccaacacgcgcgattgtcgcccgctcacgtaccaggccgccatccctgaactgaggacacctgaggagttgaatccaattattgtgactccaccaattcaggcaatcgatcaggacaggaatatccagcctccttccgacagacctggaatcctatactctattctcgtcgggacaccagaggattatccccggtttttccacatgcaccctaggaccgccgaattgagtcttttggagccggtcaaccgggatttccaccagaagttcgacctcgtgatcaaggccgagcaggacaacgggcatcctttacccgcatttgccgggcttcatatcgagatccttgatgagaataaccagtcaccatatttcactatgccatcttatcaggggtatatccttgaaagcgcgcccgttggagcaaccattagcgacagtctcaacctgacctccccattgcgaattgtggcactggacaaggatatcgaagacactaaggacccggaactccacctcttcttgaacgattacaccagcgtgtttactgtgactcagaccggcatcaccaggtacctgactctgttacaacctgtcgatcgtgaagagcagcagacctatacattttctataacagcatttgacggcgtccaggagagcgaaccggtgattgtgaatatccaggttatggatgcaaatgacaacacaccgaccttcccagaaatatcttatgacgtctacgtatataccgacatgcgacctggtgatagcgtaatccagttgaccgctgtcgacgccgacgagggctccaacggagagattacgtatgaaatcctcgtgggcgcccagggagatttcattatcaacaagactaccggcctgatcacaatcgccccgggagtcgagatgatagttggcagaacttacgcgctaacagtgcaagccgccgacaacgcaccccctgctgagcgtcgaaactccatttgtaccgtgtacattgaggtgttgccaccaaacaaccagagccctcccagattcccgcagctcatgtactccctcgaaattagcgaggccatgcgagtaggagcggtgctgcttaaccttcaggctactgacagagagggagatagtataacctacgctattgaaaacggtgacccacagagggtatttaatctaagtgaaacgacaggaatcctcacattgggaaaagccctcgatcgggaaagtactgaccgctatattctgataattaccgccagtgatggccgcccagacggtacctctaccgccacggtgaatatcgtcgtgacagacgtgaatgacaatgcccccgtcttcgatccgtacctcccgagaaacctgtccgtcgtggaggaggaggccaatgcattcgtgggtcaggttaaagccactgacccagacgctggaatcaatggacaggtgcactatagcctgggaaacttcaataaccttttcagaataacatcaaacggttcaatttatacagcagtgaaactgaaccgcgaggtgagagattactacgaactcgttgtcgtggcaacagatggcgctgtccaccctcggcattctacactaacgttggctatcaaggtgctagatattgacgacaacagtcccgtgtttaccaactcaacgtatactgtgctggtggaggaaaaccttccagccgggactacaatcttgcagatagaagccaaagacgtagatctgggtgctaacgtctcttaccggatacggtcccctgaagtgaagcactttttcgctctgcaccccttcacaggcgagctgtcactgctgcggtcactcgactatgaggcattcccagaccaggaggccagtataacatttctggtggaggcttttgatatctatggaaccatgccgcccggtatcgccaccgtcacagttattgtcaaggatatgaatgactacccccccgtgttcagcaagcggatatataagggtatggtggcccctgacgccgtgaagggtactcccatcaccacagtttacgccgaagatgcagaccctccaggtcttcccgcttccagagttaggtacagggtggatgacgtgcaattcccctaccccgcatccatttttgaggtagaggaagattcaggcagagtgataacgagagtgaacctgaacgaagaaccgactactatttttaaactcgtcgtggtggcgttcgatgatggggagcccgtgatgtcctcatccgcgactgtgaagatcctggtgttgcatccaggtgagatccccagattcacacaagaggaatatcgccctccgcccgtgtccgaactggcgaccaaaggaacaatggtaggggtcatctctgctgccgcaattaaccagagcattgtgtactctattgtctccggcaacgaggaagacacttttggcatcaacaatattactggggtgatctatgttaacggtcctttggactatgaaacgcggacctcttacgttttgcgggtgcaggctgactctctggaagtggtgctcgctaatcttcgtgtgcctagcaagagcaacacagccaaggtctacatcgagattcaggacgaaaacaatcacccgcctgtcttccagaaaaagttttatataggtggggttagcgaggacgctagaatgtttacgagcgttctgcgagtgaaagcgacagacaaggacaccggaaactattcagttatggcataccgccttattatccctccaatcaaggaaggcaaggagggtttcgtcgtcgaaacctacacaggtctcatcaagactgctatgttgtttcacaacatgcgacgctcatattttaagttccaggtgattgccacagacgactacgggaaagggctgtccggaaaagccgacgtgctggtgtcagtcgtcaaccagctggacatgcaggtaattgtgtcaaacgtgccaccaactctggttgaaaaaaagatcgaggatctgacagaaattctggacaggtatgtccaagagcaaattcctggggcaaaggtagtggttgaatctattggggcccgcagacacggtgatgcctttagcctggaagactacaccaaatgtgatctgaccgtttacgccatcgatccacagacaaaccgggcaatcgatcggaacgaactgttcaagttcctggatggcaaactgctagacatcaataaggactttcaaccctattatggagagggggggcgaattctggaaatacggacccccgaagcagtgacatcgatcaagaaaaggggcgaaagtctgggctacaccgagggtgcccttttggcccttgctttcataattatcctgtgttgcattccggctattctggtggtgctggtgagctataggcagaggcaggcagagtgcaccaagaccgcgcggatccaggcggccttacccgcagctaagcccgcggtcccagccccagcccctgtggccgctccacctccacccccaccaccgccccccggagcccacctctatgaagagcttggcgactccagcatcctgtattaccgctatgaaatgccacaatacgggtcaagacggcgattgttaccaccggctggtcaggaagaatatggcgaggtggtgggcgaggccgaggaagagtatgaggaggaagaatgggcccggaagagaatgattaaactggtggtggaccgagaatacgaaactagctctacgggcgaagactcagcacctgagtgccaacgtaatcgactgcaccatccatcgattcacagcaacataaatgggaatatctatatcgcccagaatggatcggtcgtgaggaccagacgggcatgtctcactgataatttaaaggtcgcctcaccggtcagacttgggggccctttcaagaagctcgacaagctagctgtcactcacgaagagaacgtccctctgaatactttgagcaagggtccattttcaactgagaagatgaatgcgcgacccactctcgtgaccttcgcaccgtgtcccgtaggcacagataacacagctgtgaagccgcttaggaatcgcctcaaatccacagtggagcaagaatctatgatagacagtaagaatattaaggaggccctcgaattccactctgaccacactcagtcagatgacgaagagctgtggatggggccttggaataatttgcacatccctatgacgaagctctag

SEQ ID NO: 54638 - DNA, 5046 bp, Artificial Sequence
  derived and/or modified sequence
atgttccggcagttctacctgtggacctgcctggccagcggcatcatcctgggcagcctgtttgagatctgcctgggccagtatgatgatggctggagatacatgtactgcaagctggcccggggcggccccccagccaccatcgtggccattgatgaggagagcagaaatggcaccatcctggtggacaacatgctgatcaagggcacagctgggggccctgaccccaccatcgagctgagcctgaaggacaacgtggactactgggtgctgatggaccctgtgaagcagatgctgttcctgaacagcacaggccgggtgctggaccgggacccccccatgaacatccacagcatcgtggtgcaggtgcagtgcatcaacaagaaggtgggcaccatcatctaccacgaggtgcgcatcgtggtgcgggacagaaatgacaacagccccaccttcaagcatgagagctactatgccaccgtgaatgagctgacccctgtgggcaccaccatcttcaccggcttcagcggggacaatggagccacagacattgatgatggccccaacggccagatcgagtatgtgatccagtacaacccagatgaccccaccagcaatgacacctttgagatccccctgatgctgaccggcaacatcgtgctgaggaagaggctgaactatgaggacaagacccgctacttcgtcatcatccaggccaatgaccgggcccagaacctgaatgaaagaaggaccaccaccaccaccctgactgtggatgtgctggatggagatgacctgggccccatgttcctgccctgtgtgctggtgcccaacacccgggactgccggcccctgacctaccaggccgccatccctgagctgcggaccccagaggagctgaaccccatcatcgtgaccccacccatccaggccatcgaccaggacaggaacatccagccccccagcgacaggcctggcatcctgtacagcatcctggtgggcaccccagaggactacccccgcttcttccacatgcaccccaggacagctgagctgagcctgctggagcctgtgaacagagacttccaccagaagtttgacctggtgatcaaggccgagcaggacaatggccaccccctgcctgcctttgctggcctgcacatcgagatcctggatgagaacaaccagagcccctacttcaccatgcccagctaccagggctacatcctggagagcgcccctgtgggcgccaccatcagtgacagcctgaacctgaccagccccctgagaattgtggccctggacaaggacatcgaggacaccaaggaccctgagctgcacctgttcctgaatgactacacctctgtgttcaccgtgacccagacaggcatcacccgctacctgaccctgctgcagcctgtggaccgggaggagcagcagacctacaccttcagcatcacagcctttgatggagtgcaggagagcgagcctgtgattgtgaacatccaggtgatggatgccaatgacaacacccccaccttccctgagatctcctatgatgtgtatgtgtacacagacatgaggcctggggacagcgtcatccagctgacagctgtggatgctgatgagggcagcaatggagagatcacctatgagatcctggtgggcgcccagggcgacttcatcatcaacaagaccaccggcctcatcaccatcgcccctggggtggagatgattgtgggccgcacctacgccctgactgtgcaggccgctgacaatgcccctcctgctgagaggaggaacagcatctgcaccgtgtacatcgaggtgctgccccccaacaaccagagccccccacgcttcccccagctgatgtacagcctggagatcagcgaggccatgagggtgggcgctgtgctgctgaacctgcaggccacagaccgggagggggacagcatcacctacgccattgaaaatggagacccccagagggtcttcaacctgtctgagaccaccggcatcctgaccctgggcaaggccctggaccgggagagcacagaccgctacatcctgatcatcacagccagtgatggccgcccagatggcaccagcacagccaccgtgaacatcgtggtgacagatgtgaatgacaatgcccctgtgtttgacccctacctgcccaggaacctgtctgtggtggaggaggaggccaatgcctttgtgggccaggtgaaggccacagatcctgatgctggcatcaatggccaggtgcactacagcctgggcaacttcaacaacctcttccgcatcaccagcaatggcagcatctacacagctgtgaagctgaaccgggaggtgcgggactactatgagctggtggtggtggccacagatggagctgtgcaccccaggcacagcaccctgaccctggccatcaaggtgctggacattgatgacaacagccctgtgttcaccaacagcacctacacagtgctggtggaggagaacctgcctgctggcaccaccatcctgcagatcgaggccaaggatgtggacctgggcgccaacgtgtcctaccgcatccgcagccctgaggtgaagcacttctttgccctgcaccccttcaccggggagctgagcctgctgcggagcctggactatgaggccttcccagaccaggaggccagcatcaccttcctggtggaggcctttgacatctacggcaccatgcctcctggcatcgccaccgtgaccgtcatcgtgaaggacatgaatgactacccacctgtgttcagcaagaggatctacaagggcatggtggccccagatgctgtgaagggcacccccatcaccaccgtgtatgcagaagatgctgaccccccaggcctgcctgccagccgggtgcgctacagagtggatgatgtgcagttcccctacccagccagcatctttgaggtggaggaggacagcggccgggtcatcaccagggtgaacctgaatgaggagcccaccaccatcttcaagctggtggtggtggcctttgatgatggagagcctgtgatgagcagcagcgccaccgtgaagatcctggtgctgcaccctggagagatcccccgcttcacccaggaggagtacagacctcctcctgtgtctgagctggccaccaagggcaccatggtgggcgtcatctctgctgctgccatcaaccagagcatcgtgtacagcatcgtgtctggaaatgaggaggacaccttcggcatcaacaacatcactggagtcatctacgtgaatggccccctggactatgagaccaggaccagctatgtgctgcgggtgcaggccgacagcctggaggtggtgctggccaacctgcgggtgcccagcaagagcaacacagccaaggtgtacatcgagatccaggatgagaacaaccacccccctgtgttccagaagaagttctacatcggcggcgtgtctgaagatgccaggatgttcacctctgtgctgcgggtgaaggccacagacaaggacaccggcaactacagcgtgatggcctaccgcctcatcatcccccccatcaaggagggcaaggagggctttgtggtggagacctacacaggcctcatcaagacagccatgctgttccacaacatgagaagaagctacttcaagttccaggtgattgccacagatgattatggcaagggcctgagcggcaaggcagatgtgctggtgtctgtggtgaaccagctggacatgcaggtgattgtgtccaatgtgccccccaccctggtggagaagaagattgaggacctgacagagatcctggacagatatgtgcaggagcagatccctggggccaaggtggtggtggagagcatcggggccaggagacatggagatgccttcagcctggaggactacaccaagtgtgacctgactgtgtatgccatcgacccccagaccaacagagccatcgacagaaatgaactcttcaagttcctggatggcaagctgctggacatcaacaaggacttccagccctactacggggagggcggccgcatcctggagatccgcaccccagaggccgtgaccagcatcaagaagagaggagagagcctgggctacacagagggcgccctgctggccctggccttcatcatcatcctgtgctgcatcccagccatcctggtggtgctggtgtcctaccggcagaggcaggccgagtgcaccaagacagcccgcatccaggccgccctgcctgctgccaagccagctgtgcctgccccagcccctgtggccgcccctcctcctcctcctcctcctcctcctggggcccacctgtatgaggagctgggggacagcagcatcctgtactaccgctatgagatgccccagtatggcagcagaagaaggctgctgcccccagctggccaggaggagtatggagaggtggtgggggaggccgaggaggagtatgaggaggaggagtgggccaggaagaggatgatcaagctggtggtggaccgggagtatgagaccagcagcactggagaggacagcgcccctgagtgccagaggaaccggctgcaccaccccagcatccacagcaacatcaatggaaacatctacatcgcccagaatggatctgtggtgaggacccggcgggcctgcctgacagacaacctgaaggtggccagccctgtgcggctgggcggccccttcaagaagctggacaagctggccgtgacccatgaggagaatgtgcccctgaacaccctgagcaagggccccttcagcacagagaagatgaatgcccggcccaccctggtgacctttgccccctgccctgtgggcacagacaacacagctgtgaagcccctgaggaaccggctgaagagcacagtggagcaggagagcatgattgacagcaagaacatcaaggaggccctggagttccacagcgaccacacccagagtgatgatgaggagctgtggatgggcccctggaacaacctgcacatccccatgaccaagctgtag

SEQ ID NO: 54639 - DNA, 5046 bp, Artificial Sequence
  derived and/or modified sequence
atgttccggcagttctacctgtggacctgcctggccagcggcatcatcctggggtcgctcttcgagatctgtctcggccagtacgacgacggctggcggtatatgtattgtaaactagccagagggggtccaccagcgacaatcgtagctattgatgaagaaagccggaatgggaccatccttgtggataacatgttaattaaggggactgctgggggaccagatcccacaatcgagttatccctgaaggataatgtcgactactgggtgctcatggaccccgttaagcagatgttgtttttaaattcgaccggacgtgttctggaccgggatccgccgatgaatattcacagtatagtggtgcaagtgcaatgcattaacaaaaaagtggggaccatcatctaccacgaagtacgcatcgtggtgcgtgatagaaatgataattctccgactttcaaacacgagtcgtactatgccaccgttaacgagctgacaccagttggtactacgatcttcacaggcttttctggagataacggggccactgacatcgacgacgggcctaacggacagatagaatatgtgatacaatataaccccgacgatcccacttcgaatgatacttttgagatcccactcatgctgactggtaatatcgttctccgcaaaaggctaaactacgaagacaaaacacgctacttcgtaataatccaggctaacgatcgcgctcagaaccttaatgaacgaaggacaacgaccactacactcaccgtggacgtgctggatggtgatgatctggggcccatgtttcttccttgcgttctggtccccaataccagagattgcagaccattgacttaccaggccgctattcccgagctcaggacccctgaagagttaaaccccatcatcgtcaccccgccgatccaggcgattgatcaggatcgcaacatccagcccccttcggacaggcctggcatactatattctatcctggtggggacaccggaggattacccccggttcttccacatgcaccccaggaccgcggagctcagcctcctcgagcccgtcaatcgagacttccaccagaagttcgatttggtaatcaaagccgagcaggacaacggccaccccctgcccgcttttgccggactgcacattgagattctggatgagaacaaccagtccccctatttcacgatgcccagttatcaggggtacatcctggaatccgcccccgtcggcgctaccatctcagattcgctgaacctcaccagccccctgaggatcgtagcgttggacaaagatatagaggatactaaggatcccgaactacacctctttctcaatgactacactagtgtctttaccgtgacccagactgggatcacacggtacctgactttactgcagcccgtcgatcgggaagagcagcaaacatataccttctctatcaccgcttttgatggtgtgcaagagtcagagccagtcatcgttaacatccaggtgatggatgccaacgataatactcccaccttcccagagatcagttacgatgtgtatgtttatactgatatgcggccaggcgactccgttatccagttgacagctgtggatgctgatgagggctctaatggcgaaattacctacgaaatccttgttggcgctcagggcgattttatcatcaacaaaaccacgggcctcattaccatcgcgcctggtgtcgaaatgatcgttggcaggacctatgccttgaccgtccaggcggctgacaatgccccgccagcagagaggcgcaattccatctgcacagtatacatcgaagtgctcccacccaacaaccaatctccgcctcgattccctcaacttatgtatagcctggagatctccgaggctatgagggtcggagctgttcttctcaacctgcaggctacggatcgggagggtgatagcatcacttatgctattgaaaatggagatcctcagcgagtgttcaaccttagcgaaaccacaggaatcttgacattagggaaagcactcgatcgagagtccacagatagatatattcttatcatcaccgcgagcgacgggaggccagacggaaccagcacagccaccgtgaatatcgttgtgacggacgtgaatgacaatgcccccgtatttgacccatatctgccacgcaacctgagcgttgtggaagaggaagccaatgcctttgtgggacaggttaaggccaccgatcctgatgccggtattaatggtcaagtgcattatagtctgggcaatttcaacaatctttttaggattactagcaacggctcgatctacacagcagtcaagcttaaccgggaggttagggactattatgagttggtggttgtggccactgatggagccgtgcatcctcggcattccacattaacccttgcaattaaggtcctagacatagacgacaatagccccgtattcacgaatagtacatacacagttctcgtggaagaaaatctgcctgccggcactaccatactgcagatagaagccaaggatgtggacctcggagcaaatgtgagctatcgcatcagaagcccagaagtcaagcacttctttgcacttcacccatttaccggggagctgagcctcttaagatccttggattacgaggccttcccagaccaggaagcaagcattacattcctcgttgaggcttttgatatctacggcaccatgccccccggcattgcaaccgtcacagttatcgtcaaggacatgaatgattacccccctgttttcagtaaacggatatataagggcatggtcgctcccgatgctgtcaagggcactccaatcactactgtgtacgccgaagacgccgaccctcctggcctccccgcctctagagtccggtatcgagttgatgacgtccagttcccgtaccctgccagtatctttgaagttgaggaggattcaggtagagtgattacacgtgtgaacctcaatgaagaaccaaccacaatcttcaagcttgtggtcgtggcctttgacgacggggagcccgtcatgagcagtagcgctactgtcaaaattttggtactgcaccccggggagatcccccgttttacccaggaggagtacaggccaccccccgtatctgagcttgctacaaagggtaccatggtgggcgtaatctccgccgctgctattaatcaatctatagtgtactctattgtatctggtaacgaggaagacactttcggaattaacaacattactggcgtcatctacgtgaatgggcccttggattatgagacgaggacatcatacgtgctccgtgtgcaagccgactctctggaggtggtactggccaacctgagggtgccgagtaaatctaacaccgctaaagtgtacatcgaaattcaggatgagaataaccaccctccagtcttccagaagaaattctacatcggcggcgtctccgaggacgccaggatgtttacctcagtcctgcgagtgaaggcgactgataaggacaccggtaattatagcgtaatggcttatcgcctaattataccaccaattaaggagggaaaggaaggatttgtggtggagacttacacaggcctgatcaagactgcgatgctctttcacaacatgcggagaagctacttcaaatttcaggttattgccaccgacgattatggtaaggggttgtctgggaaggcggacgtcctagtgtctgtcgttaaccaattggacatgcaggttatcgtgagtaatgtgcctcctacgctcgtcgagaagaaaattgaagacctgacagaaatccttgacagatatgtccaggagcagatcccaggcgccaaagttgtggttgagtccataggcgctagacggcatggggatgcttttagcctggaggattatacaaaatgcgacctgacggtttacgctatcgatccgcagacaaaccgggcgattgatcgtaacgagctgttcaagtttctcgatggaaagttgctggacataaacaaggattttcagccttattatggagaggggggaagaatcctcgaaatccgcaccccagaagctgtgacttctattaaaaaacggggagagagcctcggttatacggagggggcgctgctggcactggcctttatcattatactctgctgcatcccggccatcctggtggtgctggtgtcttataggcagcgacaagcagagtgcacaaagactgcgagaattcaggctgcccttcccgcagcaaaaccagctgtccctgctcccgcgcccgtggccgcaccccccccccccccacctccacctcccggtgctcatctatacgaggaactcggcgattcatcaatcctgtactaccgatatgagatgcctcagtacggaagccgtaggcggctgcttccacctgcaggccaggaagagtacggggaagttgttggcgaggctgaggaggaatacgaggaagaagagtgggccaggaagcggatgatcaagctggttgtggatagagaatatgagacgagctcaacgggagaagactccgcacccgaatgccagagaaatagactccaccatccttcgatacattcaaacatcaacgggaatatatatattgctcagaatggttctgtggtacggacccgaagggcatgcctgacagataatttgaaggtcgcttctccagtccgcttggggggcccctttaaaaagctggacaagctggcagtaacacacgaggagaatgtgcccttaaacactctctctaaaggcccattttccaccgagaagatgaacgcgcggccaacattagtaactttcgctccttgccctgtgggcaccgacaacaccgcagtgaagcccctgaggaacagactgaaatcaacagtggagcaggaaagtatgatagactcaaaaaacataaaagaagctctggagtttcattccgatcacacccaaagcgacgatgaagagttatggatgggaccgtggaataaccttcacattcccatgactaagctgtag

SEQ ID NO: 54640 - DNA, 5045 bp, Artificial Sequence
  derived and/or modified sequence
atgtttagacaattctacctttggacatgcctcgcctctggaattattctagggtctttatttgaaatttgtctgggccagtacgatgacggatggcggtatatgtactgcaagttggctcggggtgggccaccagctaccatagtggccatagacgaggagagcaggaacggaacgatcctggtcgacaacatgctcattaagggcacagccggaggtcctgatccaacaatagagctatccctgaaggataacgtcgattattgggttctgatggaccctgtcaaacagatgctgttcctgaactccacgggacgcgtactcgatagggacccgcctatgaacatacactcgattgtggtccaagtgcagtgcatcaacaagaaggtgggaaccattatataccacgaagtgaggatcgtggtccgcgacagaaatgataacagccccacctttaagcacgagtcatattatgcgacggttaacgaactgacacctgtgggcactacaattttcacaggtttctctggggataatggagcgacagacattgatgacggcccaaatggccagatcgagtacgtgatccagtacaatcccgacgatcctaccagtaatgatacatttgaaattccgcttatgctgaccggtaacatagtcctacgcaagcgcctcaactacgaagataaaacccgctattttgtgattatacaggcaaacgacagggcgcaaaacttgaacgaaaggaggacgaccacgacgactttaacagtggatgtgctcgacggagatgacctcggacctatgttcttgccttgcgtcctggttccaaatacccgcgattgcaggcctttaacgtatcaggcagcaattccagaactcaggactcctgaggagctgaatcctattattgtgacaccccctattcaggcgattgaccaggatagaaatattcaaccaccgagcgaccgacccggaatactatatagcatcctagtgggtacaccagaagattatcctcgtttctttcatatgcatcccagaacagcagagttgtccctgctagagccagtgaaccgtgactttcaccagaaatttgacctggtgataaaagccgaacaggacaatggtcatccactgccagccttcgctggcttgcacattgagatcctcgacgagaacaatcagagcccctatttcactatgccgtcgtatcagggttacatactagagtccgcccctgtaggggcaactatttctgattctctgaaccttacttctcctctgcgaattgttgcactggataaggacatcgaagatactaaggatcccgaacttcacctattcttaaatgattacactagcgtcttcactgttacacaaaccggtatcacccggtacctcactctcctgcagccggtcgatcgggaagaacagcagacctacactttctccatcacagccttcgatggggttcaggaatctgagccagtcatagtcaacatccaagtgatggatgcaaacgacaatacccctactttccctgaaattagttacgatgtgtacgtatatactgacatgcgccctggggacagcgtgattcagttaacggccgtggatgctgacgaaggatcaaacggagaaatcacatacgaaattttggtcggcgctcaaggggactttattattaataaaacaaccggcctgatcactattgcccctggcgtggagatgatcgtaggcaggacgtacgctttgacagtgcaggcggctgataacgcccctccagccgaacggcgtaacagcatctgcacagtgtacattgaagtgttgccaccaaacaaccagtctccacctaggtttccacaactgatgtactcccttgaaatctcagaggccatgagagtgggggctgtgctcctcaacctgcaggcaaccgatcgagagggcgattctattacctacgcaattgaaaacggggatccacaaagggtgtttaacctgtcagagactacgggcattctgacccttggcaaagccttagatcgcgagagcaccgacagatatattctgatcatcactgccagtgatggcaggccggatgggacgtctacagcaaccgtgaatatagtggtaaccgacgtgaatgataatgccccagtcttcgacccctacctcccaagaaacctgagcgtggttgaggaagaagcaaacgccttcgtggggcaggtcaaagctacagatcccgacgctggaataaacggccaggttcactattctctcggtaattttaacaacttgtttagaatcacttctaatggcagcatttacactgctgtgaagctcaaccgtgaagttcgggattattatgaactagtagtcgtagctactgatggcgctgtccaccccagacactccactctcacgctggcaatcaaagttctcgatattgacgataactctcccgtatttaccaacagcacgtacaccgtcctggtcgaagaaaatctaccggctggcactacaattctgcagattgaagccaaagatgtggatctgggcgcaaatgtcagttaccgcatcagaagtcccgaggtgaagcacttctttgccctccatccgtttaccggtgagctgtccctgctgcggtccctggattatgaggcattcccggatcaagaagcttctataacgttcctggtagaggctttcgacatttacggcacgatgccccctggaatcgccaccgtgacagtaattgtgaaagacatgaacgactacccccctgtgttctctaaacggatttacaaagggatggtagcgcctgatgcagttaagggtacccctataaccacggtgtatgcagaggacgccgatccgcctggattacctgccagcagggtaaggtatcgggtggacgacgtgcaattcccctaccccgcttctatttttgaagtcgaagaggattccggcagagtgattacacgtgttaatttgaatgaggagccaacgaccatttttaaactggtcgtcgtcgcgttcgacgatggagagcctgtcatgagttcctccgcaactgttaaaatcctggtgctccatcctggcgagatcccccgattcacgcaggaggaatataggcccccaccggtatcagaactggctaccaagggaaccatggtcggtgtgatctctgccgcagctataaatcagagtatcgtgtactcgattgtgtccggcaatgaagaagatacgttcgggattaacaacattacaggtgtcatatacgtcaacgggccacttgattacgagaccagaacctcatacgtgctaagggtgcaggccgactcccttgaggtagttttggctaacctgcgggtgccctctaaaagcaatactgctaaggtctacatcgagattcaggatgagaataaccacccccctgttttccaaaaaaaattttatatcgggggagtctcagaggacgccagaatgtttactagcgttttgagggtgaaagccacagataaagacacaggcaattattcggttatggcttatagactgataattccaccgataaaggaaggaaaggaggggttcgttgtcgagacttacacaggtctcattaagacagccatgctattccataatatgagacggtcatacttcaagtttcaggtgatcgccacagacgactacggcaaggggctaagtggtaaagctgacgtcctggttagcgtggtgaatcagctcgacatgcaggttatcgtctctaatgtgccaccaacactcgttgagaagaagatagaggacttgaccgagatactggataggtacgtgcaggagcagatccctggtgcgaaggtggttgtggaaagcattggcgctaggcggcatggtgatgcctttagtctcgaggactatacgaagtgtgatctgacagtgtatgcaattgacccacagactaaccgcgctatagacaggaacgaattattcaagtttcttgatggaaagctgttggacatcaacaaggactttcaaccctactacggagaggggggtagaatacttgaaatacggaccccagaggcagttacctcaatcaagaagagaggggagagcctagggtacaccgagggtgcgttactggccttagcattcataattatcctgtgttgcatccctgccattctcgttgtgcttgtaagctataggcaacgacaggccgaatgcaccaagactgcgagaattcaggcagccctgcctgctgcgaagcctgcggtgcccgctcctgctccagtcgctgcacctcccccacctccgcctcccccaccaggagcacacctttacgaggaactgggagactccagcatcctctattacaggtacgaaatgcctcaatacggctctagacgccgacttctcccacctgcaggacaggaagagtacggggaagtcgtgggggaagccgaggaagagtacgaggaggaagagtgggcaaggaaacgtatgatcaagctcgtagtggatagggagtatgagacatcctcgacaggcgaggattccgccccagaatgccagagaaatcggctgcaccatccctctatccatagtaatatcaacgggaacatttacatagcacaaaatggttcagtcgtacgcactcggagggcatgtctaactgacaacctcaaagttgcctcccctgtgcggctgggcggtccttttaaaaagctggacaagctggctgtgactcatgaagagaacgtcccactgaacactctctccaaagggccttttagtacagagaaaatgaacgctcggccaacactggtaaccttcgcaccatgccctgtcggcactgacaacacagctgtcaagcccctgcgaaatcggttgaaaagcacagtagagcaggaatcaatgatcgatagcaagaacatcaaggaggccctagagtttcattctgaccacacacagtctgatgacgaagaattatggatgggaccctggaacaatctgcatatacccatgaccaagctgta

SEQ ID NO: 54641 - DNA, 9249 bp, Artificial Sequence
  derived and/or modified sequence
caacgtgctgagctaatagcgacagatagagggcagacagattcctgctagcagcttagtgttagttgcttgtggtaactaaggcaggtggcatacatctcagaacgtggagaatgatggtatgctttctgagttaacatgttgaactgttttgcttttctaaaaattttcctagtaacattttcttgatgatatgagagtggatatcaatgcctcacagaaacaagaggtggaacatgtgaatgaatcgtcttggaactagattatgagcactggttctttttaaagggatgtgcaagaggcagccttggcaagaaaacttgctgcataatcttacatggactaaagatgaaactttaaaccgcaaatcagctttgagtgaactttgacagaagatgtttcgacagttttatctctggacatgtttagcttcagggatcatcctgggctctctctttgaaatctgcttgggccagtatgatgatggctggaggtacatgtattgcaaactagctaggggaggaccaccagctaccatagttgctattgatgaagaaagtcggaatggtacaattctggtggacaacatgctgatcaaagggactgctggaggaccagaccccaccatagaactttctttaaaggataatgtggattactgggtgttgatggatcctgttaagcaaatgcttttcctgaacagcaccggaagagttctggatagagatccaccgatgaacatacactccattgtggtgcaggtccagtgcatcaacaaaaaagtgggcactattatctaccatgaagtgcgaatagtggtgagagacaggaatgacaactcacccactttcaagcatgaaagctactatgccacagtgaatgagctcactccagttggtaccacaatattcacaggattttcaggagacaatggagctacagatatagatgatggaccaaatggacagatagagtatgttattcagtataatccagatgatccgacatccaatgacacctttgaaattcccctaatgttgactggaaatatagtgttaaggaagaggctcaactatgaagataagactcgctactttgtcataatccaagctaatgaccgtgcccaaaatctgaatgagaggcgaaccaccaccaccactctcacagtggatgttctggatggagatgacttgggtccaatgtttcttccttgtgtccttgtgccaaacactcgtgattgccgtccactcacttatcaagctgccatacctgagttgagaactccggaagaactgaaccccattattgttacgccaccaatccaagccattgatcaggaccggaatattcaaccgccatcagataggccaggaatcctctattccatccttgttgggactcctgaggattacccacgatttttccatatgcatcctaggacagcagaacttagtctcctggagccagtaaacagagactttcaccagaaatttgatttggttattaaggctgaacaagacaatggtcatcctcttcctgcctttgccggtctacacattgaaatactggatgaaaacaatcaaagtccatattttacaatgcccagttatcaaggctatatcctggaatctgccccagtgggagcaaccatttcggacagtctcaatttgacttcacctttaagaatagtagctctggacaaggacatagaagatacaaaagacccagagcttcacctttttctgaatgactacacctcagtcttcaccgtcacacagactggtattactcgctacctcaccttacttcaaccagtggacagggaagaacagcaaacttacaccttttcgataacagcatttgatggtgtacaagaaagtgagccagtcatcgtcaatattcaagtgatggatgcaaatgataacacgccaaccttccctgaaatatcctatgatgtgtatgtttatacagacatgagacctggggacagtgtcatacagctcactgcagtcgacgcagacgaagggtcaaatggggagatcacatatgaaatccttgttggggctcagggagacttcatcatcaataaaacaacagggcttatcaccatcgctccaggggtggaaatgatagtcgggcggacttacgcactcacggtccaagcagcggataatgctcctcctgcagagcgaaggaactccatctgcactgtgtatattgaagtgcttccaccaaataatcaaagccctcctcgcttcccacagctgatgtatagccttgaaattagtgaagccatgagggttggtgctgttttattaaatctacaggcaactgatcgagagggagactcaataacatatgccattgagaatggagatcctcagagagtttttaatctttcagaaaccacggggattctaaccttagggaaagcactggacagggaaagcactgatcgctacattctgatcatcacagcttcagatggcaggccagatgggacctcaactgccacagtaaacatagtggtgacagatgtcaatgacaatgctccagtgtttgatccttatctgccaagaaatttatctgtggtggaagaagaagccaatgcctttgtgggtcaagtaaaagcaacagaccctgatgctggaataaatggtcaagtgcactacagtttgggtaactttaataatctttttcgtatcacatccaatgggagcatttacacagcagtgaagcttaacagagaagtcagggactactatgaacttgttgttgtggcaacagatggagcagtacaccctcgtcattcaactctaaccttggccatcaaggttttggacattgatgataacagtcctgtgttcaccaattcaacatacactgtccttgttgaagagaatttgccagctgggactaccatccttcaaatagaggccaaagatgtcgaccttggagcaaatgtgtcttaccggataagaagcccagaagtgaagcacttttttgcactacatccatttacaggagaactatcgcttttaaggagtttagattatgaggcatttccagaccaagaagcaagtatcacttttctggtagaggcctttgatatttatggaacaatgccacctggtattgctactgtcacagtgattgtaaaggatatgaatgattatcctcctgtctttagtaaacgaatatacaaagggatggtggctccggatgcagtcaagggtacacctatcacaacagtttatgctgaagatgcagaccctcctggattacctgcaagtcgtgtgaggtatagagtagatgatgtacagtttccttaccctgccagtatttttgaagtggaagaagattctggaagagtaataacacgagtcaatcttaatgaagaacctacaacaatttttaagttggtggtggttgcttttgatgatggggagcctgtgatgtccagcagtgccacagtgaagattcttgtcttacatcctggtgagatcccacgcttcacacaggaggaatatagacctcctccagtaagtgaacttgccaccaaagggaccatggttggtgtaatttctgctgctgccattaatcaaagtattgtgtactccattgtttcaggaaatgaagaagatacatttggaattaataacatcacaggtgttatctatgtgaatggacctctggattatgagaccaggacaagctatgtacttcgagtccaagctgattccctggaagtggtccttgccaatctccgagttccttcaaaaagcaatacagctaaagtatacattgagattcaggatgaaaataatcatcccccagtgtttcagaaaaaattctacatcggaggtgtatctgaagatgcaagaatgtttacttctgtactcagagtgaaggctactgataaagatactggcaattatagtgtcatggcctacagactcataataccaccaattaaagagggaaaagaaggatttgtagtggaaacatatacagggcttatcaaaactgctatgctcttccataatatgaggagatcctacttcaagtttcaagttattgcaactgacgactatgggaagggactgagcggcaaagccgatgtactcgtctccgtggtcaatcagctggatatgcaagtcattgtttccaatgtgcctcctactctagtggaaaaaaagatagaagatcttacagagatcttggatcgctatgttcaggaacaaattcctggtgccaaggtcgtagtggagtccattggagctcgccggcatggagatgccttttccctagaagattacaccaaatgtgacttgactgtctatgcaattgacccccaaaccaacagagccatcgatagaaatgagctttttaaatttttggatggcaaactacttgatatcaataaagactttcagccgtattatggggaaggaggacgcattctggagatccggactccagaggcagtgaccagcattaaaaagagaggagaaagtctaggatacacagaaggggccttgttggctctggccttcatcatcatcctctgctgcattcctgccatcttggtggttttggtcagctacagacaacgtcaagctgagtgtacaaagactgcacgaattcaggccgcattacccgcggctaaaccagcagtgccggctcctgcaccagtggcagcgcccccgccgccgccgccgcctccgccaggtgcgcatctctatgaagaacttggagacagctcaattttatattacaggtatgaaatgcctcaatatgggagtcgccgtcgattgttaccaccagctggacaggaggaatatggtgaggtggttggtgaagctgaggaagaatatgaggaggaagagtgggcaagaaaaagaatgatcaagttagttgttgatcgagagtatgaaaccagctcaactggagaagacagtgctcctgaatgtcagagaaaccgtcttcaccatcctagtatccacagtaatatcaacggcaatatatatattgcacagaatggttctgtggtgagaacccgccgtgcctgcctcacggacaacttaaaagttgcttcccctgttcgactgggagggccctttaagaaactagacaagttggcagtgacacatgaggagaatgtacctctgaacacattatcaaaggggccattttctactgaaaaaatgaatgcaagaccaactctggttacatttgccccttgccctgtggggactgacaatacagcggtgaagccactaaggaacaggctgaaaagcacagttgaacaggagtccatgattgacagtaagaacatcaaggaggctttggaatttcatagtgaccacacacagtctgatgatgaagagctttggatgggcccctggaacaacctccatataccaatgacaaaactgtgaccaattttttaaaagatattttaattaatttttacttacatttttaataaactgtgctttttattgtcactgagaaaacaatgtatggaatttatatcatgcacacaagctaaaactttgaacaatatgctttaaaattttaagagacagatttgcactcacattgttatcaattaatcgtttttcccagaaaatccttttggacatactttcactaaataacctatcgtttaaacatttagctgttttgttgggtcttgaatttttgttcattttaataaacaagaaataattactaaataatcatttatattttattgattaacatagattatgctttatttctagctccacaaaacatttttagtacatgtaattttattttccatagccaaaagggcaaaaaagaagtaagaggatatttacaggcaatgagtttatacagctgctgtctatactgccctaatttttaaaatgaaagctagaattgcaaagtaaagtaaatgagggaatcacctgtaaataattaattattttaaatcatgagcttgttttctttctttattgtcctgtataaaggttttcacattttaccataaatacatttatatcttgaccctttaggaaaccacttgaagtcgtatgtctttttatcaatattatttacaatattctcttgtcccttcatctcatatcaaatatggtagatactttagtttagtttaatcacttgaggttaaataattgtttggagcaacatggaaatctcacccttagcaaaagcttttagggaagtgagaaaggttcgagtaagcagtaatgcatctagaacgacaatttcataatggaagacatggtgaggttagggaagtctcacattaatgtcactagactttaatagtttgtaaacccagcatatcagagtaaaggaatttggcagggttgaaatgtatataatatataaagcttataaaggctatgaattcataacttcaaatgttgtgtttaacttcttccattttcaggttatttatagaatattttaatgcacatatttatgtgcctaaaatccagaaccaggaaatcattgcctgggcattttttaaaatcaaagaacatggtcttgattttttaccattgaacaaagcacagtgtttcatcataagtagaaatgaaaacagaatatcctttaaaaaacttgccttgtgtgttgcttattttccagatgatgtaaaaagaatgaaacaatatagattaagagaattcagaattctattgaatattacttagtatgatatagatgtagctcacttcaaattttgcacagtattgaccaagttcaggttttaatgaaatttcctcatgcatgcttaatatatggttgaaggactgaataatgcactattatttattcccctcttacatgtttcgcgtcttaaaaattgtttattattatgctatttcctcatttccaaagtgaatgaattgtactgacataaacttgccgacttgtaagagtagtatgtttttacttcagatttccaagaaaatatttgagatcaaatacagtaacatctcatctaccttattttattgagaattaatgcattccatacccttgccaaaaaaacaaaacaaaacaaacaaacaaaaaaaaacctagtggcattagctagattagaaacgtagaatcatgaccacacctcctggcctgccaaacaagcatccacattttcaaaagatcctaaggtggtttatatgcacattaaattttggaagcaatgaagtccggggcttattccttcaggcaccaaagcaatggtttttagtataggatactttgtataggaattagattaagcatatatttccctactaattcaatcagaggtcatcgaatataatttaatattatcttgatacccccagatcatctcagtcagcatcccttgatattctctctatatacagcttcatggctgcgtttttgtcctttgatttctggctgtgacatttaacttattctgttgttgtgcctttctcacatttttttctttcagtttatagcttctagtatcctgatgggaaagtttgtgttttttgtttgttttcttaatgttgaaaaatcatgaagcttaagatgggaattaggtacacggattcaaccaaatgttttgcgactcttagacgctttctttggttaccagtagatttggaaatatgatgttggcagaagtctagtggcctgacatatgagatgtcactgtattttaaactacattttttatgagaaaatatgcaaaattttacaagccacttagcagacacatttcagtaatttaaacttgatcatttcagtaaaaacaatcatgaggtcaatcatctgttacttaatggagatagtataaagagaagcagaatttacacagagcaaccaaaccaaatatttggtcagtatatttttgggtaacgtagagcagcaaaattattactaactaaataaatctggatcaattaaatagttactttcatagaactttcactagtctataaatccctgactcaggattaaaactgtggaacccagaggaaatacccaggtatgtttaatcttaagaatacttcatataaataacgtttcaatgtaaatatttataaagaaattggttgttatttttcctaggaaggtgtaggaaggttttcttgttgttctcaatcagcactagcttcaatcaggcagaagaaacagcaggtcttggctaatcgaggtgagaacagaatgatgtaatgactaatattgcaacccgttgattttagaaggtcttgtgggcattaagggaaagcagaggaagaatgagaaaatatggtcagagtgacataggacatttgtgacttaatgaccatcgaatcacaggtgttaatctccctctctcaatttgtctttctcattaattacagactctgagagttgtcatagaattgcaaccgtaggttggccaaaaccatctttttaaaatacagaagaaagtttgccttgaattttatatgtgatatgtcattcatgttattttaccacattgttcacagggatgttaaagactattatttacttaagtggttgttccaaaggtgattcagtagttaccattaaaatattatttaaaaacatttttatatcatagagccagaagtaattgaatattgactctcgagggaagacattttctgtcttttatttcatgagctttgatttttctctttctctgcttcaccttctgcactttataccttaagtgggatttatataccacttgaatttaattagcaaaataggcaaaaagtgctaataatctattctcagggcagatgcctattggtgcctgcaaattacacagcgataaggctgaaggataggttcaaaataatgttgaggacttacacattttatagatagtttctttctattcccaaatggtatgtgaaatttttgttctattttttttattggttttcaatagttaattttgatctttatcataagaagctttagttatagactggtatttttttcattgcaatctactttaaatttatggtcagttaagcacatgtatggaagattcgaacattgtctatagtttgaaaaatctatcaacaccttcactgctttcccaatttctttatccaaatacctgttcttccttaacaaatattatgttactgtataagaatctgaattagaagttttaagttaaaatgcattgttattcactacacaatgtttcaaaaataaattttcatttgaaaa

SEQ ID NO: 54642 - DNA, 5046 bp, Artificial Sequence
  derived and/or modified sequence
atgttcagacagttctacctgtggacctgcctggccagcggcatcatcctgggcagcctgttcgagatctgcctgggccagtacgacgacggctggagatacatgtactgcaagctggccagaggcggcccccccgccaccatcgtggccatcgacgaggagagcagaaacggcaccatcctggtggacaacatgctgatcaagggcaccgccggcggccccgaccccaccatcgagctgagcctgaaggacaacgtggactactgggtgctgatggaccccgtgaagcagatgctgttcctgaacagcaccggcagagtgctggacagagacccccccatgaacatccacagcatcgtggtgcaggtgcagtgcatcaacaagaaggtgggcaccatcatctaccacgaggtgagaatcgtggtgagagacagaaacgacaacagccccaccttcaagcacgagagctactacgccaccgtgaacgagctgacccccgtgggcaccaccatcttcaccggcttcagcggcgacaacggcgccaccgacatcgacgacggccccaacggccagatcgagtacgtgatccagtacaaccccgacgaccccaccagcaacgacaccttcgagatccccctgatgctgaccggcaacatcgtgctgagaaagagactgaactacgaggacaagaccagatacttcgtgatcatccaggccaacgacagagcccagaacctgaacgagagaagaaccaccaccaccaccctgaccgtggacgtgctggacggcgacgacctgggccccatgttcctgccctgcgtgctggtgcccaacaccagagactgcagacccctgacctaccaggccgccatccccgagctgagaacccccgaggagctgaaccccatcatcgtgaccccccccatccaggccatcgaccaggacagaaacatccagccccccagcgacagacccggcatcctgtacagcatcctggtgggcacccccgaggactaccccagattcttccacatgcaccccagaaccgccgagctgagcctgctggagcccgtgaacagagacttccaccagaagttcgacctggtgatcaaggccgagcaggacaacggccaccccctgcccgccttcgccggcctgcacatcgagatcctggacgagaacaaccagagcccctacttcaccatgcccagctaccagggctacatcctggagagcgcccccgtgggcgccaccatcagcgacagcctgaacctgaccagccccctgagaatcgtggccctggacaaggacatcgaggacaccaaggaccccgagctgcacctgttcctgaacgactacaccagcgtgttcaccgtgacccagaccggcatcaccagatacctgaccctgctgcagcccgtggacagagaggagcagcagacctacaccttcagcatcaccgccttcgacggcgtgcaggagagcgagcccgtgatcgtgaacatccaggtgatggacgccaacgacaacacccccaccttccccgagatcagctacgacgtgtacgtgtacaccgacatgagacccggcgacagcgtgatccagctgaccgccgtggacgccgacgagggcagcaacggcgagatcacctacgagatcctggtgggcgcccagggcgacttcatcatcaacaagaccaccggcctgatcaccatcgcccccggcgtggagatgatcgtgggcagaacctacgccctgaccgtgcaggccgccgacaacgccccccccgccgagagaagaaacagcatctgcaccgtgtacatcgaggtgctgccccccaacaaccagagcccccccagattcccccagctgatgtacagcctggagatcagcgaggccatgagagtgggcgccgtgctgctgaacctgcaggccaccgacagagagggcgacagcatcacctacgccatcgagaacggcgacccccagagagtgttcaacctgagcgagaccaccggcatcctgaccctgggcaaggccctggacagagagagcaccgacagatacatcctgatcatcaccgccagcgacggcagacccgacggcaccagcaccgccaccgtgaacatcgtggtgaccgacgtgaacgacaacgcccccgtgttcgacccctacctgcccagaaacctgagcgtggtggaggaggaggccaacgccttcgtgggccaggtgaaggccaccgaccccgacgccggcatcaacggccaggtgcactacagcctgggcaacttcaacaacctgttcagaatcaccagcaacggcagcatctacaccgccgtgaagctgaacagagaggtgagagactactacgagctggtggtggtggccaccgacggcgccgtgcaccccagacacagcaccctgaccctggccatcaaggtgctggacatcgacgacaacagccccgtgttcaccaacagcacctacaccgtgctggtggaggagaacctgcccgccggcaccaccatcctgcagatcgaggccaaggacgtggacctgggcgccaacgtgagctacagaatcagaagccccgaggtgaagcacttcttcgccctgcaccccttcaccggcgagctgagcctgctgagaagcctggactacgaggccttccccgaccaggaggccagcatcaccttcctggtggaggccttcgacatctacggcaccatgccccccggcatcgccaccgtgaccgtgatcgtgaaggacatgaacgactacccccccgtgttcagcaagagaatctacaagggcatggtggcccccgacgccgtgaagggcacccccatcaccaccgtgtacgccgaggacgccgacccccccggcctgcccgccagcagagtgagatacagagtggacgacgtgcagttcccctaccccgccagcatcttcgaggtggaggaggacagcggcagagtgatcaccagagtgaacctgaacgaggagcccaccaccatcttcaagctggtggtggtggccttcgacgacggcgagcccgtgatgagcagcagcgccaccgtgaagatcctggtgctgcaccccggcgagatccccagattcacccaggaggagtacagacccccccccgtgagcgagctggccaccaagggcaccatggtgggcgtgatcagcgccgccgccatcaaccagagcatcgtgtacagcatcgtgagcggcaacgaggaggacaccttcggcatcaacaacatcaccggcgtgatctacgtgaacggccccctggactacgagaccagaaccagctacgtgctgagagtgcaggccgacagcctggaggtggtgctggccaacctgagagtgcccagcaagagcaacaccgccaaggtgtacatcgagatccaggacgagaacaaccacccccccgtgttccagaagaagttctacatcggcggcgtgagcgaggacgccagaatgttcaccagcgtgctgagagtgaaggccaccgacaaggacaccggcaactacagcgtgatggcctacagactgatcatcccccccatcaaggagggcaaggagggcttcgtggtggagacctacaccggcctgatcaagaccgccatgctgttccacaacatgagaagaagctacttcaagttccaggtgatcgccaccgacgactacggcaagggcctgagcggcaaggccgacgtgctggtgagcgtggtgaaccagctggacatgcaggtgatcgtgagcaacgtgccccccaccctggtggagaagaagatcgaggacctgaccgagatcctggacagatacgtgcaggagcagatccccggcgccaaggtggtggtggagagcatcggcgccagaagacacggcgacgccttcagcctggaggactacaccaagtgcgacctgaccgtgtacgccatcgacccccagaccaacagagccatcgacagaaacgagctgttcaagttcctggacggcaagctgctggacatcaacaaggacttccagccctactacggcgagggcggcagaatcctggagatcagaacccccgaggccgtgaccagcatcaagaagagaggcgagagcctgggctacaccgagggcgccctgctggccctggccttcatcatcatcctgtgctgcatccccgccatcctggtggtgctggtgagctacagacagagacaggccgagtgcaccaagaccgccagaatccaggccgccctgcccgccgccaagcccgccgtgcccgcccccgcccccgtggccgcccccccccccccccccccccccccccccggcgcccacctgtacgaggagctgggcgacagcagcatcctgtactacagatacgagatgccccagtacggcagcagaagaagactgctgccccccgccggccaggaggagtacggcgaggtggtgggcgaggccgaggaggagtacgaggaggaggagtgggccagaaagagaatgatcaagctggtggtggacagagagtacgagaccagcagcaccggcgaggacagcgcccccgagtgccagagaaacagactgcaccaccccagcatccacagcaacatcaacggcaacatctacatcgcccagaacggcagcgtggtgagaaccagaagagcctgcctgaccgacaacctgaaggtggccagccccgtgagactgggcggccccttcaagaagctggacaagctggccgtgacccacgaggagaacgtgcccctgaacaccctgagcaagggccccttcagcaccgagaagatgaacgccagacccaccctggtgaccttcgccccctgccccgtgggcaccgacaacaccgccgtgaagcccctgagaaacagactgaagagcaccgtggagcaggagagcatgatcgacagcaagaacatcaaggaggccctggagttccacagcgaccacacccagagcgacgacgaggagctgtggatgggcccctggaacaacctgcacatccccatgaccaagctgtag

SEQ ID NO: 54643 - protein, 1684 aa, Artificial Sequence
  derived and/or modified sequence
MFRQFYLWTCLASGIILGSLFEICLGQYDDDCKLARGGPPATIVAIDEESRNGTILVDNMLIKGTAGGPDPTIELSLKDNVDYWVLMDPVKQMLFLNSTGRVLDRDPPMNIHSIVVQVQCINKKVGTIIYHEVRIVVRDRNDNSPTFKHESYYATVNELTPVGTTIFTGFSGDNGATDIDDGPNGQIEYVIQYNPDDPTSNDTFEIPLMLTGNIVLRKRLNYEDKTRYFVIIQANDRAQNLNERRTTTTTLTVDVLDGDDLGPMFLPCVLVPNTRDCRPLTYQAAIPELRTPEELNPIIVTPPIQAIDQDRNIQPPSDRPGILYSILVGTPEDYPRFFHMHPRTAELSLLEPVNRDFHQKFDLVIKAEQDNGHPLPAFAGLHIEILDENNQSPYFTMPSYQGYILESAPVGATISDSLNLTSPLRIVALDKDIEDVPPSGVPTKDPELHLFLNDYTSVFTVTQTGITRYLTLLQPVDREEQQTYTFSITAFDGVQESEPVIVNIQVMDANDNTPTFPEISYDVYVYTDMRPGDSVIQLTAVDADEGSNGEITYEILVGAQGDFIINKTTGLITIAPGVEMIVGRTYALTVQAADNAPPAERRNSICTVYIEVLPPNNQSPPRFPQLMYSLEISEAMRVGAVLLNLQATDREGDSITYAIENGDPQRVFNLSETTGILTLGKALDRESTDRYILIITASDGRPDGTSTATVNIVVTDVNDNAPVFDPYLPRNLSVVEEEANAFVGQVKATDPDAGINGQVHYSLGNFNNLFRITSNGSIYTAVKLNREVRDYYELVVVATDGAVHPRHSTLTLAIKVLDIDDNSPVFTNSTYTVLVEENLPAGTTILQIEAKDVDLGANVSYRIRSPEVKHFFALHPFTGELSLLRSLDYEAFPDQEASITFLVEAFDIYGTMPPGIATVTVIVKDMNDYPPVFSKRIYKGMVAPDAVKGTPITTVYAEDADPPGLPASRVRYRVDDVQFPYPASIFEVEEDSGRVITRVNLNEEPTTIFKLVVVAFDDGEPVMSSSATVKILVLHPGEIPRFTQEEYRPPPVSELATKGTMVGVISAAAINQSIVYSIVSGNEEDTFGINNITGVIYVNGPLDYETRTSYVLRVQADSLEVVLANLRVPSKSNTAKVYIEIQDENNHPPVFQKKFYIGGVSEDARMFTSVLRVKATDKDTGNYSVMAYRLIIPPIKEGKEGFVVETYTGLIKTAMLFHNMRRSYFKFQVIATDDYGKGLSGKADVLVSVVNQLDMQVIVSNVPPTLVEKKIEDLTEILDRYVQEQIPGAKVVVESIGARRHGDAFSLEDYTKCDLTVYAIDPQTNRAIDRNELFKFLDGKLLDINKDFQPYYGEGGRILEIRTPEAVTSIKKRGESLGYTEGALLALAFIIILCCIPAILVVLVSYRQFKVRQAECTKTARIQAALPAAKPAVPAPAPVAAPPPPPPPPPGAHLYEELGDSSMHKYEMPQYGSRRRLLPPAGQEEYGEVVGEAEEEYEEEEWARKRMIKLVVDREYETSSTGEDSAPECQRNRLHHPSIHSNINGNIYIAQNGSVVRTRRACLTDNLKVASPVRLGGPFKKLDKLAVTHEENVPLNTLSKGPFSTEKMNARPTLVTFAPCPVGTDNTAVKPLRNRLKSTVEQESMIDSKNIKEALEFHSDHTQSDDEELWMGPWNNLHIPMTKL

SEQ ID NO: 54644 - protein, 1677 aa, Artificial Sequence
  derived and/or modified sequence
MFRQFYLWTCLASGIILGSLFEICLGQYDDDCKLARGGPPATIVAIDEESRNGTILVDNMLIKGTAGGPDPTIELSLKDNVDYWVLMDPVKQMLFLNSTGRVLDRDPPMNIHSIVVQVQCINKKVGTIIYHEVRIVVRDRNDNSPTFKHESYYATVNELTPVGTTIFTGFSGDNGATDIDDGPNGQIEYVIQYNPDDPTSNDTFEIPLMLTGNIVLRKRLNYEDKTRYFVIIQANDRAQNLNERRTTTTTLTVDVLDGDDLGPMFLPCVLVPNTRDCRPLTYQAAIPELRTPEELNPIIVTPPIQAIDQDRNIQPPSDRPGILYSILVGTPEDYPRFFHMHPRTAELSLLEPVNRDFHQKFDLVIKAEQDNGHPLPAFAGLHIEILDENNQSPYFTMPSYQGYILESAPVGATISDSLNLTSPLRIVALDKDIEDTKDPELHLFLNDYTSVFTVTQTGITRYLTLLQPVDREEQQTYTFSITAFDGVQESEPVIVNIQVMDANDNTPTFPEISYDVYVYTDMRPGDSVIQLTAVDADEGSNGEITYEILVGAQGDFIINKTTGLITIAPGVEMIVGRTYALTVQAADNAPPAERRNSICTVYIEVLPPNNQSPPRFPQLMYSLEISEAMRVGAVLLNLQATDREGDSITYAIENGDPQRVFNLSETTGILTLGKALDRESTDRYILIITASDGRPDGTSTATVNIVVTDVNDNAPVFDPYLPRNLSVVEEEANAFVGQVKATDPDAGINGQVHYSLGNFNNLFRITSNGSIYTAVKLNREVRDYYELVVVATDGAVHPRHSTLTLAIKVLDIDDNSPVFTNSTYTVLVEENLPAGTTILQIEAKDVDLGANVSYRIRSPEVKHFFALHPFTGELSLLRSLDYEAFPDQEASITFLVEAFDIYGTMPPGIATVTVIVKDMNDYPPVFSKRIYKGMVAPDAVKGTPITTVYAEDADPPGLPASRVRYRVDDVQFPYPASIFEVEEDSGRVITRVNLNEEPTTIFKLVVVAFDDGEPVMSSSATVKILVLHPGEIPRFTQEEYRPPPVSELATKGTMVGVISAAAINQSIVYSIVSGNEEDTFGINNITGVIYVNGPLDYETRTSYVLRVQADSLEVVLANLRVPSKSNTAKVYIEIQDENNHPPVFQKKFYIGGVSEDARMFTSVLRVKATDKDTGNYSVMAYRLIIPPIKEGKEGFVVETYTGLIKTAMLFHNMRRSYFKFQVIATDDYGKGLSGKADVLVSVVNQLDMQVIVSNVPPTLVEKKIEDLTEILDRYVQEQIPGAKVVVESIGARRHGDAFSLEDYTKCDLTVYAIDPQTNRAIDRNELFKFLDGKLLDINKDFQPYYGEGGRILEIRTPEAVTSIKKRGESLGYTEGALLALAFIIILCCIPAILVVLVSYRHFKRRQAECTKTARIQAALPAAKPAVPAPAPVAAPPPPPPPPPGAHLYEELGDSSIYRYEMPQYGSRRRLLPPAGQEEYGEVVGEAEEEYEEEEWARKRMIKLVVDREYETSSTGEDSAPECQRNRLHHPSIHSNINGNIYIAQNGSVVRTRRACLTDNLKVASPVRLGGPFKKLDKLAVTHEENVPLNTLSKGPFSTEKMNARPTLVTFAPCPVGTDNTAVKPLRNRLKSTVEQESMIDSKNIKEALEFHSDHTQSDDEELWMGPWNNLHIPMTKL

SEQ ID NO: 54645 - protein, 92 aa, Artificial Sequence
  derived and/or modified sequence
MFRQFYLWTCLASGIILGSLFEICLGQYDDDCKLARGGPPATIVAIDEESRNGTILVDNMLIKGTAGGPDPTIELSLKDNVDYWVLMDPVKQ

SEQ ID NO: 54646 - DNA, 2886 bp, Artificial Sequence
  derived and/or modified sequence
atgtttcgacagttttacctatggacatgcctggcttccggaatcatcctggggtcattgttcgaaatttgtctgggacagtatgatgacgactgcaagttggcacgcggtggtccgcccgccacaatcgttgccatcgacgaagaatcacgcaacggtaccatcctcgtagataacatgctgataaaaggcacggcaggtggccctgaccccactattgaactttcactgaaggacaacgtagattactgggtgctcatggaccccgtaaaacagatgctgttcttaaatagtacaggccgcgtcctggatcgcgatccccctatgaacattcacagcatagtagtacaggtacagtgcattaataagaaggtgggtaccatcatatatcacgaggtccgcatcgtggtgcgagacagaaacgacaactctccaacgtttaaacatgagtcatattatgctacagtgaatgaactcacgcctgtcggtaccacgattttcacggggtttagtggagacaacggagcaaccgatatcgatgatggaccaaacgggcaaatcgagtatgtgatacaatacaatccagacgatcccacaagcaatgataccttcgaaattcctctgatgcttacaggcaatattgtcctgagaaagcgactcaactacgaggacaagactcgctatttcgtgataatccaggcaaacgaccgggcacagaacctgaatgagcgccggaccacgacgactactctcacagttgacgtactagacggcgacgacttgggccccatgttcctgccgtgcgtgcttgtacctaatacccgcgattgtcggcctttgacctaccaggcggcaataccagagttacgaacccccgaggagttaaaccccataatagtgacaccccccatccaagcaatcgatcaggatcgaaatatccagcccccctctgataggcctggcattttatattcaatcttggtagggactcctgaggactaccccaggttctttcacatgcacccccggactgccgaactcagcctccttgaaccggtcaaccgcgattttcaccaaaagtttgacctggtcattaaggccgagcaggataacggtcacccgctgcccgcctttgcaggacttcacatcgaaatcctggacgaaaacaatcagagtccatactttaccatgccgtcctatcaagggtacatcctggagtccgctccggtgggtgctactatatctgactcacttaacctcactagccccttgcgaatcgtcgcactggacaaagacatcgaggacactaaggatcccgaactgcatctgtttttgaacgattacacttccgttttcaccgttacacagacaggaatcacccggtatctgactcttctgcagccggtggacagagaggaacagcagacctacaccttcagcattaccgcctttgacggagttcaagagagcgagcctgtgattgtgaatattcaggtaatggacgctaacgacaacaccccaaccttccctgagatcagttatgacgtttatgtctacactgacatgagacccggcgacagcgtgatacagctcaccgccgtagatgcagacgagggatcaaacggagagataacttatgaaattttagtgggggcccagggcgattttatcattaataagaccactggtctcattaccatcgctccaggggtggaaatgatcgtgggccgcacctacgctctgactgtgcaagctgcagacaacgcaccaccggccgaacggagaaactccatatgtactgtctacatcgaagttcttcctcctaacaatcagagcccgccaaggttccctcagttgatgtatagcctagagatatccgaggccatgcgggtgggggctgtacttttgaacttgcaggccacggacagagaaggcgatagtattacctacgccatcgagaatggggacccacaacgtgtgttcaacttgtcagaaaccaccggcattctcacactgggaaaggccttggatagagagagtaccgatagatatatcctgattattacggcctcagacggccggcctgatggaacttctacagctacagtgaatatcgtagtcactgatgtgaacgataacgcaccagtgttcgatccatatttgcctcgaaacttatctgtggtcgaagaagaagctaatgcattcgtgggccaagtaaaggccaccgacccagacgctgggattaacggccaggtccactatagtctgggcaactttaacaacctgttcagaatcacaagcaacggttctatttatacagcggtcaagttgaatcgggaggtgagagattattacgagctggtcgtcgtcgcgacggacggggccgtgcaccctaggcacagcactctaactctcgccattaaagttctggatatcgacgacaattcccccgtattcactaatagcacttatactgtgctagtagaggaaaatctgccggctgggacaaccattttgcaaattgaggccaaagatgtcgatctaggggcaaacgtctcttaccggattagaagccccgaagtaaagcacttttttgcgcttcaccccttcaccggggaactttcccttctccgcagtctggattatgaagcatttcccgatcaagaggccagcatcacttttctggttgaagcttttgacatatacggcacgatgccccccggcattgctacggtgacagtgattgtcaaggacatgaatgactatcccccagtcttcagtaagcgtatctataaaggtatggtggctcctgacgccgtgaaaggaacccccatcacaaccgtgtatgccgaagacgccgacccacccgtctcacgccgccattag

SEQ ID NO: 54647 - DNA, 5055 bp, Artificial Sequence
  derived and/or modified sequence
atgtttcggcagttttatctgtggacttgtttggcctctggtatcatcctcggctccctcttcgaaatatgcctgggacagtatgatgatgattgcaagttagcacgaggaggacctccggcaaccatcgtagctattgatgaggagagtaggaatggcaccatccttgtagacaacatgctaatcaagggcacagccggaggtcccgatcccacaatcgagctgtccctgaaggataacgttgactactgggtgctgatggaccccgtaaaacagatgctgttcctcaattctacggggagagttctcgatagggacccaccgatgaacattcattctatcgtcgtccaggttcagtgcattaacaagaaggtggggactattatctatcatgaggttagaatcgtagtccgcgatagaaacgacaattctcccacattcaaacacgagtcatattacgcgaccgtgaatgaactgacgcccgtcggcactacaatctttaccggtttcagcggggataacggagcaacagatattgatgacggccccaatggccagattgagtatgtgattcagtacaaccccgacgatccgacatccaacgataccttcgaaatccccctgatgttgaccggaaacatcgtgctgcgcaagaggctcaattacgaggacaagactagatatttcgtgatcatccaagcaaatgaccgcgcccaaaaccttaacgaacggaggaccactactacgactctgacagtagatgtgctggacggcgatgatctagggcctatgttcttgccctgtgtgctcgtacctaacacacgcgactgccgaccactgacttaccaggctgctatacccgaacttcggacgcccgaggagcttaatcctataattgtgacgcctccaatccaggccatagatcaagacagaaacattcaacccccctcagaccgtccaggcatattgtactctattctggttgggactcctgaggattaccctcgcttttttcacatgcacccccgaactgctgagctgtctttgctggagccagtgaacagagactttcaccagaagtttgatctagttataaaagccgaacaggataatggtcatccgctgccggcctttgctggtctccacatcgaaatcttagatgagaataatcagtccccctatttcacaatgccgtcttaccaaggctatattctagagagcgcccctgtgggggctacaatctctgactcgctgaatttgaccagccccctgagaattgtggccctcgacaaagacattgaggatgtgccgccgagcggtgtgccaacaaaggatccggagctccacctctttttaaatgactacacctcagttttcacagtgacccagaccggcatcacaagatatttgaccttacttcagcctgttgatagggaggagcagcaaacctacacattctcaatcactgccttcgacggagtccaggagagtgaacccgtaatcgttaacattcaggttatggatgccaacgacaatacacctacattccccgagatctcctacgatgtttacgtgtatacagatatgcgcccaggcgacagtgtgattcaattgaccgcagtggacgccgatgagggcagcaacggcgagatcacctacgaaatcctggttggggctcagggagattttataatcaacaaaaccacagggttgatcaccatcgcccccggtgtcgaaatgattgtcggcaggacttacgcactcaccgtccaagccgcggataacgctcctcccgccgagcgccgaaactcaatctgtacagtctacattgaggtgctgccacccaacaatcaatccccccctcgatttccccagcttatgtattctcttgagatttcagaggcaatgcgtgtaggcgctgtgctcctcaatctccaggccaccgaccgagagggcgatagcatcacgtacgcaatcgagaacggggacccacagagggtctttaatctctccgagacaacagggatcttgaccctcggcaaagctctggatcgtgagtccacagacagatacatactgattataacagcttctgacgggagacccgacggaacctcgacagctactgttaacatcgtggtaactgatgtgaacgataatgcccctgtgttcgatccatatctgccccgcaacttatccgttgtcgaggaagaagctaacgcctttgtgggccaggtcaaagcaacagatccggatgccgggatcaatggacaagtacactatagcctgggcaactttaataacctgtttcgaattacgagtaatggctctatatataccgctgtgaagttgaatcgagaagtgcgggactattacgagttggtagtcgttgctaccgacggtgcggtgcacccccggcattcgacccttactctggcgataaaagtcctcgacattgatgacaattcacctgtcttcaccaactctacctacaccgtgctggtggaggaaaatcttcccgcgggcaccacgatcctgcaaatagaggcaaaggacgtagaccttggagccaacgtttcctatcgtatcagatcccccgaagttaaacacttcttcgccctgcaccccttcacgggggaactgagtctgctgagatccctggattacgaagctttcccagaccaggaagcatccatcaccttcctggttgaagcgttcgatatatacggcactatgccccctggcattgccaccgtgacagtgatcgtaaaggacatgaacgattaccccccggtattctctaaacggatctacaaaggaatggtagctcccgacgctgttaaaggcacacctatcacaacggtctatgctgaggacgcagatccccccggcctgccggccagccgggtgcggtatagggtggatgatgtgcaatttccgtacccggcctccatttttgaggtggaagaagatagtggccgggtgattactagagtgaatctcaacgaggaaccaactaccatattcaaactggtagtcgtggccttcgacgacggagaaccagttatgagtagtagcgccaccgtgaagatcttggtgctgcaccctggcgaaattccacgcttcacccaagaagagtataggcctcccccagtaagcgagttggccaccaagggtaccatggtcggggtgatctcagctgcagccatcaatcagagtattgtctacagcattgtcagcggtaacgaagaagacacattcggcatcaacaacatcaccggcgtaatttatgtgaatggccctctcgattacgaaacacggacctcctatgttttgagggtgcaagcggactcgctggaagtcgttctcgcaaacttgagggtgccgtccaagtcgaacaccgcaaaggtctatatcgaaatccaggacgaaaataatcatccccctgtgtttcagaaaaagttctacatcggaggggtgtctgaagatgcaaggatgtttaccagcgttcttagggttaaagcgaccgataaagatactggaaattacagtgtgatggcgtatcggttgattattccacccattaaggaggggaaggaagggtttgtcgttgagacatataccggtctgatcaaaaccgccatgctgtttcataatatgcgacgctcttactttaagttccaagtgatcgccaccgacgattacgggaagggactcagcggcaaggctgacgtgctagtttcggtggtgaaccagctggacatgcaggtcatcgtgagtaatgttccacctactctggtagagaaaaaaattgaggacttgacggagattctggacaggtacgtgcaggagcagatacccggcgctaaagtggtggtggagtcaattggagcccgccgccacggagatgctttctctctggaagattacactaaatgtgacctcactgtctatgccatcgaccctcaaactaaccgcgctatagaccgaaacgagttgtttaaatttttggatggcaagctactggacataaataaggactttcagccctactacggggagggaggaaggatccttgaaattcgcactcccgaagctgtgaccagcataaagaagcggggagagtcattgggttacactgaaggagccttgcttgcccttgcattcataattatactctgctgtatacctgcaatcctcgtagtgttggtttcctacaggcagttcaaggtaagacaagccgagtgtacgaagacagcccggatacaggctgctctgcctgccgcgaaacccgcagtccctgctcctgcgcctgtggccgcaccccccccccctccacccccaccccctggcgctcacctgtatgaagagttaggagattccagcatgcacaagtatgagatgccgcagtatggaagccgtaggagacttctgccacccgcggggcaggaagaatacggtgaggttgtcggagaggctgaagaggaatacgaggaggaagagtgggcacggaagcgaatgattaagctggtcgttgacagggagtatgagacaagcagcactggagaggacagcgctcctgaatgccagcgcaacaggcttcaccatccgagcatccacagtaatattaacggcaacatctatattgcccagaacgggagcgttgtcagaaccagaagagcttgccttaccgacaacctaaaggtggctagtccagtccggctgggtggccctttcaaaaaattggacaagctcgccgtcacacatgaagaaaacgtccctctgaataccctcagcaaagggcctttcagtaccgaaaagatgaatgctagacctacattggtgacattcgccccttgccccgtcggcaccgacaatactgccgtgaagcctctgaggaatcgtctgaagagtactgtggagcaggagtctatgatcgattctaagaatatcaaagaggcccttgagttccacagcgatcacacacaaagtgatgacgaggagctgtggatggggccatggaataacctccatatccctatgacaaagctctag

SEQ ID NO: 54648 - DNA, 2946 bp, Artificial Sequence
  derived and/or modified sequence
atgttccggcagttttatctgtggacttgcctggcctcgggcattatcctaggctccctctttgaaatttgccttggacagtacgatgatgattgtaaactggcaagggggggacctcccgccactatcgtagccatcgacgaagagtccaggaatggaacaatacttgttgataatatgctgatcaagggcacggccggcggcccggatcccacaatcgagctgtccttgaaggataacgtggactattgggtgttaatggacccggtgaaacagatgctgtttctaaactcgactgggagggtgttagatcgagacccgccaatgaacatacattcaatcgtcgttcaagtgcaatgcatcaacaagaaagtgggcactatcatctaccacgaggtgcgcatcgttgtaagggacaggaacgataacagccccacatttaagcacgagtcttactacgccaccgtaaacgagctaactcccgtgggcactactatttttactggtttcagcggcgataatggcgctacagacatcgacgacgggcccaacggacagatagaatacgtgattcagtataatcctgatgacccaacatcgaacgataccttcgaaatcccgctcatgcttactggaaacattgttcttaggaaacgactgaattacgaggataagactcggtacttcgtgattattcaggccaacgaccgggctcagaacctcaatgagcgccggaccactaccaccaccctgacagtggacgtcctggatggcgacgacctggggcccatgtttttgccttgtgtgctggtacctaacacacgggactgccggccacttacataccaggccgctattcccgagttaagaacccccgaggagctaaacccaatcatcgtcacgcctccaattcaggctattgaccaggaccggaatatccaacccccaagcgaccgacctggcatcctgtactcaatcctggtggggacacctgaggactaccctcggtttttccatatgcaccccagaacagccgagttgtcactgctggagcctgtcaacagggatttccatcagaaatttgatcttgtcatcaaggccgagcaggacaacggccatccgctccccgccttcgcagggctgcacatcgaaattctcgatgagaataaccagtcaccgtacttcacaatgccatcctaccaagggtacatcttagagtcagctcctgtcggtgctaccatttcggattctctcaacctgacctcgccgctgcgcattgtggccctggacaaggacatcgaggatacgaaagacccggaacttcatctattcctgaatgattacacctcggtctttaccgtaacccagactggtataacccgttatctgaccttactccagccggtcgacagggaggaacagcagacttatactttctctatcacagcattcgacggggtgcaggagagcgagccagtcatcgtgaatatccaagttatggatgctaacgacaacactccgacgttccccgaaattagctacgatgtttacgtgtatacagatatgaggccaggcgactccgtgatccaactgacagcagttgacgctgacgaaggatctaatggggagataacctatgagattctcgttggcgcccaaggtgatttcattattaacaagaccacaggattaattactattgctccgggcgtggagatgatcgtgggtcgaacatacgccttgacagttcaggccgcagacaacgctcctccagctgagagacggaacagtatttgtactgtctatatcgaggtcctgcctcccaataatcagtcacccccaagatttccacagctcatgtatagtctagagattagcgaagctatgagagtaggcgccgttttgctgaatctgcaagctaccgatagggaaggcgattcgatcacttatgccatagagaacggcgaccctcaacgtgtcttcaatctgagcgagacaacaggaattttgacccttggtaaagcgttagaccgggagtcgaccgaccggtatattttgatcattacggctagcgatggacggccagatggagaagaacccaaaaagattaagaaaccaaaagtggaaatcagagagccttccgaagaggaggaggtcgtggtcacgatcgagaagcccccggctgccgagcccacttacacaacatggaagcgagccaggatcttcccgatgatatttaaaaaggtgagagggctggccgataaacgcggtatcgtggacctcgaaggcgaagaatggcagcgaagactggaggaagaggacaaggattatctgaaactcactctggaccaggaggaggcaacagagtctacagtggagtccgaagaagaaagcagttccgattacacagagtattccgaggaggaaagcgagtttagcgaatccgagaccacagaggaggagagcgagtcagaaacaccgtccgaagaagaggagagcagcactccagagagcgaggagtctgaaagcactgaatccgagggcgagaaagccaggaagaatattgtcctggcacgccggcgtccaatggtggaggaggtgaaagaggtcaaaggcagaaaggaagagccccaggaagagcagaaggaaccaaagatggaagaggaggagcattcggaagaagaggagtccggaccagcccccgtagaagaaagcaccgatccagaggctcaggatattccagaggaagggagtgcagagagcgcctcagtagagggcggagttgagtctgaagaagagtctgaatccggttcatccagctctagctcagaatcccagtctggagggccatgggggtaccaggttccggcctatgataggagcaagaacgctaaccaaaagaagagccctggggcaaatagcgaaggttacaatacagctctctag

SEQ ID NO: 54649 - DNA, 1965 bp, Artificial Sequence
  derived and/or modified sequence
atgtttcgccagttttatctttggacctgcttggccagcggcatcatccttggaagtttatttgagatctgcctcgggcagtacgatgacgactgtaaactcgccagaggcggtccacccgcaacaatcgtcgctattgacgaagaatcgaggaacgggactatccttgtggacaatatgcttattaagggcactgccggtggtcctgaccccactatcgagttgtcactaaaagataatgtggactactgggtactgatggacccggtcaagcagatgctttttctcaactccaccggcagagtgctggatcgagaccctcccatgaacattcacagcatcgtggttcaggtgcagtgtatcaataagaaagtcgggacgatcatctatcacgaagtgcggattgtggttagggaccggaatgataattcccctacgttcaagcacgaaagctattacgctacagtcaacgaactgacccccgttggaactaccatctttacggggttctcaggggacaatggtgcaacagacattgacgatggacctaatggtcagattgaatatgtgatccaatataatcccgatgacccgacctctaacgatacctttgagattccccttatgctgactggcaatattgtcctgaggaagaggctgaattatgaagacaagactaggtacttcgtgatcattcaggcgaatgaccgcgctcagaatctgaacgagaggagaacgacaacgaccaccctgaccgtggacgtgttagacggtgacgatctcggcccaatgttcctgccgtgcgtcttagtccccaacactagggattgccgtccactcacataccaagcagcgattccggaattgagaacccctgaggagttaaatccaattattgtgacacctccaatccaagccattgaccaggatcggaacatccagccaccctccgatcggccagggatcctgtacagcattctggtgggtacccccgaagactaccccaggttcttccacatgcaccctagaaccgcagagctgtccctgttagaacccgtcaatcgggatttccatcagaaattcgacctcgtgatcaaagccgaacaggacaatggacacccactgcccgccttcgcaggccttcacattgaaatcttggacgagaacaatcagtctccatacttcaccatgcccagttaccaaggatacatacttgagagcgcccctgttggcgccaccattagtgactcactgaatctgacaagtcccctccgcatcgtagccctggataaagacattgaagacacaaaggaccctgagttgcatctcttcctgaatgactacacgtccgtgttcacagtaactcagacaggaatcaccagataccttacactgcttcagccagtggaccgagaagaacagcagacatacacgtttagcattacagctttcgacggcgtgcaggagtctgagcccgtgatagtcaacatacaagttatggacgcaaatgataatacacccacatttcccgaaatttcctatgatgtgtatgtgtacacagatatgagacctggtgactcggtcattcagcttacagccgtcgacgcggacgaggggagcaacggcgaaattacttatgaaatactcgtgggagcacaaggagacttcattattaataaaactactgggttgataactatcgcccccggcgtggagatgatagtggggcggacctacgcccttaccgtgcaggctgctgacaacgccccaccggccgagagaaggaactctatatgtaccgtgtacatcgaggtcctacccccaaataaccaaagcccccccaggttcccacaactgatgtatagtctggaaatttcagaggcaatgagagtcggagctgtgttattgaacctgcaacatggtgacagcaacctcagggaatccactggccagggtaagcactag

SEQ ID NO: 54650 - DNA, 5034 bp, Artificial Sequence
  derived and/or modified sequence
atgttcagacagttctacctgtggacctgtctcgcatccggaattatccttggatccctgtttgaaatatgcttagggcaatacgacgacgactgcaagctggcccgtgggggccccccagcaacaattgtggctatcgacgaggaatcaagaaatggcacaattctggtggacaacatgttgatcaagggaacggctggcggtcccgatcccactattgagctctcattgaaagataacgttgactactgggtgctgatggaccctgtcaaacagatgctatttttgaactcaacaggaagggtgttagacagggaccctccaatgaacatccactcgatagtagtgcaggtccagtgtatcaacaagaaagtcggcacaattatctaccatgaggttcgaattgtggtgcgggatcgaaacgataactctccaacgtttaagcacgagagttactacgctacagtcaacgagcttaccccagtcggaacgacgatcttcacaggatttagcggagacaatggtgctactgacatagacgatggaccaaacggtcaaatcgaatatgttattcaatacaatcctgatgatcccacctcaaatgacacattcgagatccccctaatgctaaccgggaacattgtgttgcgaaagcgcttaaattatgaggataagactcgatacttcgtgatcatccaggccaacgacagggcacagaacctgaacgaacgaaggaccaccactactaccctgaccgtggatgtgttagatggtgatgacctggggcccatgttcttaccttgcgttctggttcccaatacaagagattgtcgccccctgacttaccaggccgccatcccggagcttcgaactccggaagagttgaatccaatcatcgttactccccctatccaggctatcgatcaggatcggaacatacagcccccatctgatcggcctggtatcctgtatagtattctagtcggtactcccgaggactaccccagatttttccacatgcacccccgcacggctgagctgtccctgttggaacccgtgaatcgcgattttcatcagaaattcgatctcgttataaaagcagaacaagataatgggcaccccctgccggcctttgcaggtctacacattgaaatcctggatgagaacaatcaatcaccttatttcacaatgccatcttatcagggatacatcctggagtctgcacctgtaggcgccaccatctccgattctctgaatctcacctccccactccggatcgtggcgctggacaaagatattgaggacactaaggatccggaactgcatttgttcctgaatgattatacaagcgtatttacagtgactcagactggcatcacaaggtacctaacactgctgcagccagtggacagagaagagcagcagacatacacctttagcataaccgcatttgacggggttcaggagagtgagcccgtcattgttaatattcaggtgatggatgccaacgataacacccccacctttccagagatcagctatgacgtctacgtgtacactgatatgagacccggtgacagcgtaatacagttgactgctgttgatgctgacgagggatcgaacggcgagattacctatgagatccttgtcggagcccaaggcgactttatcataaacaaaactaccgggctgatcacgattgcccctggcgtcgagatgatcgtggggcgtacatatgccttgactgtgcaggctgctgataacgcgccacctgcagagaggaggaatagtatctgcacagtctacattgaggtcttgccgccaaataaccagtcacctcctcgcttcccgcagctgatgtattcgctggagatctcagaggccatgcgtgtcggcgcggttctcctgaacttgcaagctactgatagggagggcgacagcatcacatacgccatcgagaacggagatccccagcgtgtcttcaacttgtctgagacgaccggaatactcactttgggcaaggcattagaccgggaaagcacagataggtatatactgatcatcacagcttcagacggtagacctgacggtacatcgaccgccactgttaacattgtggtgacagacgtaaacgacaatgcgcccgtgttcgatccataccttccgcgaaatctgtcagtggtagaagaggaggctaacgcattcgtcgggcaggtgaaagctactgatcctgatgccggtatcaatggccaggtgcactatagcttgggaaatttcaacaacttatttagaattaccagtaacggttccatctatacagccgtgaagctgaaccgggaagtgagagactattatgaactggtcgtggtggcgacggacggtgccgtccaccctaggcactccaccttaacactagccattaaggtgttggacatagacgataacagtccagtttttacaaacagcacatacacagttctggtggaggagaatttgccagccggcactacgattctacagatagaggccaaggatgtggacctcggagcaaatgtctcctatcggatccgaagtcctgaagtaaagcatttttttgcactgcaccccttcaccggtgagttgtcgctgctgcgtagtctcgattatgaggcctttccagaccaagaagctagcattacattcctggtggaagcgttcgatatctacggaactatgccaccagggattgctaccgtgaccgttatcgtgaaggacatgaacgactaccctcctgttttttccaagcgcatttataaaggaatggtcgcccctgatgccgtcaagggcacgcccatcaccaccgtctatgcagaggacgctgatccacccggcttaccggcctctagagtcaggtaccgcgttgacgatgtgcagtttccttaccctgccagcatcttcgaagtagaagaagatagcggccgggtgatcacgcgggtaaacctgaacgaggaaccaacaaccatatttaaattggttgtggtcgcattcgatgatggcgaacccgtgatgtcaagcagcgcaaccgtcaaaattttagttctccatcccggagaaatccctcggtttactcaggaggaatataggcctccgcccgtctcagagttggctacgaaggggactatggtgggggtcatctccgctgccgcaattaaccagtctattgtgtactccatcgtctcaggtaatgaggaagacactttcgggatcaataatattaccggggttatatacgtaaacgggcccctcgactatgaaactcggacttcttatgtcctcagagtgcaagcagactccttggaggtcgtgctggcgaacctgcgcgtgccctccaagagtaatactgccaaggtgtacatcgagatccaggacgagaacaaccatcctcccgtcttccagaaaaagttttatataggcggcgtgagcgaagacgctcgcatgttcacctctgtgttgcgagtgaaggccacagacaaggatacgggaaattacagcgtgatggcatatagattgatcattcctcctattaaagaaggcaaggaaggatttgtggtggagacttatactggcctgatcaaaaccgctatgctttttcataacatgcggaggagctacttcaagtttcaggtaattgccacggacgactacggtaagggcttgagcgggaaggccgatgtgctggttagtgttgtcaaccagctggacatgcaggtcattgtcagtaatgttccccccaccctggtggaaaaaaagattgaagatctgaccgagatactcgaccgctacgttcaggaacaaattccgggcgctaaagtggtcgtagaaagcatcggcgcccgtcgacatggtgacgccttttccttagaggattatactaagtgtgacctcaccgtctatgctattgatccacagacaaacagagccattgaccgcaacgagttgttcaagttcctagatgggaagcttctggacattaacaaggacttccagccctactacggcgaaggtggccgaattctggagatccgaacacctgaagccgtcacctctattaagaagcggggagagtctctggggtacactgagggagcactgctagctctcgcattcatcatcatcctttgttgtatccctgcgatccttgtcgttttggttagctacagacacttcaaacgtcgacaggccgaatgtactaagacagcacgaatacaggccgctctaccagcggcgaagcctgcagtgcccgcaccagcgccagttgctgctccacctccccccccgcccccacctcccggcgcccacctctacgaagagttaggagacagttctatttaccgctacgagatgccacagtatggctcacgaagaagactgttgccaccagccggacaggaggagtatggggaggtggtgggggaagccgaagaagagtatgaggaggaggagtgggctagaaagagaatgataaagctggttgtggaccgggagtatgagacatcttcgaccggagaagactctgcacctgagtgtcagaggaaccggttacatcacccttccatccattcgaacatcaacggcaacatttacattgcacagaacggaagtgttgtgcgcactcggagagcatgtctgaccgacaacttgaaagtagcaagtcccgtcagactcggggggccctttaaaaagctggataagctggcagttacacatgaggagaatgtccccttaaacaccctgagcaagggacccttctcaacagaaaaaatgaacgcgcggcccaccctggtgacattcgctccctgcccggtcggaaccgacaacacggcagtgaagccgcttaggaaccgcctcaaatcaactgtggaacaagaatcgatgatagattcaaagaacataaaggaggccttagaatttcattcagaccatacccagtcagatgacgaggagctgtggatgggcccctggaacaacctgcatattcctatgaccaagctgtag

SEQ ID NO: 54651 - DNA, 2886 bp, Artificial Sequence
  derived and/or modified sequence
atgttccggcagttctacctgtggacctgcctggccagcggcatcatcctgggcagcctgtttgagatctgcctgggccagtatgatgatgactgcaagctggcccggggcggccccccagccaccatcgtggccattgatgaggagagcagaaatggcaccatcctggtggacaacatgctgatcaagggcacagctgggggccctgaccccaccatcgagctgagcctgaaggacaacgtggactactgggtgctgatggaccctgtgaagcagatgctgttcctgaacagcacaggccgggtgctggaccgggacccccccatgaacatccacagcatcgtggtgcaggtgcagtgcatcaacaagaaggtgggcaccatcatctaccacgaggtgagaattgtggtgcgggacagaaatgacaacagccccaccttcaagcatgagagctactatgccaccgtgaatgagctgacccctgtgggcaccaccatcttcaccggcttcagcggggacaacggggccacagacattgatgatggccccaacggccagattgaatatgtgatccagtacaacccagatgaccccaccagcaatgacacctttgagatccccctgatgctgactggaaacatcgtgctgaggaagaggctgaactatgaggacaagacccgctactttgtgatcatccaggccaatgaccgggcccagaacctgaatgaaagaaggaccaccaccaccaccctgactgtggatgtgctggatggagatgacctgggccccatgttcctgccctgtgtgctggtgcccaacacccgggactgccggcccctgacctaccaggccgccatccctgagctgcggaccccagaggagctgaaccccatcatcgtgaccccacccatccaggccatcgaccaggacaggaacatccagcccccaagtgaccggcccggcatcctgtacagcatcctggtgggcaccccagaggactacccccgcttcttccacatgcaccccaggacagctgagctgagcctgctggagcctgtgaacagagacttccaccagaagtttgacctggtgatcaaggccgagcaggacaatggccaccccctgcctgcctttgctggcctgcacatcgagatcctggatgagaacaaccagagcccctacttcaccatgcccagctaccagggctacatcctggagagcgcccctgtgggcgccaccatcagtgacagcctgaacctgaccagccccctgcgcatcgtggccctggacaaggacatcgaggacaccaaggaccctgagctgcacctgttcctgaatgactacaccagcgtcttcaccgtgacccagacaggcatcacccgctacctgaccctgctgcagcctgtggaccgggaggagcagcagacctacaccttcagcatcacagcctttgatggagtgcaggagagcgagcccgtcatcgtgaacatccaggtgatggatgccaatgacaacacccccaccttccctgagatctcctatgatgtgtatgtgtacacagacatgaggcctggggacagcgtcatccagctgacagctgtggatgctgatgagggcagcaatggagagatcacctatgagatcctggtgggcgcccagggcgacttcatcatcaacaagaccaccggcctcatcaccatcgcccctggggtggagatgattgtgggccgcacctacgccctgactgtgcaggccgctgacaatgcccccccagctgagaggagaaattccatctgcaccgtgtacatcgaggtgctgccccccaacaaccagagccccccacgcttcccccagctgatgtacagcctggagatcagcgaggccatgagggtgggcgctgtgctgctgaacctgcaggccacagaccgggagggggacagcatcacctacgccattgaaaatggagacccccagagggtcttcaacctgtctgagaccaccggcatcctgaccctgggcaaggccctggaccgggagagcacagaccgctacatcctgatcatcacagccagtgatggccgcccagatggcaccagcacagccaccgtgaacatcgtggtgacagatgtgaatgacaatgcccctgtgtttgacccctacctgcccaggaacctgtctgtggtggaggaggaggccaatgcctttgtgggccaggtgaaggccacagatcctgatgctggcatcaatggccaggtgcactacagcctgggcaacttcaacaacctcttccgcatcaccagcaatggcagcatctacacagctgtgaagctgaaccgggaggtgcgggactactatgagctggtggtggtggccacagatggagctgtgcaccccaggcacagcaccctgaccctggccatcaaggtgctggacattgatgacaacagccctgtgttcaccaacagcacctacacagtgctggtggaggagaacctgcctgctggcaccaccatcctgcagatcgaggccaaggatgtggacctgggcgccaacgtgtcctaccgcatccgcagccctgaggtgaagcacttctttgccctgcaccccttcaccggggagctgagcctgctgcggagcctggactatgaggccttcccagaccaggaggccagcatcaccttcctggtggaggcctttgacatctacggcaccatgcctcctggcatcgccaccgtgacagtgattgtgaaggacatgaatgactacccacctgtgttcagcaagaggatctacaagggcatggtggccccagatgctgtgaagggcacccccatcaccaccgtgtatgcagaagatgctgacccccctgtgtccagaagacactag

SEQ ID NO: 54652 - DNA, 5055 bp, Artificial Sequence
  derived and/or modified sequence
atgttccggcagttctacctgtggacctgcctggccagcggcatcatcctgggcagcctgtttgagatctgcctgggccagtatgatgatgactgcaagctggcccggggcggccccccagccaccatcgtggccattgatgaggagagcagaaatggcaccatcctggtggacaacatgctgatcaagggcacagctgggggccctgaccccaccatcgagctgagcctgaaggacaacgtggactactgggtgctgatggaccctgtgaagcagatgctgttcctgaacagcacaggccgggtgctggaccgggacccccccatgaacatccacagcatcgtggtgcaggtgcagtgcatcaacaagaaggtgggcaccatcatctaccacgaggtgagaattgtggtgcgggacagaaatgacaacagccccaccttcaagcatgagagctactatgccaccgtgaatgagctgacccctgtgggcaccaccatcttcaccggcttcagcggggacaacggggccacagacattgatgatggccccaacggccagattgaatatgtgatccagtacaacccagatgaccccaccagcaatgacacctttgagatccccctgatgctgactggaaacatcgtgctgaggaagaggctgaactatgaggacaagacccgctactttgtgatcatccaggccaatgaccgggcccagaacctgaatgaaagaaggaccaccaccaccaccctgactgtggatgtgctggatggagatgacctgggccccatgttcctgccctgtgtgctggtgcccaacacccgggactgccggcccctgacctaccaggccgccatccctgagctgcggaccccagaggagctgaaccccatcatcgtgaccccacccatccaggccatcgaccaggacaggaacatccagcccccaagtgaccggcccggcatcctgtacagcatcctggtgggcaccccagaggactacccccgcttcttccacatgcaccccaggacagctgagctgagcctgctggagcctgtgaacagagacttccaccagaagtttgacctggtgatcaaggccgagcaggacaatggccaccccctgcctgcctttgctggcctgcacatcgagatcctggatgagaacaaccagagcccctacttcaccatgcccagctaccagggctacatcctggagagcgcccctgtgggcgccaccatcagtgacagcctgaacctgaccagccccctgcgcatcgtggccctggacaaggacattgaagatgtgcccccatctggagtgcccaccaaggaccctgagctgcacctgttcctgaatgactacacctctgtgttcaccgtgacccagacaggcatcacccgctacctgaccctgctgcagcctgtggaccgggaggagcagcagacctacaccttcagcatcacagcctttgatggagtgcaggagagcgagcctgtgattgtgaacatccaggtgatggatgccaatgacaacacccccaccttccctgagatctcctatgatgtgtatgtgtacacagacatgaggcctggggacagcgtcatccagctgacagctgtggatgctgatgagggcagcaatggagagatcacctatgagatcctggtgggcgcccagggcgacttcatcatcaacaagaccaccggcctcatcaccatcgcccctggggtggagatgattgtgggccgcacctacgccctgactgtgcaggccgctgacaatgcccctcctgctgagaggaggaacagcatctgcaccgtgtacatcgaggtgctgccccccaacaaccagagccccccacgcttcccccagctgatgtacagcctggagatcagcgaggccatgagggtgggcgctgtgctgctgaacctgcaggccacagaccgggagggggacagcatcacctacgccattgaaaatggagacccccagagggtcttcaacctgtctgagaccaccggcatcctgaccctgggcaaggccctggaccgggagagcacagaccgctacatcctgatcatcacagccagtgatggccgcccagatggcaccagcacagccaccgtgaacatcgtggtgacagatgtgaatgacaatgcccctgtgtttgacccctacctgcccaggaacctgtctgtggtggaggaggaggccaatgcctttgtgggccaggtgaaggccacagatcctgatgctggcatcaatggccaggtgcactacagcctgggcaacttcaacaacctcttccgcatcaccagcaatggcagcatctacacagctgtgaagctgaaccgggaggtgcgggactactatgagctggtggtggtggccacagatggagctgtgcaccccaggcacagcaccctgaccctggccatcaaggtgctggacattgatgacaacagccctgtgttcaccaacagcacctacacagtgctggtggaggagaacctgcctgctggcaccaccatcctgcagatcgaggccaaggatgtggacctgggcgccaacgtgtcctaccgcatccgcagccctgaggtgaagcacttctttgccctgcaccccttcaccggggagctgagcctgctgcggagcctggactatgaggccttcccagaccaggaggccagcatcaccttcctggtggaggcctttgacatctacggcaccatgcctcctggcatcgccaccgtgaccgtcatcgtgaaggacatgaatgactacccacctgtgttcagcaagaggatctacaagggcatggtggccccagatgctgtgaagggcacccccatcaccaccgtgtatgcagaagatgctgaccccccaggcctgcctgccagccgggtgcgctacagagtggatgatgtgcagttcccctacccagccagcatctttgaggtggaggaggacagcggccgggtcatcaccagggtgaacctgaatgaggagcccaccaccatcttcaagctggtggtggtggcctttgatgatggagagcctgtgatgagcagcagcgccaccgtgaagatcctggtgctgcaccctggagagatcccccgcttcacccaggaggagtacagacctcctcctgtgtctgagctggccaccaagggcaccatggtgggcgtcatctctgctgctgccatcaaccagagcatcgtgtacagcatcgtgtctggaaatgaggaggacaccttcggcatcaacaacatcactggagtcatctacgtgaatggccccctggactatgagaccaggaccagctatgtgctgcgggtgcaggccgacagcctggaggtggtgctggccaacctgcgggtgcccagcaagagcaacacagccaaggtgtacatcgagatccaggatgagaacaaccacccccctgtgttccagaagaagttctacatcggcggcgtgtctgaagatgccaggatgttcacctctgtgctgcgggtgaaggccacagacaaggacaccggcaactacagcgtgatggcctaccgcctcatcatcccccccatcaaggagggcaaggagggctttgtggtggagacctacacaggcctcatcaagacagccatgctgttccacaacatgagaagaagctacttcaagttccaggtgattgccacagatgattatggcaagggcctgagcggcaaggcagatgtgctggtgtctgtggtgaaccagctggacatgcaggtgattgtgtccaatgtgccccccaccctggtggagaagaagattgaggacctgacagagatcctggacagatatgtgcaggagcagatccctggggccaaggtggtggtggagagcatcggggccaggagacatggagatgccttcagcctggaggactacaccaagtgtgacctgactgtgtatgccatcgacccccagaccaacagagccatcgacagaaatgaactcttcaagttcctggatggcaagctgctggacatcaacaaggacttccagccctactacggggagggcggccgcatcctggagatccgcaccccagaggccgtgaccagcatcaagaagagaggagagagcctgggctacacagagggcgccctgctggccctggccttcatcatcatcctgtgctgcatcccagccatcctggtggtgctggtgtcctaccggcagttcaaggtgcggcaggctgaatgtaccaagacagcccgcatccaggccgccctgcctgctgccaagccagctgtgcctgccccagcccctgtggccgcccctcctcctcctcctcctcctcctcctggggcccacctgtatgaggagctgggggacagctccatgcacaagtatgagatgccccagtatggcagcagaagaaggctgctgcccccagctggccaggaggagtatggagaggtggtgggggaggccgaggaggagtatgaggaggaggagtgggccaggaagaggatgatcaagctggtggtggaccgggagtatgagaccagcagcactggagaagattctgcccctgagtgccagaggaaccggctgcaccaccccagcatccacagcaacatcaatggaaacatctacatcgcccagaatggatctgtggtgaggacccggcgggcctgcctgacagacaacctgaaggtggccagccctgtgcggctgggcggccccttcaagaagctggacaagctggccgtgacccatgaagaaaatgtgcccctgaacaccctgagcaagggccccttcagcacagagaagatgaatgcccggcccaccctggtgacctttgccccctgccctgtgggcacagacaacacagctgtgaagcccctgaggaaccggctgaagagcacagtggagcaggagagcatgattgacagcaagaacatcaaggaggccctggagttccacagcgaccacacccagagtgatgatgaggagctgtggatgggcccctggaacaacctgcacatccccatgaccaagctgtag

SEQ ID NO: 54653 - DNA, 2946 bp, Artificial Sequence
  derived and/or modified sequence
atgttccggcagttctacctgtggacctgcctggccagcggcatcatcctgggcagcctgtttgagatctgcctgggccagtatgatgatgactgcaagctggcccggggcggccccccagccaccatcgtggccattgatgaggagagcagaaatggcaccatcctggtggacaacatgctgatcaagggcacagctgggggccctgaccccaccatcgagctgagcctgaaggacaacgtggactactgggtgctgatggaccctgtgaagcagatgctgttcctgaacagcacaggccgggtgctggaccgggacccccccatgaacatccacagcatcgtggtgcaggtgcagtgcatcaacaagaaggtgggcaccatcatctaccacgaggtgagaattgtggtgcgggacagaaatgacaacagccccaccttcaagcatgagagctactatgccaccgtgaatgagctgacccctgtgggcaccaccatcttcaccggcttcagcggggacaacggggccacagacattgatgatggccccaacggccagattgaatatgtgatccagtacaacccagatgaccccaccagcaatgacacctttgagatccccctgatgctgactggaaacatcgtgctgaggaagaggctgaactatgaggacaagacccgctactttgtgatcatccaggccaatgaccgggcccagaacctgaatgaaagaaggaccaccaccaccaccctgactgtggatgtgctggatggagatgacctgggccccatgttcctgccctgtgtgctggtgcccaacacccgggactgccggcccctgacctaccaggccgccatccctgagctgcggaccccagaggagctgaaccccatcatcgtgaccccacccatccaggccatcgaccaggacaggaacatccagcccccaagtgaccggcccggcatcctgtacagcatcctggtgggcaccccagaggactacccccgcttcttccacatgcaccccaggacagctgagctgagcctgctggagcctgtgaacagagacttccaccagaagtttgacctggtgatcaaggccgagcaggacaatggccaccccctgcctgcctttgctggcctgcacatcgagatcctggatgagaacaaccagagcccctacttcaccatgcccagctaccagggctacatcctggagagcgcccctgtgggcgccaccatcagtgacagcctgaacctgaccagccccctgcgcatcgtggccctggacaaggacatcgaggacaccaaggaccctgagctgcacctgttcctgaatgactacaccagcgtcttcaccgtgacccagacaggcatcacccgctacctgaccctgctgcagcctgtggaccgggaggagcagcagacctacaccttcagcatcacagcctttgatggagtgcaggagagcgagcccgtcatcgtgaacatccaggtgatggatgccaatgacaacacccccaccttccctgagatctcctatgatgtgtatgtgtacacagacatgaggcctggggacagcgtcatccagctgacagctgtggatgctgatgagggcagcaatggagagatcacctatgagatcctggtgggcgcccagggcgacttcatcatcaacaagaccaccggcctcatcaccatcgcccctggggtggagatgattgtgggccgcacctacgccctgactgtgcaggccgctgacaatgcccccccagctgagaggagaaattccatctgcaccgtgtacatcgaggtgctgccccccaacaaccagagccccccacgcttcccccagctgatgtacagcctggagatcagcgaggccatgagggtgggcgctgtgctgctgaacctgcaggccacagaccgggagggggacagcatcacctacgccattgaaaatggagacccccagagggtcttcaacctgtctgagaccaccggcatcctgaccctgggcaaggccctggaccgggagagcacagaccgctacatcctgatcatcacagccagtgatggccgcccagatggagaggagcccaagaagatcaagaagcccaaggtggagatccgggagcccagcgaggaggaggaggtggtggtgaccatcgagaagcccccagctgctgagcccacctacaccacctggaagagggcccgcatcttccccatgatcttcaagaaggtgcggggcctggccgacaagaggggcatcgtggacctggagggggaggagtggcagaggcggctggaggaggaggacaaggactacctgaagctgaccctggaccaggaggaggccacagagagcacagtggagagcgaggaggagagcagcagtgactacacagagtacagcgaggaggagagcgagttcagcgagagcgagaccacagaggaggagagcgagagcgagacccccagcgaggaggaggagagcagcaccccagagagcgaggagagcgagagcacagagagcgagggggagaaggccaggaagaacatcgtgctggcccggcggcggcccatggtggaggaggtgaaggaggtgaagggcaggaaggaggagccccaggaggagcagaaggagcccaagatggaggaggaggagcacagcgaggaggaggagagcggccctgcccctgtggaggagagcacagatcctgaggcccaggacatccctgaggagggcagcgctgagagcgcctctgtggagggcggcgtggagagcgaggaggagagcgagagcggcagcagcagcagcagcagcgagagccagagcggcggcccctggggctaccaggtgcctgcctatgacaggagcaagaatgccaaccagaagaagagccctggggccaacagcgagggctacaacacagccctgtag

SEQ ID NO: 54654 - DNA, 1965 bp, Artificial Sequence
  derived and/or modified sequence
atgttccggcagttctacctgtggacctgcctggccagcggcatcatcctgggcagcctgtttgagatctgcctgggccagtatgatgatgactgcaagctggcccggggcggccccccagccaccatcgtggccattgatgaggagagcagaaatggcaccatcctggtggacaacatgctgatcaagggcacagctgggggccctgaccccaccatcgagctgagcctgaaggacaacgtggactactgggtgctgatggaccctgtgaagcagatgctgttcctgaacagcacaggccgggtgctggaccgggacccccccatgaacatccacagcatcgtggtgcaggtgcagtgcatcaacaagaaggtgggcaccatcatctaccacgaggtgagaattgtggtgcgggacagaaatgacaacagccccaccttcaagcatgagagctactatgccaccgtgaatgagctgacccctgtgggcaccaccatcttcaccggcttcagcggggacaacggggccacagacattgatgatggccccaacggccagattgaatatgtgatccagtacaacccagatgaccccaccagcaatgacacctttgagatccccctgatgctgactggaaacatcgtgctgaggaagaggctgaactatgaggacaagacccgctactttgtgatcatccaggccaatgaccgggcccagaacctgaatgaaagaaggaccaccaccaccaccctgactgtggatgtgctggatggagatgacctgggccccatgttcctgccctgtgtgctggtgcccaacacccgggactgccggcccctgacctaccaggccgccatccctgagctgcggaccccagaggagctgaaccccatcatcgtgaccccacccatccaggccatcgaccaggacaggaacatccagcccccaagtgaccggcccggcatcctgtacagcatcctggtgggcaccccagaggactacccccgcttcttccacatgcaccccaggacagctgagctgagcctgctggagcctgtgaacagagacttccaccagaagtttgacctggtgatcaaggccgagcaggacaatggccaccccctgcctgcctttgctggcctgcacatcgagatcctggatgagaacaaccagagcccctacttcaccatgcccagctaccagggctacatcctggagagcgcccctgtgggcgccaccatcagtgacagcctgaacctgaccagccccctgcgcatcgtggccctggacaaggacatcgaggacaccaaggaccctgagctgcacctgttcctgaatgactacaccagcgtcttcaccgtgacccagacaggcatcacccgctacctgaccctgctgcagcctgtggaccgggaggagcagcagacctacaccttcagcatcacagcctttgatggagtgcaggagagcgagcccgtcatcgtgaacatccaggtgatggatgccaatgacaacacccccaccttccctgagatctcctatgatgtgtatgtgtacacagacatgaggcctggggacagcgtcatccagctgacagctgtggatgctgatgagggcagcaatggagagatcacctatgagatcctggtgggcgcccagggcgacttcatcatcaacaagaccaccggcctcatcaccatcgcccctggggtggagatgattgtgggccgcacctacgccctgactgtgcaggccgctgacaatgcccccccagctgagaggagaaattccatctgcaccgtgtacatcgaggtgctgccccccaacaaccagagccccccacgcttcccccagctgatgtacagcctggagatcagcgaggccatgagggtgggcgctgtgctgctgaacctgcagcacggggacagcaacctgcgggagagcacaggccagggcaagcactag

SEQ ID NO: 54655 - DNA, 5034 bp, Artificial Sequence
  derived and/or modified sequence
atgttccggcagttctacctgtggacctgcctggccagcggcatcatcctgggcagcctgtttgagatctgcctgggccagtatgatgatgactgcaagctggcccggggcggccccccagccaccatcgtggccattgatgaggagagcagaaatggcaccatcctggtggacaacatgctgatcaagggcacagctgggggccctgaccccaccatcgagctgagcctgaaggacaacgtggactactgggtgctgatggaccctgtgaagcagatgctgttcctgaacagcacaggccgggtgctggaccgggacccccccatgaacatccacagcatcgtggtgcaggtgcagtgcatcaacaagaaggtgggcaccatcatctaccacgaggtgagaattgtggtgcgggacagaaatgacaacagccccaccttcaagcatgagagctactatgccaccgtgaatgagctgacccctgtgggcaccaccatcttcaccggcttcagcggggacaacggggccacagacattgatgatggccccaacggccagattgaatatgtgatccagtacaacccagatgaccccaccagcaatgacacctttgagatccccctgatgctgactggaaacatcgtgctgaggaagaggctgaactatgaggacaagacccgctactttgtgatcatccaggccaatgaccgggcccagaacctgaatgaaagaaggaccaccaccaccaccctgactgtggatgtgctggatggagatgacctgggccccatgttcctgccctgtgtgctggtgcccaacacccgggactgccggcccctgacctaccaggccgccatccctgagctgcggaccccagaggagctgaaccccatcatcgtgaccccacccatccaggccatcgaccaggacaggaacatccagcccccaagtgaccggcccggcatcctgtacagcatcctggtgggcaccccagaggactacccccgcttcttccacatgcaccccaggacagctgagctgagcctgctggagcctgtgaacagagacttccaccagaagtttgacctggtgatcaaggccgagcaggacaatggccaccccctgcctgcctttgctggcctgcacatcgagatcctggatgagaacaaccagagcccctacttcaccatgcccagctaccagggctacatcctggagagcgcccctgtgggcgccaccatcagtgacagcctgaacctgaccagccccctgcgcatcgtggccctggacaaggacatcgaggacaccaaggaccctgagctgcacctgttcctgaatgactacaccagcgtcttcaccgtgacccagacaggcatcacccgctacctgaccctgctgcagcctgtggaccgggaggagcagcagacctacaccttcagcatcacagcctttgatggagtgcaggagagcgagcccgtcatcgtgaacatccaggtgatggatgccaatgacaacacccccaccttccctgagatctcctatgatgtgtatgtgtacacagacatgaggcctggggacagcgtcatccagctgacagctgtggatgctgatgagggcagcaatggagagatcacctatgagatcctggtgggcgcccagggcgacttcatcatcaacaagaccaccggcctcatcaccatcgcccctggggtggagatgattgtgggccgcacctacgccctgactgtgcaggccgctgacaatgcccccccagctgagaggagaaattccatctgcaccgtgtacatcgaggtgctgccccccaacaaccagagccccccacgcttcccccagctgatgtacagcctggagatcagcgaggccatgagggtgggcgctgtgctgctgaacctgcaggccacagaccgggagggggacagcatcacctacgccattgaaaatggagacccccagagggtcttcaacctgtctgagaccaccggcatcctgaccctgggcaaggccctggaccgggagagcacagaccgctacatcctgatcatcacagccagtgatggccgcccagatggcaccagcacagccaccgtgaacatcgtggtgacagatgtgaatgacaatgcccctgtgtttgacccctacctgcccaggaacctgtctgtggtggaggaggaggccaatgcctttgtgggccaggtgaaggccacagatcctgatgctggcatcaatggccaggtgcactacagcctgggcaacttcaacaacctcttccgcatcaccagcaatggcagcatctacacagctgtgaagctgaaccgggaggtgcgggactactatgagctggtggtggtggccacagatggagctgtgcaccccaggcacagcaccctgaccctggccatcaaggtgctggacattgatgacaacagccctgtgttcaccaacagcacctacacagtgctggtggaggagaacctgcctgctggcaccaccatcctgcagatcgaggccaaggatgtggacctgggcgccaacgtgtcctaccgcatccgcagccctgaggtgaagcacttctttgccctgcaccccttcaccggggagctgagcctgctgcggagcctggactatgaggccttcccagaccaggaggccagcatcaccttcctggtggaggcctttgacatctacggcaccatgcctcctggcatcgccaccgtgacagtgattgtgaaggacatgaatgactacccacctgtgttcagcaagaggatctacaagggcatggtggccccagatgctgtgaagggcacccccatcaccaccgtgtatgcagaagatgctgaccccccaggcctgcctgccagccgggtgcgctacagagtggatgatgtgcagttcccctacccagccagcatctttgaggtggaggaggacagcggccgggtcatcaccagggtgaacctgaatgaggagcccaccaccatcttcaagctggtggtggtggcctttgatgatggagagcctgtgatgagcagcagcgccaccgtgaagatcctggtgctgcaccctggagagatcccccgcttcacccaggaggagtaccggcccccacctgtgtctgagctggccaccaagggcaccatggtgggcgtcatctctgctgctgccatcaaccagagcatcgtgtacagcatcgtgtctggaaatgaggaggacaccttcggcatcaacaacatcaccggggtcatctacgtgaatggccccctggactatgagaccaggaccagctatgtgctgcgggtgcaggccgacagcctggaggtggtgctggccaacctgcgggtgcccagcaagagcaacacagccaaggtgtacatcgagatccaggatgagaacaaccacccccctgtgttccagaagaagttctacatcggcggcgtgtctgaagatgccaggatgttcacctctgtgctgcgggtgaaggccacagacaaggacaccggcaactacagcgtgatggcctaccgcctcatcatcccccccatcaaggagggcaaggagggctttgtggtggagacctacacaggcctcatcaagacagccatgctgttccacaacatgaggaggagctacttcaagttccaggtgattgccacagatgattatggcaagggcctgagcggcaaggcagatgtgctggtgtctgtggtgaaccagctggacatgcaggtgattgtgtccaatgtgccccccaccctggtggagaagaagattgaggacctgacagagatcctggaccgctacgtgcaggagcagatccctggggccaaggtggtggtggagagcattggagccaggagacatggagatgccttcagcctggaggactacaccaagtgtgacctgactgtgtatgccatcgacccccagaccaacagagccatcgacagaaatgagctgttcaagttcctggatggcaagctgctggacatcaacaaggacttccagccctactatggagagggcggccgcatcctggagatccgcaccccagaggccgtgaccagcatcaagaagagaggagagagcctgggctacacagaaggagccctgctggccctggccttcatcatcatcctgtgctgcatcccagccatcctggtggtgctggtgtcctaccgccacttcaagaggcggcaggccgagtgcaccaagacagcccgcatccaggccgccctgcctgctgccaagccagctgtgcctgccccagcccctgtggccgcccctcctcctcctcctcctcctcctcctggggcccacctgtatgaggagctgggggacagcagcatctaccgctatgagatgccccagtatggcagcagaagaaggctgctgcccccagctggccaggaggagtatggagaggtggtgggggaggccgaggaggagtatgaggaggaggagtgggccaggaagaggatgatcaagctggtggtggaccgggagtatgagaccagcagcactggagaggacagcgcccctgagtgccagaggaaccggctgcaccaccccagcatccacagcaacatcaatggaaacatctacatcgcccagaatggatctgtggtgaggacccggcgggcctgcctgacagacaacctgaaggtggccagccctgtgcggctgggcggccccttcaagaagctggacaagctggccgtgacccatgaggagaatgtgcccctgaacaccctgagcaagggccccttcagcacagagaagatgaatgcccggcccaccctggtgacctttgccccctgccctgtgggcacagacaacacagctgtgaagcccctgaggaaccggctgaagagcacagtggagcaggagagcatgattgacagcaagaacatcaaggaggccctggagttccacagcgaccacacccagagtgatgatgaggagctgtggatgggcccctggaacaacctgcacatccccatgaccaagctgtag

SEQ ID NO: 54656 - DNA, 2886 bp, Artificial Sequence
  derived and/or modified sequence
atgttccggcagttctacctgtggacctgcctggccagcggcatcatccttgggtccttgtttgaaatctgcctgggccaatatgatgatgattgcaagctcgccaggggaggccccccagccactatcgttgctatcgacgaggagagcaggaatggaacaatcctggtcgacaacatgctcattaaagggaccgccggcgggccagaccccactatagaactgagtctgaaggacaatgtcgattattgggttctaatggaccccgtgaaacaaatgctgttcctcaactccacgggcagggtgctcgatagagacccaccgatgaacatccatagtattgttgttcaggttcaatgtattaataagaaagtgggcacaataatttaccacgaggtgcggatagtcgttcgtgaccgtaacgataactcacctacctttaagcacgagtcatattacgccacagtgaatgagttaacacccgtgggtacgaccattttcaccgggttttccggtgacaatggggcgaccgacatagatgatggccccaacggacagattgaatacgttattcagtataatccagatgatcccacatcaaacgatacctttgaaattcctcttatgctgaccggcaacatagtgctcagaaaacgattgaattacgaggacaaaactaggtacttcgttattatccaggctaatgaccgggcacagaatctaaatgagcggcgaacgaccaccaccaccctgacggtggatgtgctggatggggacgacctcgggccaatgtttctcccatgcgtgctcgttcctaatacccgggactgtaggccccttacctaccaagcagccatccccgagctgcgcactccagaagagctaaatccaataatagtgacgccccccattcaggctatcgatcaagaccggaatatacaacctccttccgacaggcctggaattttatactccattctcgtaggtactccagaggactatccaaggtttttccacatgcaccctcgcacagccgagctatctctcctcgaacccgtgaatagagattttcaccagaagttcgatttggtcatcaaggccgagcaggataacggccacccactgccggctttcgccgggctacatatcgagatcctggatgagaataatcagagcccttactttaccatgccctcctaccaagggtacattctggagtcagcacctgtgggggccacgatctccgattcattgaacctgacctctcctcttagaatcgtggccctcgataaagacatagaagatacaaaagatcctgagctgcatctgttcctgaatgactatacgtccgtgtttactgtgacccaaaccggaattactaggtacctcactttactgcagcccgtggatagggaggagcaacagacctatacgttctctatcactgctttcgatggcgttcaggaatcagagccagttatcgtgaatattcaggtgatggatgctaacgacaatacaccaaccttccctgagatcagttacgatgtgtatgtgtatactgacatgcgacctggcgactccgtgattcagctcactgccgttgatgccgacgaagggtctaatggcgagatcacttacgaaatcctggtcggtgcacagggcgacttcatcatcaacaagacaacagggctgataacaatagcccctggtgttgagatgattgtcgggcggacgtatgccctgaccgtgcaggccgcagataacgctccacccgccgagcggagaaactcaatttgcactgtgtatatcgaagtgttgcccccgaataatcagtctccccctcggtttccccagctgatgtattcccttgagatctccgaggccatgcgcgtgggggcagtgttgctgaatttacaggctaccgatagggaaggtgacagcataacctacgctattgagaatggtgatcctcagcgggtcttcaacctgtctgaaaccacgggcatcctgaccctaggtaaggcattggacagggaatctacagaccgatatattctgattattacggcatcagatgggcgccccgatggtacctcgactgccacagtgaatatcgttgtgacagatgtgaatgataacgctccggtgttcgatccttacctgccaaggaacctgagtgtggtcgaagaggaagctaatgctttcgtgggacaggttaaggcaacagaccccgatgcaggcataaacggccaggttcactactcactcggtaattttaataacttattcaggattacctcgaatggatctatctacaccgccgtcaaactgaatagggaggttcgcgactattatgagctagttgtcgtagccactgacggagcagtgcacccgaggcacagtactctgacattagccattaaagtgttggatatagacgataacagccccgtcttcactaatagcacatatacagtgctggttgaagagaacctgccagctggcacaacgatccttcagattgaggctaaggatgtagatctgggcgccaacgtgtcctacagaatcaggtcgcctgaggtcaagcactttttcgcgctccacccatttaccggcgaactatctctgttgcggtctctggactacgaggcctttcctgatcaggaggcctctataacctttctggtagaggcattcgacatctatggaaccatgccccccggtatcgccactgtgaccgttatagttaaagatatgaatgattacccccccgtgttctcaaaacggatatataaagggatggtcgccccagacgcagtgaaaggaacccctatcaccacagtttatgctgaggatgccgacccccccgtttctcgcagacactag

SEQ ID NO: 54657 - DNA, 5055 bp, Artificial Sequence
  derived and/or modified sequence
atgttccggcagttctacctgtggacctgcctggccagcggcatcattctcggttcgctgtttgaaatctgtttgggccaatatgatgacgattgtaaactggctaggggcggccctccagccacaatagtggccattgacgaggagtcccgaaatgggacaatcctcgtcgataatatgctcatcaaaggtactgccgggggccccgatcccacaattgaactttccctgaaagacaatgtggattactgggtgttgatggacccagtgaagcagatgctgtttttaaactccactggtcgtgtgttagatcgcgatcccccaatgaatattcattccatagtcgtgcaagttcagtgcattaataaaaaagtgggtacaattatctaccatgaagtgcggattgttgtgagggaccggaacgataattccccaacattcaagcatgagtcttattacgcaaccgtcaacgaactcactcctgttggtacaaccatattcacaggcttttccggggacaacggagctactgacattgatgacggtccaaatggccagattgagtatgtgatccagtacaacccggacgacccaacatcgaatgatacgtttgagatcccgctgatgctgactgggaatatcgtactgcggaaacgcctcaactacgaggacaagactaggtatttcgtcatcatccaggccaatgatcgggctcagaacctcaacgagcgcagaacgacaacaactactctgacggtggatgtattagacggggatgacctgggacctatgtttctgccttgcgttcttgtgccaaacacacgcgactgcagacccctgacatatcaggcagcgatacctgagttaaggacgccagaggagctgaatcccattattgtgactcccccgattcaagctattgatcaggatagaaacattcaaccacctagtgaccgacccggtatactctactcaattctcgtgggaacgcctgaggattatccccgttttttccatatgcacccgcgtacagctgagctgtctttgttggagcccgtgaacagggactttcaccaaaaatttgacctggtgattaaggccgagcaggataacggacatcccctccctgcttttgcaggcctgcatattgaaatcctggacgagaacaatcaaagtccatactttactatgccttcttaccagggatatattttagagtccgcccccgtaggcgctacaatttccgattccctgaatctcacatcaccattgaggattgttgccctggataaagacatcgaagacgtcccacctagcggagttccaaccaaggatcccgaactgcacctattcctgaacgactatacatctgtatttaccgtgacgcagacaggtataacccgttacctgacgctactgcagcctgtagatcgggaagagcagcagacctatactttttcaatcaccgccttcgatggcgtacaggagagcgaacctgttatagtgaatatccaggtgatggatgcaaacgacaatacccccaccttccccgaaatctcttatgacgtctatgtatacacggatatgaggcctggggactctgtaattcaactcacagccgtggacgctgatgaaggatctaacggagagataacctatgaaatcctcgtaggggcacaaggagatttcattataaataagactacagggctcatcacgatcgctcccggagttgaaatgatcgtggggagaacctacgcactgaccgtgcaggctgccgacaatgcccctccagcagagcgcagaaactctatatgcaccgtgtacatcgaggtgcttccacccaataaccagtcgccccctaggttccctcagctgatgtatagcttggaaatatccgaagctatgcgcgtgggtgcagtcttactaaatcttcaagctactgatagggagggcgactctatcacttatgccatcgaaaacggcgatccacagagggtcttcaacctgagcgaaaccaccggaattctaacactgggcaaggcgctcgatcgggagagtactgatcgatacatcctgatcatcacagcatcagacggcaggcctgacggtacgtctacagctaccgtgaacattgttgtgaccgatgtaaatgacaatgccccagtatttgacccctacctgccgcggaacctttctgtggtggaagaagaagccaatgcattcgtgggacaggtgaaagctacagaccctgacgctggtataaacgggcaggtgcactacagtctcggcaactttaataatctgtttcgtatcaccagcaacggctcaatctataccgcagtaaaattaaaccgagaggtacgcgattactatgagcttgttgtggtggctacagacggcgccgtgcatccacggcactccaccctgacactggcaataaaggtgctggacattgacgacaactctcctgtgtttacaaactcgacctatacagtccttgtggaagagaatctgccagccgggaccactatactacagatcgaagctaaggacgtggacctcggtgccaatgtgtcataccggattcgatcacccgaagttaagcacttcttcgcccttcacccatttaccggcgaactgtcgctgctccgctcactcgattatgaggccttcccagatcaagaggcaagtataacgtttctggtggaggcctttgatatatatggaactatgccacctggcatcgctaccgtaaccgtcattgtgaaggatatgaacgactacccacccgtcttcagtaagcgtatttataaaggcatggtcgctcccgatgccgtcaaaggcaccccgattactactgtctatgcagaggatgctgatccgcccggtcttcccgccagcagagtccgctatcgggtagacgatgtgcagttcccctaccccgctagtatctttgaggttgaggaggacagcggccgagtaataacacgcgttaacctgaacgaagaaccaaccaccatattcaaactggtggtggtcgcttttgacgatggggaaccagtgatgtcctcgtctgctacagtgaagatactcgttctccaccccggagaaatccccagattcacccaagaggaataccgtccacctcctgtatcagagctggccactaaagggaccatggtgggggtaatttcagcagccgcgattaatcagtctattgtgtactccatcgtgtctggaaatgaagaagacacttttgggatcaataatattaccggtgtcatttacgttaatggcccactcgattacgagacgcgtactagctacgtactgagagtgcaggccgacagcctcgaggtagtattagctaatctgcgggtgccttcaaagtccaatacagctaaggtctatatcgagatccaggacgagaacaaccaccccccagtgtttcagaaaaagttctacatcggaggcgtgagtgaagacgcacggatgttcacatcagtattgcgggtgaaggctacggataaggacaccggcaactactctgtcatggcttaccgcctcataataccgcctatcaaggagggtaaggaaggtttcgtcgtcgagacgtataccgggctgattaagaccgctatgctgttccacaatatgaggagatcatattttaagtttcaagtgattgcgaccgatgactatggtaaaggcctaagcggcaaggcagacgttttggtctctgtggtaaaccagttggacatgcaggtgattgtgtcaaacgtaccaccaacacttgtcgagaaaaaaattgaagatctgacggagattcttgatagatatgtacaggaacagatcccgggcgccaaggtggtggtggagtcgatcggggcaagaagacacggggacgccttcagcctagaagattacactaaatgcgacctcacagtatacgccatcgacccacagacgaatcgcgcgatcgatcggaacgagctctttaaattcttggatggcaagctcttagatattaacaaggactttcagccctattatggtgagggagggcgtatcctggaaatccgcacaccagaggccgtgacttccatcaagaagagaggagaaagccttggatacactgaaggcgccctcctggccttagccttcattataatcttatgctgtatccccgctatcctggttgtattggtgtcctacaggcagtttaaggtgagacaagcagaatgtacaaagaccgctaggatccaggctgcattacctgccgctaaacctgcagtgccagctccagctcccgtagctgccccccctccgcctccacccccacctcccggcgcgcacctctatgaggaacttggagacagctcaatgcataaatatgagatgccccagtacggctcacgcagacgcctgctcccaccagctgggcaagaggaatacggggaggttgtgggcgaggccgaggaagaatatgaggaggaagagtgggcccgaaaaagaatgataaaactggtggttgatcgggagtacgagacgagttctactggagaggatagcgcccctgagtgccagcggaatagactgcatcacccatccatccacagcaatatcaacgggaacatctacatcgcgcaaaacggtagcgtggtgagaactaggcgcgcttgtttgacagataacttgaaggtcgcttctccagtgcgtctgggcgggccatttaaaaaacttgataagctcgccgtgacccacgaagagaacgtgcctttgaacaccctcagcaaggggccgtttagtaccgaaaaaatgaatgcgcggccaacactggtgaccttcgccccctgccctgtcggcaccgataacaccgctgtaaagcccctgcgcaaccgtctgaagtctactgtggaacaggaatcaatgatcgacagcaaaaacataaaggaagctcttgagttccactccgaccatacccaaagcgacgacgaagaactgtggatggggccatggaacaatctgcacatccccatgactaaactgtag

SEQ ID NO: 54658 - DNA, 2946 bp, Artificial Sequence
  derived and/or modified sequence
atgttccggcagttctacctgtggacctgcctggccagcggcatcatcctcgggagcctatttgaaatttgcctcggccaatacgacgatgattgcaaattagcgaggggagggcccccagccacgatagtggcaattgacgaagagagccgtaacggtactatcttggtcgataacatgctgataaaaggcaccgctggaggccccgaccccactatagagttgagccttaaggataacgtcgactactgggtgctcatggatcccgtcaagcagatgctctttttgaatagtaccggccgggtgctggaccgggacccccctatgaacatacacagcattgttgtccaggtacagtgtatcaacaaaaaagtaggcaccatcatatatcatgaggtccgcatagtcgtccgggacaggaatgacaactcccctaccttcaagcacgagtcttattacgctacggttaacgagctaactccggtgggcaccaccatctttactgggttctctggtgataatggagccaccgacatagacgatgggccaaacggacagatagagtatgttatccagtacaaccccgatgatcctactagtaacgatacattcgagatacccctgatgctcaccggcaacatcgtgctcagaaaacggctcaactacgaagacaagaccaggtacttcgttataatccaggcaaatgatcgagctcagaaccttaatgagagaaggactacgaccacaaccttgaccgtggatgtgctagacggagatgacttaggtccgatgttccttccctgcgtcttggtccctaacacaagggactgtaggcctctgacctaccaggccgctatcccagagcttaggacacctgaggaactgaatcctatcatagtgactcccccaatacaggctatcgatcaggaccggaatatccagcctcccagcgaccggcccgggatcctatactccatcctggtcggtacccctgaagattacccgagattttttcacatgcacccaaggacagccgagctgtctttactcgagcctgttaatagagatttccatcagaagttcgatctcgtcataaaagctgagcaggataacggccacccacttcccgcctttgccggcctccacattgagattttagacgagaacaaccagtctccatatttcaccatgccctcctaccagggctacatcctcgagtctgccccggtcggcgcaacgattagcgattctctgaatcttacctccccgctccggatagtggccctggataaggacatcgaggataccaaagaccccgagcttcatctgttcctcaacgattacaccagtgtcttcacagtgactcagacaggcatcacacggtatctgacactgctgcagcctgtagacagagaagagcagcagacctatacattttcaatcaccgcgttcgatggagtccaggagagcgagcccgtgatcgtaaacattcaggtcatggacgctaatgataatactccaacctttcctgagattagctacgacgtttacgtgtacactgacatgagaccgggagatagtgtgatacagctgactgccgtagacgctgacgaagggtccaatggggagattacatacgaaattctggtgggagcgcagggtgactttattatcaataaaacgaccggattgatcacaatcgcgccaggagttgagatgatcgtgggtcgaacctacgctctgacagtgcaggcggctgacaacgctcctccagcagaacgcaggaacagtatttgtaccgtttacatagaggtgctcccccccaataaccagagtcccccaaggtttccccagttgatgtacagtttggagatttctgaggctatgcgtgtaggagctgtccttctgaatctgcaggcaacggatcgcgagggcgactcaatcacatacgccatcgagaacggcgacccccaacgagtgtttaacttgtccgagaccactggtattttgactcttgggaaagcattagatagagaatctaccgatcgctatattcttatcattactgccagcgacggaaggcccgacggcgaggaacccaaaaagatcaagaagcctaaagtggagatccgggagccctcagaggaggaggaggtagtggtaacaattgagaagccacccgccgcagagcccacttataccacatggaagcgcgccaggatctttcccatgatttttaaaaaggtgagagggctggcagataaaagggggatagtagatctcgaaggtgaggagtggcagcgacgtctggaggaggaggataaggattacctaaaattaacactagaccaggaggaagccacggaaagcaccgtcgagtctgaagaagaaagctccagcgactacacagaatacagtgaagaggaatctgaattctcagagagcgagacaaccgaagaagagtccgaatcagagacaccctcggaagaagaggaaagctcgacaccagagtcagaagagtcagaaagtactgaaagcgagggcgaaaaggctagaaagaacattgtccttgccagacggcgtcctatggtggaggaggtcaaggaggtgaagggccggaaagaggagcctcaggaagagcagaaagagccaaagatggaggaggaggagcattcagaggaggaggaaagcgggccggcacccgtggaggaaagtaccgatcccgaagcgcaggacattccagaagagggcagtgccgagtctgcctctgttgaaggtggcgtagaatccgaagaggagagcgagagtggatcatcttccagttccagcgagtcccagagcgggggtccatggggctatcaggttccagcttacgaccgctcaaagaacgcaaaccaaaagaaaagccccggtgccaacagcgagggatataacacggctctgtag

SEQ ID NO: 54659 - DNA, 1965 bp, Artificial Sequence
  derived and/or modified sequence
atgttccggcagttctacctgtggacctgcctggccagcggcatcattctcgggtctctttttgagatttgccttggccagtacgacgatgactgtaagctggcccgcggcgggccccccgcgacaatcgttgccattgacgaggaaagtcgtaacggcacaattctggtggacaatatgctaattaaaggtacagctggaggacccgatcctaccatagagctgagcctgaaagacaatgtggactactgggtgcttatggaccctgtgaagcagatgctttttctgaatagcaccggaagggtgctcgaccgggatcctcccatgaacatccactctatcgtagtgcaagttcagtgcattaataaaaaggtaggtacaatcatctatcacgaggtccggatcgtcgttcgtgataggaacgataactccccgacttttaaacatgaaagttattatgcgactgtgaacgaactcactcccgtgggcaccactatctttacaggattcagcggggacaacggggcaactgacatcgacgacgggcctaacgggcaaatcgagtatgtgatccagtataatcccgatgatcctacctccaatgacaccttcgaaatccccctcatgctaactggtaacattgtacttcgcaagcggttgaactatgaggataagacacggtacttcgtgatcatacaggcaaatgatcgcgctcagaatctgaatgagcggcgcactactacaactacactaacagtcgacgtgttggacggcgatgatttgggccctatgtttcttccatgtgtgttggtgcccaacacaagggactgtcgcccattaacatatcaagctgccatcccagagctgaggacacctgaggagctcaatcccattatcgtgacgcccccaatacaggcaattgaccaagatcgaaacattcagcccccatctgatagacctggaatattgtactccatactggtcggcacaccagaagattatcccagattcttccatatgcatccccgaacggcggagcttagcctgcttgagccagtgaacagagacttccaccagaaatttgaccttgtaataaaagcagagcaagacaacggccacccactccctgcctttgctggattgcacattgagattctcgacgaaaacaaccagtctccatactttacaatgccttcgtaccagggctatattctggagtccgcccccgttggcgccacgatctctgattcgttaaaccttacatctccactgagaattgtcgccttggataaggacattgaagacacaaaggaccccgagttgcatctcttcctgaatgactataccagtgtcttcacggtgacgcagactggaatcaccagatacttgacactactgcagccagtggaccgagaagaacagcaaacttacacattctcaatcactgcctttgacggcgtgcaggagagcgaaccagtgattgtgaacattcaggtaatggatgcgaacgataacacgccgacttttccagaaattagctatgacgtgtatgtgtatactgacatgcggcccggagactccgtaattcagctcaccgctgtggatgcagacgaaggttcaaacggggagataacttatgaaatcttggtaggtgcccaaggcgattttatcatcaataagacgactggcctaatcaccatcgctcctggcgtggagatgattgtgggtcgcacctacgcgcttacagtccaggcagcggataatgccccacctgccgagcgacggaacagcatttgcactgtgtatatcgaagtgctgcccccgaacaaccagagtccccctagatttccgcaattgatgtactccctggaaatctctgaggccatgagggttggcgccgtgctactgaatctgcaacacggcgattcaaatctgcgcgagagtaccggacagggtaagcactag

SEQ ID NO: 54660 - DNA, 5034 bp, Artificial Sequence
  derived and/or modified sequence
atgttccggcagttctacctgtggacctgcctggccagcggcatcattctgggttcattgttcgagatttgtctgggccagtacgatgatgattgtaagctggccaggggagggcctcccgctacgatcgtagcaatcgatgaagaatctaggaatggcacgattctcgtagacaatatgttgatcaaggggactgcaggtggtccagaccctacaatcgagctatcactgaaagacaacgtcgattactgggtcctgatggatccagtcaagcaaatgctctttcttaatagtaccggtcgggttctggaccgagaccctcccatgaacatacattccatcgtggtgcaggtgcagtgcatcaacaaaaaggtgggcaccattatctaccacgaagtacgcatcgttgtgagggacagaaatgacaactctcccacttttaagcacgagtcatactatgccaccgtgaatgagctgacccctgtgggtacaacaatctttacaggcttctcaggcgataacggggcaactgacattgatgacggccctaatggccaaatcgagtacgtaatacagtacaatcccgacgatcccacttccaatgacacattcgaaatcccacttatgctgactggcaacatcgtactacgaaagcgcctgaactatgaggataaaaccagatactttgtgatcatccaggccaacgatcgtgcacagaatctgaatgaaagacgtacaacaacaacgaccctaactgtagacgtcctagacggtgatgacctcgggcccatgttcctgccatgtgtattggtgcctaacacgcgtgactgcaggcctcttacataccaagccgccattcccgagctaaggacccccgaagagttgaaccccattattgtgacaccgcctattcaggcaatcgaccaggacagaaacatacagccccctagtgatcgccccggaatcctctactcaattctggtgggaactccggaggactacccacgtttttttcacatgcacccacgaacagcggagctgagcctcttggagcccgtcaaccgcgacttccatcagaagttcgacctggtgatcaaagccgaacaagacaacggccatcccctcccagcgttcgccggactccatatcgagattctcgacgagaacaaccaatccccttactttacgatgccgagttatcaaggctacatcctggaaagcgctcccgtgggagccaccattagcgatagcctgaacctgacttctccccttcgtatcgtagctttggataaggatatcgaggacaccaaggatccagaactgcacctgtttctaaatgactatacctccgtgttcacagtcactcagaccggcattactagatatttaacccttttacagcccgtcgacagggaggaacagcaaacatacacattttcgattaccgctttcgatggagttcaggagagtgagccagtgatagtaaatatccaagttatggatgccaatgacaatacacccacattcccggagattagctacgacgtgtatgtgtacaccgatatgaggcccggagattctgtgatccagctgaccgccgttgatgccgacgaaggaagtaacggcgagattacgtacgaaatcctcgtgggcgcacaaggtgacttcattatcaataagacgaccggtttaattactattgcacccggcgtggaaatgatcgttggccgcacctacgcgcttaccgtgcaagccgctgacaatgctccgcccgcggaacgccggaattccatttgcaccgtctacatcgaagtgctccccccgaataaccagtctccccctcggttcccccagctgatgtacagtcttgaaataagcgaagcaatgagagtgggtgctgtgctgctgaaccttcaggcaactgaccgggaaggagatagcatcacatatgctattgagaatggggacccgcagcgtgtgtttaatctgagtgagactaccgggattttgacactcggcaaagcccttgatcgtgagtccaccgataggtatatacttatcatcactgcttccgacggtcgtcctgacggcacgtccaccgccacggttaacattgtagtgaccgatgtcaacgataacgccccagtttttgatccatacctgccacggaacctgagtgtggtggaagaagaagccaatgccttcgttggtcaagtcaaagctactgacccggatgctggtattaacggtcaagtgcattatagtcttggaaatttcaacaatctttttagaatcacgtccaacgggtccatctacacagccgtgaaacttaatagggaagttcgggattactatgaattggtcgttgtcgctacggatggcgctgtccaccctagacatagcaccctcaccctcgcgatcaaagttctcgatatcgacgataactcaccagtgtttaccaattcaacatataccgttctcgtggaagagaacctccctgccggtacaactatcctgcaaatcgaggctaaggacgtggatttgggagccaatgtctcttatcgcatccggtcgcccgaggtgaagcacttctttgcactccatccgttcacaggcgagctgtctctcctaaggagtttggactacgaggcttttccagatcaggaggcatcaattaccttcctggttgaagcctttgacatctacggaacaatgccacccggtattgccacagtaacagttatagtgaaagacatgaatgactacccccccgtgttctcaaaacgcatttacaagggcatggtcgccccagatgccgtgaaggggacaccaattactacagtttatgctgaagacgccgatccacccgggctccctgcaagcagggttcgataccgcgtggacgacgtccaattcccataccctgcttctattttcgaagtcgaggaagatagcggtcgggtcataactcgggtcaatcttaacgaggagccaactaccatcttcaagctggtcgtggtggctttcgacgatggagaaccagtaatgtcatcatctgctactgtcaagatcttagtgctgcacccgggggaaattcctcgcttcacccaagaggaataccgacctccaccagtcagtgaactcgctaccaagggcaccatggtgggagtgatttccgctgctgccataaaccagtccatagtgtatagcattgtctccggcaatgaggaggatacctttggcattaataatataacaggagtgatttacgtaaacggcccgctggattacgagacacgcacgtcgtacgtcctgagagtccaagctgactccctcgaggtggtgctggctaacctgagagtcccatccaagtctaacaccgccaaggtgtatattgagatacaagacgagaataatcaccctccagtgtttcaaaagaagttctatatcggcggcgtgagcgaagatgccaggatgtttacctccgtgctccgggtcaaggctacggataaggataccggtaactactcagtgatggcttaccgactgatcattccaccaattaaggaaggaaaggagggtttcgtggtggaaacttacactggtctgattaagaccgcaatgttgttccataacatgagaagaagctactttaagtttcaggtcattgcaaccgacgactacgggaagggtctcagcggtaaggctgacgtcctggtctctgtagtgaatcaactcgacatgcaggtcatcgtgtccaatgtgcccccaactctggtagagaagaagatcgaggatctcactgaaattttggaccgttatgttcaggaacagattcccggagcgaaggttgtggttgagtccattggtgctcgaaggcatggcgacgccttctcccttgaagattacaccaagtgcgacttaactgtgtatgcaatagatcctcagactaatagggcaatagatcgtaatgaactttttaagttcctggacggaaagctactggacatcaacaaggactttcaaccctactacggtgagggaggaagaatacttgagatcaggactcccgaagccgttacaagcatcaagaaaagaggggagtcactggggtacactgagggggcgctgcttgccctggcatttatcattattctctgttgcattccagccatcctggtggtgcttgtctcatacaggcacttcaagaggcggcaggccgagtgcaccaaaacggccagaattcaggcagcactgccagcagccaaacctgctgtaccggctcccgctcctgtggccgctccaccccccccaccacctcccccccctggcgctcacttgtatgaggagttgggggatagttcgatctatcgatatgaaatgccccaatacggcagcagacgccgcctgctgccccccgcgggtcaggaggaatatggagaagtggtcggtgaggccgaggaggagtacgaggaagaagaatgggcacggaaacgcatgatcaaactggtagtcgaccgagaatacgagaccagctcaaccggggaagattccgcccccgagtgccaacgaaatagactgcaccatccttcaatccactcaaacattaatgggaatatttacatcgcgcagaacgggtcggtcgtgcggacccggcgagcctgtttgacggataaccttaaggttgctagccctgtaaggctgggtggcccattcaagaagcttgacaagctcgctgttacacatgaagagaacgtgcctttgaacacactgtcaaagggacccttcagtaccgagaagatgaatgccaggcccactctggtcacgtttgccccctgtcccgtgggcacagacaatactgctgtcaagcctctgcggaatagactcaagagcactgtggagcaggaatccatgattgactctaaaaacattaaggaggctctggaattccatagcgatcatacccaaagcgacgatgaggaactctggatggggccatggaataatctgcacatccctatgactaaattatag

SEQ ID NO: 54661 - DNA, 2886 bp, Artificial Sequence
  derived and/or modified sequence
atgtttcggcagttctacctgtggacttgcctcgcatcgggtatcattctcggaagcctgttcgagatctgcttgggacaatatgatgatgattgtaagctcgctcggggaggacctcccgcaacgatagtcgccatcgatgaggagagtcgcaatggtacaattctggtggataacatgcttattaagggaaccgcagggggaccagaccccactatcgaactgtcgctgaaggataacgttgattattgggtgctgatggatcccgttaagcagatgctgtttctgaatagcacaggacgcgtcctggatcgagaccccccaatgaatattcactcaattgtcgtgcaggtccagtgtataaataagaaagtcgggacaatcatctatcacgaggtgcgcattgtcgtcagggatcgaaatgataacagtcctacattcaaacacgaatcctattatgcaacggttaatgaacttacacctgtgggaaccacaatttttacaggcttttccggtgacaatggggctaccgatattgatgatggacccaatggccagatcgagtatgtgatccagtataatcccgacgatcccacgtccaacgacacgttcgaaatcccgcttatgttgacaggaaatatcgtgctacggaagcgcctgaattacgaagataagacccgatacttcgtcattatacaggccaacgaccgggctcagaacctgaacgagcggagaactactaccaccactctgaccgtcgacgttctggatggcgatgacctcggacccatgtttctaccctgcgtgctggtgcccaatacgagggattgccgtccgctcacctaccaagcagccatcccagaactgcggaccccagaggagctgaacccaattatagtgacaccaccaatccaggccatagaccaagaccgcaacattcaacctccctccgaccggcctggcatcctgtattcaatactggtggggacacccgaggactacccgagattctttcacatgcaccccaggaccgctgagctcagcctactcgagcccgtcaaccgcgacttccaccagaagtttgacctcgtgattaaagccgagcaggataacgggcatcctttgcctgcttttgcgggtttgcatatcgaaatactggacgagaataaccaatccccctatttcacaatgccttcataccaggggtacatcctcgagtcggcgcctgtcggtgctacgatttctgactctctgaatcttacctcccccctccggatcgtcgccttagataaggacatagaagatacaaaggacccagaactccacctgttcttgaatgattatactagcgtttttaccgtcacacagactggaatcactcggtatctgaccttgctgcagccagtggatagagaagagcagcagacctacacgttttctataaccgcatttgatggggtgcaggagtccgaaccagttatcgtgaacattcaggtcatggacgccaatgataatacccccacatttcccgagattagctacgatgtgtatgtttataccgatatgcgcccaggcgactctgtgattcaacttactgccgtggatgccgatgaggggtcaaacggagagatcacttacgagatactggtcggggctcagggagacttcatcatcaataagacgacagggctgatcaccattgcccctggcgtggagatgatcgtcggtcggacctatgcattgactgtgcaggcagcagataatgcccctcctgccgaaagacgaaacagcatttgtacagtgtacattgaggtcctaccccctaataatcaaagtccacccaggttcccacagctcatgtatagtctcgaaataagcgaggcaatgagggtcggggctgtactgttaaatcttcaggccacggatcgtgaaggcgacagcatcacctacgctatcgagaacggcgaccctcagagggttttcaacctgtccgaaacaaccggcattctgacactgggcaaagctcttgatcgggagagcacagatcggtacatcctgataattactgcttctgatggaaggcctgacggaaccagcacagccacagtcaacattgtcgtgaccgacgtaaatgacaacgccccagtcttcgatccctacctgcccaggaacttgtctgttgtggaagaggaagccaacgcatttgtgggccaggtgaaagcgaccgatcccgacgctggcatcaacggacaagtgcattacagtctggggaactttaataacttatttaggatcacctctaacggctccatctatacagccgtcaaactgaatagagaagtgcgcgactattatgagctcgttgtggttgcaactgatggcgcagtccatccaagacatagtaccctgacattggctataaaggttcttgatattgacgataactctcccgtcttcaccaactctacttacactgttttggtggaagaaaatcttcccgcaggcaccaccatcctgcagattgaagcaaaagacgttgacctcggagccaacgtgtcctacaggatccggtctccagaggtgaaacattttttcgccctgcatccttttacaggcgagctgtcgttattacgcagtctggactatgaggcatttcccgaccaggaggcctccatcacctttttggtggaagcattcgatatttacggaaccatgccccctggcattgctactgtgaccgtgattgtgaaagatatgaacgactaccccccagtgttctctaagagaatatacaagggaatggtcgctcccgacgctgtgaagggcactccaattaccacggtatacgccgaagacgctgatcccccagtttcacgtagacactag

SEQ ID NO: 54662 - DNA, 5054 bp, Artificial Sequence
  derived and/or modified sequence
atgtttagacagttctacctgtggacatgcctggccagcggcataatcctaggatcacttttcgaaatatgcctagggcagtacgatgacgactgcaaactcgctcgcggaggtccccctgccaccatcgtcgccatcgatgaagagtctcgtaacggaaccattttagtggacaatatgctgatcaaaggaacagccggaggtcctgatcccacaatcgagctgtcactcaaggacaatgttgactattgggtactcatggatccagtaaagcaaatgttgttcctcaatagcactggtagagttctggaccgggatcccccaatgaatatacactcaattgtggtacaagtgcagtgcattaataagaaggtgggcactatcatttatcacgaagtgcgcattgtggtgcgcgacagaaacgataactctcctacgtttaagcacgagtcctactatgccaccgttaacgagctgactccagtggggaccactatattcaccgggttttccggagataatggggctactgatatcgatgatgggcctaacggccaaatcgaatacgtgattcaatacaatccagacgacccgacatctaacgatacgttcgaaattccactgatgttgaccggcaacatagttttaagaaaaagactaaattacgaggataagacaaggtactttgtcataattcaggctaacgatcgggcacagaatctcaatgaacggagaactactacaacgaccctgacagtggacgtcctggacggtgatgacttgggccctatgtttcttccctgcgtgctcgttccaaatactcgggactgccggccactgacgtaccaggccgcaatcccagaactgaggacaccagaggaactcaaccccataattgtgaccccccctatccaggccatagaccaggataggaatattcaaccacccagtgaccggccaggcatcttgtacagcatattggtagggacccctgaggattacccacggtttttccacatgcatcctcggactgctgaactgagtctactcgaaccagtgaacagggacttccatcagaaatttgatcttgtcatcaaagctgagcaagacaacggccaccctctgccagcctttgccggtctccacatcgagatcctggatgagaacaatcagtccccctacttcaccatgccctcctatcagggctacattctagagtctgcccctgtcggtgctaccattagtgacagcctgaacctcacatcgcccctccgcatcgtggcccttgacaaagatatcgaggatgtgccgccaagtggcgtgcccacaaaggaccctgaactgcatttattcctaaatgactacacatccgtcttcactgtgacacagacaggaatcacccgttatctgaccctgttgcaaccagtcgacagggaagagcaacagacctataccttttcgattacagctttcgacggagtgcaggagtccgagccagtgatagttaacattcaagtgatggacgcgaacgacaacacacctaccttcccagaaatcagctacgacgtgtatgtttacactgatatgcgaccaggcgactctgttatccagctcaccgctgtggacgctgacgaggggtccaacggggagataacgtatgaaatcctagtgggagcgcagggagatttcattattaataaaaccaccgggctcatcacgatcgcacctggcgtcgaaatgattgtgggtcgcacatatgcactgaccgtacaagcagccgataatgcccctcctgccgagcgcaggaattccatttgcacagtttacattgaagtacttccacctaataatcagagccctccgagatttccccagcttatgtattccctggagatttccgaggctatgagagtgggcgctgttttactgaatctccaggctacggatagggaaggcgatagcataacgtacgctatcgagaacggagacccccaacgagtgttcaatttgtccgaaaccacaggcattctcactctggggaaagcactcgatcgcgaatcaaccgataggtacattctcatcattacggcttccgatgggagacctgacggcacgtctactgctacggtgaatatcgttgtgacggacgtgaatgacaacgctccagtatttgacccttatttgcccagaaatctgagcgtggtcgaggaggaggcaaatgcctttgtgggacaagtgaaggccaccgatcccgatgcaggcatcaacggacaagtccactactccctcgggaacttcaataatttgttcaggatcacctccaatggcagcatctatacagcggtgaagcttaatcgggaagtgcgtgactattacgagctcgtagtcgtggccaccgatggcgctgtgcatccaaggcattcaaccctgacactagcgatcaaggtcctcgatatcgatgataattccccagtatttaccaactctacttatacagtcctggttgaggagaatttgcccgctggaacgaccattttgcagattgaggccaaggatgtggatttgggcgcaaacgtgagttaccggatcaggagcccggaagtaaaacattttttcgctctacacccctttacgggagagctctccctcttgcgctcactggactatgaagcctttccagaccaggaggcgtcaataaccttcctggtggaggctttcgatatctacggcactatgccccctggtatcgccacagttactgtgatcgtgaaggacatgaacgattatccgccagtattttccaaacggatctacaaggggatggtggcaccagatgcagttaaggggactcccattaccacggtctacgccgaggacgctgatcctcccggattacctgcttcaagagtccgttatcgagtagatgatgtacagtttccgtatcccgcaagcatatttgaagtcgaagaggatagtggacgggtgatcactcgggttaatcttaacgaagaaccgaccacaatcttcaagttggtcgtggtagccttcgacgacggcgagccagtcatgtcttcctccgccacagtcaagattttagtgctgcatcccggagaaatcccgagatttacccaggaagaataccgacctccacctgtaagtgaattggctacgaaaggaaccatggtcggcgtaattagcgcagcggcaattaaccaatccatagtgtattcaattgtcagtgggaacgaagaggacactttcggaattaataacatcaccggtgtgatttacgtcaatggcccattagattatgagactcggacttcttatgtcttgagagttcaggctgacagtctggaagtcgtgctcgcgaacctcagggtcccctccaagagcaatactgccaaagtctacatcgaaattcaggatgagaataatcatccaccagtattccaaaaaaagttctacattgggggtgtaagtgaagatgctcgaatgtttacgtccgtactgagagtcaaagcaacggacaaggatactggtaactatagtgtgatggcctaccggcttattattccaccaattaaggaggggaaggaaggcttcgtcgtagagacatacactggattgatcaagaccgcaatgttgttccacaacatgcggcgttcatatttcaagttccaagtgatcgccacagatgactacgggaaaggactgagtggcaaagctgatgtactcgtatcagtagtcaaccagttagatatgcaggttatagtgtctaacgttccgcctactttggtggagaaaaagatcgaagatctaaccgagatcttggacagatacgtgcaggagcagattccgggtgccaaagtagttgtggagagcattggggctcgccgacatggtgatgctttttctctcgaggattatactaaatgcgatctgaccgtttatgcaattgacccgcagacgaatagagctatagaccggaatgagttgttcaagttcctggatggaaagctactcgatatcaacaaggatttccaaccatattacggggagggagggagaattttagagatccggactcctgaagccgtcacctctattaagaaaagaggagagagcctaggctacacagagggtgcactcctcgcacttgctttcataattatactgtgctgcataccagctatcctggtggtgctggtgagctaccgccagtttaaggtcaggcaagccgaatgcaccaaaaccgcacgcatacaggcagcactgcctgccgctaagccagctgtcccagcgcctgctcccgtggccgcaccaccaccacccccacccccacctcctggcgctcatctgtacgaggagctgggcgactccagtatgcataagtatgagatgccccagtacggtagccggagacgtttactaccacctgcaggacaagaggaatacggagaggtcgtgggcgaggccgaggaggagtatgaggaggaggagtgggccagaaagcggatgatcaagctcgtggtggacagagagtacgagacaagttccacaggcgaggatagcgcacctgagtgccagcgaaaccgcctgcaccatcctagtatccacagcaatatcaatgggaatatttatatcgcgcaaaacgggagtgttgttaggacacggagagcatgtctcacagataatctgaaggtggcgagtcccgttaggctggggggtccttttaaaaaactggataagcttgcggtgacacacgaggagaacgtcccgctgaacacactctctaaaggacccttcagcacggagaagatgaatgccagacctacccttgtgacatttgccccttgtccagttggtaccgataacacggctgtgaagcccctgcgaaaccgcctaaagtcaacagtcgagcaggagtcaatgattgacagcaagaatatcaaagaagccctcgagtttcactccgatcatacacagagcgatgacgaagagctgtggatgggcccatggaataacctgcacatccccatgaccaagttgta

SEQ ID NO: 54663 - DNA, 2946 bp, Artificial Sequence
  derived and/or modified sequence
atgttccgacagttctatctatggacttgtttagcatccgggatcattttgggctcactgttcgagatttgtctgggacaatacgacgatgattgtaaactcgcgaggggaggtcctcccgcaaccatagttgctattgatgaagagagcaggaacggaacaatcctggtggacaacatgcttatcaaaggaacggcgggagggcctgatcccacaatcgaactttcactgaaggacaatgtggattattgggtgttaatggaccccgtaaagcagatgctgttcctgaacagcacagggagggtactggatagggacccccctatgaatattcactccattgtggtgcaagtccagtgcatcaacaagaaagtgggtactatcatctaccacgaagtgagaatcgtagtgcgcgacagaaatgataactctcccaccttcaaacatgagtcgtactatgctacagttaatgagctgacccctgtgggtaccaccatcttcactggcttttccggggacaatggagccactgatatagacgacggcccaaacggccagatcgaatacgtaatccagtacaatccggacgaccctactagcaacgacacgtttgagattcctctcatgcttactggaaatatcgtcctccgcaagcgcctcaactatgaggataagacacggtacttcgtcatcattcaggctaatgacagagctcagaatcttaatgagcgacgcacgaccacaaccaccctgactgtcgacgtgttggacggcgacgaccttggtccaatgttcctgccatgtgttctcgtcccgaatacgcgagattgtagaccccttacttatcaagccgctattcccgaactgcggacgcccgaagaactaaaccctattattgttacccccccaatccaggcaatcgaccaggataggaatatacagccaccctctgacagacccggaattctgtactctattctggtaggaacccctgaggactaccctcgcttctttcacatgcatcccagaacagcagagttgtccctgctggaacccgtaaatagagatttccatcaaaagttcgatctggtcatcaaagccgagcaggacaacggccatccactcccggctttcgcgggtctccacattgaaatcttagatgagaacaaccagagtccctacttcactatgcccagctatcaaggctatatacttgaatctgctcctgtgggagccactatctcagacagccttaatctgactagtcctctcagaatcgtggcactcgataaggacatcgaagacaccaaagaccccgaactccatctcttccttaacgactatactagcgtttttacagtcacacaaacaggcatcacaagatatctcaccctcctgcagccggtcgaccgggaagaacagcagacctacaccttcagtatcaccgcctttgatggcgttcaggagtcagagcccgtaatcgtcaacatacaggtcatggacgcaaatgacaacacacctacattcccggaaattagctacgacgtctatgtatacaccgacatgcgccctggggattccgtcattcagctcactgctgtcgatgccgatgaggggagtaacggagagattacgtacgaaattttggtgggcgctcagggtgactttattatcaacaaaacaacggggcttatcaccatagcgcctggggtggagatgattgttgggagaacctatgccctaaccgtgcaggcggcagataacgctcccccagctgagagacgtaattcaatttgcaccgtttatatcgaagtgttacccccaaataaccagagtccacccaggttccctcagctgatgtactcactggaaatatctgaagcaatgagggtgggggctgtgcttctgaatctgcaggctaccgatcgggagggggacagcatcacctacgcaatcgagaacggagacccccaaagggtttttaacctgagtgagacaaccgggatcctcacactcggaaaagctctggaccgggaatcaaccgatcgctatattttaattatcaccgcatctgacggtcggccagacggggaggagccaaagaagatcaaaaaacccaaagtcgaaatcagggagccaagcgaagaagaggaggtcgtggtgacgatcgaaaaaccgcctgcggcagagccaacgtacaccacctggaaaagggcccgaattttcccgatgatctttaaaaaggtgcgcggattggcagataaaagggggattgtggatctggagggtgaggaatggcagagacgactcgaggaggaagataaagattacctcaagctaactctggaccaagaagaggctaccgagagtaccgtggagtcagaagaggaaagttcaagcgattataccgagtacagtgaagaggaatccgagttttcagagagcgaaaccaccgaggaagagtctgaaagcgaaacccccagcgaggaggaggaatcctctacccccgaaagcgaggagtcagaatccaccgagagcgagggcgagaaggccaggaaaaatatcgtcttggcccgtcgcagaccaatggtggaagaagtaaaggaggttaaaggaaggaaggaagaaccccaggaggagcagaaagagcccaagatggaggaggaggagcactctgaagaagaagagagcggtccagctccagttgaggagagtacggaccctgaggcccaggacatcccagaagagggtagtgctgaaagtgcttccgttgaaggaggggtggagtcagaagaagaaagcgagtccggttctagctccagcagcagtgagtctcagtcgggcggaccttggggttaccaagtacccgcttatgaccggtccaagaacgcgaatcagaaaaagtctcctggggctaacagtgagggctacaatactgctctctag

SEQ ID NO: 54664 - DNA, 1965 bp, Artificial Sequence
  derived and/or modified sequence
atgtttcgacagttttacctgtggacttgcctagcctcaggtattattctaggaagcctctttgaaatttgtttgggtcagtatgacgacgattgcaagttggcccgtggcggaccaccagcgacaatcgtggcgatcgacgaagagtccaggaatggcactattctcgtggacaatatgctgatcaagggaacagccggaggacctgatcctacgatcgaactgtcactcaaagacaacgtggactactgggtgcttatggatccagttaaacaaatgctattcctgaactccactgggagggtgctggaccgcgatcctcccatgaacattcattcaattgttgtgcaggtacagtgtatcaataaaaaagttgggacgatcatttatcacgaggtccggatagtggtgagggacaggaatgacaacagcccaacttttaaacacgaaagctactacgctactgtgaatgagctgacacccgtcgggactacaatattcacggggttttctggtgacaatggcgcaaccgatatcgatgatgggcctaacgggcagattgaatatgttatccagtataatccagacgatccgaccagcaacgacacatttgagatcccactgatgctcacgggcaacatcgtactccgcaaacggctgaattatgaagataaaacccgctacttcgtgattatccaagccaatgatagggctcagaatctcaatgagcgcagaacaactaccactactctgaccgttgacgttttagatggagatgatttgggccctatgtttttaccctgtgttcttgtgcccaataccagagattgtaggccactcacttaccaggccgctatcccagagcttcgcacccccgaagagctgaatccaattatcgttaccccaccgatccaggccatcgaccaggatcggaacatccaaccccctagcgaccgccctggtatactgtattccattctcgtgggaacacccgaggactatcccaggtttttccacatgcatcctcgcacagcagagttgtccctgctagaacccgtgaatagagattttcaccagaaattcgacctagtcattaaggccgagcaggacaacggccaccctctgcctgcattcgccggactccacatcgaaattctagatgaaaacaaccaaagcccgtactttaccatgcccagctaccaggggtacatcttggaatcagccccagttggggcaaccatcagtgattccctgaatttaaccagcccattgcgtatcgtcgccttggacaaggatatagaagacaccaaggacccagagctccacctcttcctaaatgattatacatccgtgttcactgtgacccagacaggaatcactaggtatttgaccctgctccagcccgtcgatcgtgaggaacaacaaacctatactttctccattacagcatttgacggcgttcaagagtccgagccggtcattgttaatatccaagtcatggacgccaatgataacacgcctaccttccccgagatctcatatgatgtgtacgtgtatacagatatgaggcccggagatagtgtgattcagctaactgcggtggacgcggatgaggggagcaacggtgaaattacctatgaaattttggttggcgctcagggagattttattattaacaaaactactggccttattacaattgcgcctggagtcgagatgatcgttggcaggacctatgctttgacggtgcaggccgctgacaacgccccacctgccgagcgtcggaactcgatttgcacggtctacatcgaggtactgcctccaaacaaccagagcccaccaagatttccacagcttatgtattctcttgagattagcgaggctatgcgagtgggggctgtgcttctcaacttgcagcacggagactccaatctccgagagagtaccggccagggaaagcactag

SEQ ID NO: 54665 - DNA, 5033 bp, Artificial Sequence
  derived and/or modified sequence
atgttcaggcagttttatctgtggacctgtctggctagcggcatcatccttgggtctttattcgaaatttgtctgggacaatatgatgatgactgtaagttggcccgaggcggtcctcccgcaaccatcgtggctatcgacgaggagtcccggaacggaactatcctggtggataacatgttaatcaaagggacggccggtggcccagatcctaccattgagttgtctctcaaagacaatgtcgattattgggtactgatggaccccgtcaaacaaatgctgttcctcaacagcactgggagagtgcttgaccgcgacccccctatgaatattcacagtatagtcgtgcaggtccagtgcattaacaagaaggttggtactatcatttaccatgaggtgagaatagtagtccgggataggaatgacaattccccaactttcaagcacgagagctactatgccaccgttaacgagctgacacccgtgggtactacaattttcaccgggttctccggagacaacggcgctactgatatcgatgatggaccaaacgggcagattgaatacgtcatccagtacaaccccgatgaccccactagcaacgataccttcgaaatcccattgatgttgacgggcaacatagtccttaggaaacgcttaaactacgaggataagacaagatatttcgtcatcatccaagccaatgaccgagcccagaatctcaatgaaagacggactaccaccactaccctcacagtggacgtgctcgacggcgacgatctggggccaatgttcctgccctgcgtgctggtgcctaatacaagagattgcaggcccttgacatatcaagcagccattccggaacttaggacccccgaagagctgaaccccattattgtaacaccccctattcaggccatcgaccaggaccgtaacattcagcctccttccgatagaccgggtatcctgtacagcatactggtcgggacgccggaggactatcctcggttctttcatatgcacccaagaaccgcagaactgtcactcttagaaccagttaatcgcgatttccaccagaagtttgatctggtgatcaaggctgagcaggataatggacaccctctgccagccttcgcgggtctgcatattgagatccttgatgagaataaccagagtccatattttacaatgccatcttaccagggttacatcctcgagagcgcgcctgtcggcgcaaccatttccgattcgctgaatctgacctcccccctgagaattgtggctctggataaggatattgaagatacaaaggacccagaactgcacttgtttctgaatgattacacctcggtattcactgttacccaaactgggataactaggtacctgacattactccaacctgtggacagggaggaacagcagacctataccttttcaattaccgcttttgatggggtgcaggagtcagagccagttattgtcaacattcaggtcatggatgccaacgacaacactcctacctttcccgagatcagctacgacgtttatgtgtatactgacatgcgtccaggagactcagtgattcagctgacggccgttgacgcagacgagggctcaaatggtgagattacctatgaaattctcgtaggagcccaaggagactttatcataaacaaaacaacaggcctgataaccattgccccaggtgtggagatgatcgtagggcgaacctacgcgcttacagtgcaggcagctgataacgctccaccagccgagagacgcaactccatctgcactgtgtatattgaagtcctgccacctaacaaccagagccctccaaggttcccgcagctgatgtatagcttggaaataagcgaagcaatgagagtgggcgcagtactgctcaatctgcaagccacggaccgagagggcgattctataacctatgccatagagaacggcgaccctcagcgcgtgtttaatctatctgaaactaccggtattctgacactcggtaaagccctggatagagagtcgaccgataggtatattctcattatcacagcctccgacggacggcctgatggaactagcactgcaacagtcaatattgtggtcaccgatgttaacgacaatgctcccgtgtttgatccgtatctcccaaggaacttgtctgtggtggaggaggaggcaaatgctttcgtgggacaggtcaaggctaccgaccccgacgccggaatcaacgggcaagttcactatagtctgggaaacttcaacaacctgttccgcattacgagcaatgggagcatctatacggctgtgaagttgaacagggaagttcgggactactacgaactggtcgtggtcgccactgatggggcagtccatcccagacattccacactgacacttgctatcaaggtgctggatattgatgataacagcccagtgtttaccaatagtacctataccgtgctggtggaggagaacctcccagcaggcaccaccattttacagattgaggcaaaagacgtggatcttggtgcaaacgtttcttaccgaatccgctcgccagaagtcaaacatttctttgccctccatccatttactggcgaacttagcctcttacgcagtctggattatgaagcattccccgaccaggaggctagcataacctttctcgtggaagcgtttgacatttacggtacgatgcctccgggaatcgcaacagtgaccgtgatcgtgaaggacatgaacgattatccgcctgtgttctccaaacggatttacaaggggatggtcgctcctgatgccgtgaaggggacgcccatcacaacagtgtatgctgaggacgcagatccccctgggctgcccgcttctcgcgtgagatacagagtggacgatgttcaattcccataccccgcatcaatcttcgaggttgaggaggatagcggacgagttatcactcgggtgaacttaaacgaagagccaactaccatcttcaaactggtggtcgtagcatttgatgacggggagcccgtcatgtcttctagcgccaccgtgaaaatattggtgttgcaccctggggagatccctaggtttacacaggaagagtaccgtccccctccagtgagcgagctggccactaaggggaccatggtgggagtaatttctgcggctgctatcaaccagtctattgtctactcgattgtgtccgggaacgaagaagacaccttcggaattaacaatataactggcgttatttatgtgaacgggcctctcgactatgaaacaaggacctcctatgtgctgcgggttcaggccgactccctggaggtagtgctcgcaaatttacgcgtaccgtccaaatccaataccgccaaagtctatatcgaaatccaggatgagaacaatcaccctcctgtgtttcaaaagaagttttacattgggggtgtgtcagaagatgctcggatgttcacctcagtgctgcgcgtaaaagctactgacaaagatactggaaattactcagtgatggcctatcggcttattatcccccctatcaaagagggtaaggaggggttcgtggtagaaacatacactgggctaataaagacggctatgctctttcataatatgaggcgcagctactttaagttccaggtgatagccactgacgactacggcaagggactgagcggaaaggccgacgtcctcgtctctgtggtgaaccagctcgatatgcaggtcattgtctctaatgtgcccccaaccctagtggagaaaaagattgaggacctgactgagatcctggaccgatatgtgcaggaacaaatcccaggcgcaaaggtggtggtagagtctatcggcgctcggaggcatggcgatgctttcagcctggaggattatacgaagtgtgatttgaccgtgtatgccatcgatcctcaaacaaaccgcgcaatcgatcggaatgagctgtttaagttcctcgatggcaagctgctcgacattaacaaggattttcagccatactatggagagggcggacgcattctggagataaggacacctgaggcagtgacgagtatcaagaagcgaggagagagcctcggctatactgaaggggctcttctagccttagcatttattataattctgtgttgcatccctgccatcctggtggtcctggtgagctataggcactttaaaaggcgtcaggcggaatgcaccaagacagccaggattcaggctgccttgcctgcagcgaaaccggctgtgccagccccagctcctgtggccgctccccctcctccgccacctccgccacccggagcccatctgtatgaggagctgggggactccagcatttataggtacgaaatgccccagtatgggtccagaagacgtctgctacccccagccggacaggaggagtacggagaggtggtgggcgaggctgaagaggagtacgaggaagaggaatgggctagaaaaaggatgattaaactggtcgtggaccgcgaatatgaaacttcctccaccggagaggacagcgcgcctgagtgccaaagaaaccggctgcatcatccatccattcattccaacatcaatggtaatatttatattgcccagaatggctccgttgtgagaactcgtagggcctgccttaccgacaacttaaaggtcgcttccccagtgcgcctgggagggccttttaaaaagctggataaactggccgtgacccacgaggagaatgtccctctgaatacactcagcaagggaccattcagtaccgagaaaatgaatgctcgccctaccctggtgacttttgctccttgcccggttggaaccgataatactgcagtgaagcctctgaggaatcgcttaaaatccacagtggaacaggaatctatgatagacagtaaaaatattaaagaggcactagagttccactcagaccacacccagagcgacgacgaggaattgtggatgggtccttggaataatctccatattccaatgacgaaactgta

SEQ ID NO: 54666 - DNA, 4230 bp, Artificial Sequence
  derived and/or modified sequence
aacgtggagaatgatggtatgctttctgagttaacatgttgaactgttttgcttttctaaaaattttcctagtaacattttcttgatgatatgagagtggatatcaatgcctcacagaaacaagaggtggaacatgtgaatgaatcgtcttggaactagattatgagcactggttctttttaaagggatgtgcaagaggcagccttggcaagaaaacttgctgcataatcttacatggactaaagatgaaactttaaaccgcaaatcagctttgagtgaactttgacagaagatgtttcgacagttttatctctggacatgtttagcttcagggatcatcctgggctctctctttgaaatctgcttgggccagtatgatgatgattgcaaactagctaggggaggaccaccagctaccatagttgctattgatgaagaaagtcggaatggtacaattctggtggacaacatgctgatcaaagggactgctggaggaccagaccccaccatagaactttctttaaaggataatgtggattactgggtgttgatggatcctgttaagcaaatgcttttcctgaacagcaccggaagagttctggatagagatccaccgatgaacatacactccattgtggtgcaggtccagtgcatcaacaaaaaagtgggcactattatctaccatgaagtgcgaatagtggtgagagacaggaatgacaactcacccactttcaagcatgaaagctactatgccacagtgaatgagctcactccagttggtaccacaatattcacaggattttcaggagacaatggagctacagatatagatgatggaccaaatggacagatagagtatgttattcagtataatccagatgatccgacatccaatgacacctttgaaattcccctaatgttgactggaaatatagtgttaaggaagaggctcaactatgaagataagactcgctactttgtcataatccaagctaatgaccgtgcccaaaatctgaatgagaggcgaaccaccaccaccactctcacagtggatgttctggatggagatgacttgggtccaatgtttcttccttgtgtccttgtgccaaacactcgtgattgccgtccactcacttatcaagctgccatacctgagttgagaactccggaagaactgaaccccattattgttacgccaccaatccaagccattgatcaggaccggaatattcaaccgccatcagataggccaggaatcctctattccatccttgttgggactcctgaggattacccacgatttttccatatgcatcctaggacagcagaacttagtctcctggagccagtaaacagagactttcaccagaaatttgatttggttattaaggctgaacaagacaatggtcatcctcttcctgcctttgccggtctacacattgaaatactggatgaaaacaatcaaagtccatattttacaatgcccagttatcaaggctatatcctggaatctgccccagtgggagcaaccatttcggacagtctcaatttgacttcacctttaagaatagtagctctggacaaggacatagaagatacaaaagacccagagcttcacctttttctgaatgactacacctcagtcttcaccgtcacacagactggtattactcgctacctcaccttacttcaaccagtggacagggaagaacagcaaacttacaccttttcgataacagcatttgatggtgtacaagaaagtgagccagtcatcgtcaatattcaagtgatggatgcaaatgataacacgccaaccttccctgaaatatcctatgatgtgtatgtttatacagacatgagacctggggacagtgtcatacagctcactgcagtcgacgcagacgaagggtcaaatggggagatcacatatgaaatccttgttggggctcagggagacttcatcatcaataaaacaacagggcttatcaccatcgctccaggggtggaaatgatagtcgggcggacttacgcactcacggtccaagcagcggataatgctcctcctgcagagcgaaggaactccatctgcactgtgtatattgaagtgcttccaccaaataatcaaagccctcctcgcttcccacagctgatgtatagccttgaaattagtgaagccatgagggttggtgctgttttattaaatctacaggcaactgatcgagagggagactcaataacatatgccattgagaatggagatcctcagagagtttttaatctttcagaaaccacggggattctaaccttagggaaagcactggacagggaaagcactgatcgctacattctgatcatcacagcttcagatggcaggccagatgggacctcaactgccacagtaaacatagtggtgacagatgtcaatgacaatgctccagtgtttgatccttatctgccaagaaatttatctgtggtggaagaagaagccaatgcctttgtgggtcaagtaaaagcaacagaccctgatgctggaataaatggtcaagtgcactacagtttgggtaactttaataatctttttcgtatcacatccaatgggagcatttacacagcagtgaagcttaacagagaagtcagggactactatgaacttgttgttgtggcaacagatggagcagtacaccctcgtcattcaactctaaccttggccatcaaggttttggacattgatgataacagtcctgtgttcaccaattcaacatacactgtccttgttgaagagaatttgccagctgggactaccatccttcaaatagaggccaaagatgtcgaccttggagcaaatgtgtcttaccggataagaagcccagaagtgaagcacttttttgcactacatccatttacaggagaactatcgcttttaaggagtttagattatgaggcatttccagaccaagaagcaagtatcacttttctggtagaggcctttgatatttatggaacaatgccacctggtattgctactgtcacagtgattgtaaaggatatgaatgattatcctcctgtctttagtaaacgaatatacaaagggatggtggctccggatgcagtcaagggtacacctatcacaacagtttatgctgaagatgcagaccctcctgtaagtagaaggcattgattaatattctgaactgtactgagaaaaatccttaacactcataaatgaccgaatcacaagacagcaaaagtagtctctgtaaatttcaccctatttattcatacattttatgttcttttacttatttcatccacaggtacagagcatatttcagatgactattattgaacctagacaaagaatatgctttttgtttttctagaatgcacaatgtactaattactaatttatctaacaatgataaatatatatgaattgtctccatttgtaagcttcacttaatctggatatgttttaaatttatgtattttccactgtatgcatatatgactattttgttagcaaactccaaatcaacatatcacatgaaacttatattgaatgtgtttattttggtaaattaaaaagcttaagattgcttacagaaaatagttaacattcttttatcatatagaactttacttttttgagatatcccaaattatctttcaaggcaaggttttaattaaaatattattatagtgagagtgataaaataccatgtataattaatagtatacatataaaaaagctttctataaataccttgttttataaatattaattattatcctgatgatttaaatttttctctgagtgggctcacactgtaagttggtggctgataaattttagaaaaatacaaataaaagttaaatgaactattttagaagagtaagaaaataaaatcctgaatcttataagtgatttagaagttctgttttctattgctaatataaatagtatttcttttaatgcttgtatttaattaaaagtgaatggccatcataacatttttcagcttcgatttggacaagtcttataaactctattgtgactatatggaatcaaaatgtattaatgttaatatgaaagtggtgggctttaattcagaagctccttttcttaagtgtgttaaaatgtctttgaaactgctttattgtgctttgggatatatgataggcaaaaatttcatagacttgaacccatcaataaagatagtgaatgtgaaa

SEQ ID NO: 54667 - DNA, 9258 bp, Artificial Sequence
  derived and/or modified sequence
caacgtgctgagctaatagcgacagatagagggcagacagattcctgctagcagcttagtgttagttgcttgtggtaactaaggcaggtggcatacatctcagaacgtggagaatgatggtatgctttctgagttaacatgttgaactgttttgcttttctaaaaattttcctagtaacattttcttgatgatatgagagtggatatcaatgcctcacagaaacaagaggtggaacatgtgaatgaatcgtcttggaactagattatgagcactggttctttttaaagggatgtgcaagaggcagccttggcaagaaaacttgctgcataatcttacatggactaaagatgaaactttaaaccgcaaatcagctttgagtgaactttgacagaagatgtttcgacagttttatctctggacatgtttagcttcagggatcatcctgggctctctctttgaaatctgcttgggccagtatgatgatgattgcaaactagctaggggaggaccaccagctaccatagttgctattgatgaagaaagtcggaatggtacaattctggtggacaacatgctgatcaaagggactgctggaggaccagaccccaccatagaactttctttaaaggataatgtggattactgggtgttgatggatcctgttaagcaaatgcttttcctgaacagcaccggaagagttctggatagagatccaccgatgaacatacactccattgtggtgcaggtccagtgcatcaacaaaaaagtgggcactattatctaccatgaagtgcgaatagtggtgagagacaggaatgacaactcacccactttcaagcatgaaagctactatgccacagtgaatgagctcactccagttggtaccacaatattcacaggattttcaggagacaatggagctacagatatagatgatggaccaaatggacagatagagtatgttattcagtataatccagatgatccgacatccaatgacacctttgaaattcccctaatgttgactggaaatatagtgttaaggaagaggctcaactatgaagataagactcgctactttgtcataatccaagctaatgaccgtgcccaaaatctgaatgagaggcgaaccaccaccaccactctcacagtggatgttctggatggagatgacttgggtccaatgtttcttccttgtgtccttgtgccaaacactcgtgattgccgtccactcacttatcaagctgccatacctgagttgagaactccggaagaactgaaccccattattgttacgccaccaatccaagccattgatcaggaccggaatattcaaccgccatcagataggccaggaatcctctattccatccttgttgggactcctgaggattacccacgatttttccatatgcatcctaggacagcagaacttagtctcctggagccagtaaacagagactttcaccagaaatttgatttggttattaaggctgaacaagacaatggtcatcctcttcctgcctttgccggtctacacattgaaatactggatgaaaacaatcaaagtccatattttacaatgcccagttatcaaggctatatcctggaatctgccccagtgggagcaaccatttcggacagtctcaatttgacttcacctttaagaatagtagctctggacaaggacatagaagatgttccacccagtggagttcctacaaaagacccagagcttcacctttttctgaatgactacacctcagtcttcaccgtcacacagactggtattactcgctacctcaccttacttcaaccagtggacagggaagaacagcaaacttacaccttttcgataacagcatttgatggtgtacaagaaagtgagccagtcatcgtcaatattcaagtgatggatgcaaatgataacacgccaaccttccctgaaatatcctatgatgtgtatgtttatacagacatgagacctggggacagtgtcatacagctcactgcagtcgacgcagacgaagggtcaaatggggagatcacatatgaaatccttgttggggctcagggagacttcatcatcaataaaacaacagggcttatcaccatcgctccaggggtggaaatgatagtcgggcggacttacgcactcacggtccaagcagcggataatgctcctcctgcagagcgaaggaactccatctgcactgtgtatattgaagtgcttccaccaaataatcaaagccctcctcgcttcccacagctgatgtatagccttgaaattagtgaagccatgagggttggtgctgttttattaaatctacaggcaactgatcgagagggagactcaataacatatgccattgagaatggagatcctcagagagtttttaatctttcagaaaccacggggattctaaccttagggaaagcactggacagggaaagcactgatcgctacattctgatcatcacagcttcagatggcaggccagatgggacctcaactgccacagtaaacatagtggtgacagatgtcaatgacaatgctccagtgtttgatccttatctgccaagaaatttatctgtggtggaagaagaagccaatgcctttgtgggtcaagtaaaagcaacagaccctgatgctggaataaatggtcaagtgcactacagtttgggtaactttaataatctttttcgtatcacatccaatgggagcatttacacagcagtgaagcttaacagagaagtcagggactactatgaacttgttgttgtggcaacagatggagcagtacaccctcgtcattcaactctaaccttggccatcaaggttttggacattgatgataacagtcctgtgttcaccaattcaacatacactgtccttgttgaagagaatttgccagctgggactaccatccttcaaatagaggccaaagatgtcgaccttggagcaaatgtgtcttaccggataagaagcccagaagtgaagcacttttttgcactacatccatttacaggagaactatcgcttttaaggagtttagattatgaggcatttccagaccaagaagcaagtatcacttttctggtagaggcctttgatatttatggaacaatgccacctggtattgctactgtcacagtgattgtaaaggatatgaatgattatcctcctgtctttagtaaacgaatatacaaagggatggtggctccggatgcagtcaagggtacacctatcacaacagtttatgctgaagatgcagaccctcctggattacctgcaagtcgtgtgaggtatagagtagatgatgtacagtttccttaccctgccagtatttttgaagtggaagaagattctggaagagtaataacacgagtcaatcttaatgaagaacctacaacaatttttaagttggtggtggttgcttttgatgatggggagcctgtgatgtccagcagtgccacagtgaagattcttgtcttacatcctggtgagatcccacgcttcacacaggaggaatatagacctcctccagtaagtgaacttgccaccaaagggaccatggttggtgtaatttctgctgctgccattaatcaaagtattgtgtactccattgtttcaggaaatgaagaagatacatttggaattaataacatcacaggtgttatctatgtgaatggacctctggattatgagaccaggacaagctatgtacttcgagtccaagctgattccctggaagtggtccttgccaatctccgagttccttcaaaaagcaatacagctaaagtatacattgagattcaggatgaaaataatcatcccccagtgtttcagaaaaaattctacatcggaggtgtatctgaagatgcaagaatgtttacttctgtactcagagtgaaggctactgataaagatactggcaattatagtgtcatggcctacagactcataataccaccaattaaagagggaaaagaaggatttgtagtggaaacatatacagggcttatcaaaactgctatgctcttccataatatgaggagatcctacttcaagtttcaagttattgcaactgacgactatgggaagggactgagcggcaaagccgatgtactcgtctccgtggtcaatcagctggatatgcaagtcattgtttccaatgtgcctcctactctagtggaaaaaaagatagaagatcttacagagatcttggatcgctatgttcaggaacaaattcctggtgccaaggtcgtagtggagtccattggagctcgccggcatggagatgccttttccctagaagattacaccaaatgtgacttgactgtctatgcaattgacccccaaaccaacagagccatcgatagaaatgagctttttaaatttttggatggcaaactacttgatatcaataaagactttcagccgtattatggggaaggaggacgcattctggagatccggactccagaggcagtgaccagcattaaaaagagaggagaaagtctaggatacacagaaggggccttgttggctctggccttcatcatcatcctctgctgcattcctgccatcttggtggttttggtcagctacagacagtttaaagtacgtcaagctgagtgtacaaagactgcacgaattcaggccgcattacccgcggctaaaccagcagtgccggctcctgcaccagtggcagcgcccccgccgccgccgccgcctccgccaggtgcgcatctctatgaagaacttggagacagctcaatgcataagtatgaaatgcctcaatatgggagtcgccgtcgattgttaccaccagctggacaggaggaatatggtgaggtggttggtgaagctgaggaagaatatgaggaggaagagtgggcaagaaaaagaatgatcaagttagttgttgatcgagagtatgaaaccagctcaactggagaagacagtgctcctgaatgtcagagaaaccgtcttcaccatcctagtatccacagtaatatcaacggcaatatatatattgcacagaatggttctgtggtgagaacccgccgtgcctgcctcacggacaacttaaaagttgcttcccctgttcgactgggagggccctttaagaaactagacaagttggcagtgacacatgaggagaatgtacctctgaacacattatcaaaggggccattttctactgaaaaaatgaatgcaagaccaactctggttacatttgccccttgccctgtggggactgacaatacagcggtgaagccactaaggaacaggctgaaaagcacagttgaacaggagtccatgattgacagtaagaacatcaaggaggctttggaatttcatagtgaccacacacagtctgatgatgaagagctttggatgggcccctggaacaacctccatataccaatgacaaaactgtgaccaattttttaaaagatattttaattaatttttacttacatttttaataaactgtgctttttattgtcactgagaaaacaatgtatggaatttatatcatgcacacaagctaaaactttgaacaatatgctttaaaattttaagagacagatttgcactcacattgttatcaattaatcgtttttcccagaaaatccttttggacatactttcactaaataacctatcgtttaaacatttagctgttttgttgggtcttgaatttttgttcattttaataaacaagaaataattactaaataatcatttatattttattgattaacatagattatgctttatttctagctccacaaaacatttttagtacatgtaattttattttccatagccaaaagggcaaaaaagaagtaagaggatatttacaggcaatgagtttatacagctgctgtctatactgccctaatttttaaaatgaaagctagaattgcaaagtaaagtaaatgagggaatcacctgtaaataattaattattttaaatcatgagcttgttttctttctttattgtcctgtataaaggttttcacattttaccataaatacatttatatcttgaccctttaggaaaccacttgaagtcgtatgtctttttatcaatattatttacaatattctcttgtcccttcatctcatatcaaatatggtagatactttagtttagtttaatcacttgaggttaaataattgtttggagcaacatggaaatctcacccttagcaaaagcttttagggaagtgagaaaggttcgagtaagcagtaatgcatctagaacgacaatttcataatggaagacatggtgaggttagggaagtctcacattaatgtcactagactttaatagtttgtaaacccagcatatcagagtaaaggaatttggcagggttgaaatgtatataatatataaagcttataaaggctatgaattcataacttcaaatgttgtgtttaacttcttccattttcaggttatttatagaatattttaatgcacatatttatgtgcctaaaatccagaaccaggaaatcattgcctgggcattttttaaaatcaaagaacatggtcttgattttttaccattgaacaaagcacagtgtttcatcataagtagaaatgaaaacagaatatcctttaaaaaacttgccttgtgtgttgcttattttccagatgatgtaaaaagaatgaaacaatatagattaagagaattcagaattctattgaatattacttagtatgatatagatgtagctcacttcaaattttgcacagtattgaccaagttcaggttttaatgaaatttcctcatgcatgcttaatatatggttgaaggactgaataatgcactattatttattcccctcttacatgtttcgcgtcttaaaaattgtttattattatgctatttcctcatttccaaagtgaatgaattgtactgacataaacttgccgacttgtaagagtagtatgtttttacttcagatttccaagaaaatatttgagatcaaatacagtaacatctcatctaccttattttattgagaattaatgcattccatacccttgccaaaaaaacaaaacaaaacaaacaaacaaaaaaaaacctagtggcattagctagattagaaacgtagaatcatgaccacacctcctggcctgccaaacaagcatccacattttcaaaagatcctaaggtggtttatatgcacattaaattttggaagcaatgaagtccggggcttattccttcaggcaccaaagcaatggtttttagtataggatactttgtataggaattagattaagcatatatttccctactaattcaatcagaggtcatcgaatataatttaatattatcttgatacccccagatcatctcagtcagcatcccttgatattctctctatatacagcttcatggctgcgtttttgtcctttgatttctggctgtgacatttaacttattctgttgttgtgcctttctcacatttttttctttcagtttatagcttctagtatcctgatgggaaagtttgtgttttttgtttgttttcttaatgttgaaaaatcatgaagcttaagatgggaattaggtacacggattcaaccaaatgttttgcgactcttagacgctttctttggttaccagtagatttggaaatatgatgttggcagaagtctagtggcctgacatatgagatgtcactgtattttaaactacattttttatgagaaaatatgcaaaattttacaagccacttagcagacacatttcagtaatttaaacttgatcatttcagtaaaaacaatcatgaggtcaatcatctgttacttaatggagatagtataaagagaagcagaatttacacagagcaaccaaaccaaatatttggtcagtatatttttgggtaacgtagagcagcaaaattattactaactaaataaatctggatcaattaaatagttactttcatagaactttcactagtctataaatccctgactcaggattaaaactgtggaacccagaggaaatacccaggtatgtttaatcttaagaatacttcatataaataacgtttcaatgtaaatatttataaagaaattggttgttatttttcctaggaaggtgtaggaaggttttcttgttgttctcaatcagcactagcttcaatcaggcagaagaaacagcaggtcttggctaatcgaggtgagaacagaatgatgtaatgactaatattgcaacccgttgattttagaaggtcttgtgggcattaagggaaagcagaggaagaatgagaaaatatggtcagagtgacataggacatttgtgacttaatgaccatcgaatcacaggtgttaatctccctctctcaatttgtctttctcattaattacagactctgagagttgtcatagaattgcaaccgtaggttggccaaaaccatctttttaaaatacagaagaaagtttgccttgaattttatatgtgatatgtcattcatgttattttaccacattgttcacagggatgttaaagactattatttacttaagtggttgttccaaaggtgattcagtagttaccattaaaatattatttaaaaacatttttatatcatagagccagaagtaattgaatattgactctcgagggaagacattttctgtcttttatttcatgagctttgatttttctctttctctgcttcaccttctgcactttataccttaagtgggatttatataccacttgaatttaattagcaaaataggcaaaaagtgctaataatctattctcagggcagatgcctattggtgcctgcaaattacacagcgataaggctgaaggataggttcaaaataatgttgaggacttacacattttatagatagtttctttctattcccaaatggtatgtgaaatttttgttctattttttttattggttttcaatagttaattttgatctttatcataagaagctttagttatagactggtatttttttcattgcaatctactttaaatttatggtcagttaagcacatgtatggaagattcgaacattgtctatagtttgaaaaatctatcaacaccttcactgctttcccaatttctttatccaaatacctgttcttccttaacaaatattatgttactgtataagaatctgaattagaagttttaagttaaaatgcattgttattcactacacaatgtttcaaaaataaattttcatttgaaaa

SEQ ID NO: 54668 - DNA, 3450 bp, Artificial Sequence
  derived and/or modified sequence
caacgtgctgagctaatagcgacagatagagggcagacagattcctgctagcagcttagtgttagttgcttgtggtaactaaggcaggtggcatacatctcagaacgtggagaatgatggtatgctttctgagttaacatgttgaactgttttgcttttctaaaaattttcctagtaacattttcttgatgatatgagagtggatatcaatgcctcacagaaacaagaggtggaacatgtgaatgaatcgtcttggaactagattatgagcactggttctttttaaagggatgtgcaagaggcagccttggcaagaaaacttgctgcataatcttacatggactaaagatgaaactttaaaccgcaaatcagctttgagtgaactttgacagaagatgtttcgacagttttatctctggacatgtttagcttcagggatcatcctgggctctctctttgaaatctgcttgggccagtatgatgatgattgcaaactagctaggggaggaccaccagctaccatagttgctattgatgaagaaagtcggaatggtacaattctggtggacaacatgctgatcaaagggactgctggaggaccagaccccaccatagaactttctttaaaggataatgtggattactgggtgttgatggatcctgttaagcaaatgcttttcctgaacagcaccggaagagttctggatagagatccaccgatgaacatacactccattgtggtgcaggtccagtgcatcaacaaaaaagtgggcactattatctaccatgaagtgcgaatagtggtgagagacaggaatgacaactcacccactttcaagcatgaaagctactatgccacagtgaatgagctcactccagttggtaccacaatattcacaggattttcaggagacaatggagctacagatatagatgatggaccaaatggacagatagagtatgttattcagtataatccagatgatccgacatccaatgacacctttgaaattcccctaatgttgactggaaatatagtgttaaggaagaggctcaactatgaagataagactcgctactttgtcataatccaagctaatgaccgtgcccaaaatctgaatgagaggcgaaccaccaccaccactctcacagtggatgttctggatggagatgacttgggtccaatgtttcttccttgtgtccttgtgccaaacactcgtgattgccgtccactcacttatcaagctgccatacctgagttgagaactccggaagaactgaaccccattattgttacgccaccaatccaagccattgatcaggaccggaatattcaaccgccatcagataggccaggaatcctctattccatccttgttgggactcctgaggattacccacgatttttccatatgcatcctaggacagcagaacttagtctcctggagccagtaaacagagactttcaccagaaatttgatttggttattaaggctgaacaagacaatggtcatcctcttcctgcctttgccggtctacacattgaaatactggatgaaaacaatcaaagtccatattttacaatgcccagttatcaaggctatatcctggaatctgccccagtgggagcaaccatttcggacagtctcaatttgacttcacctttaagaatagtagctctggacaaggacatagaagatacaaaagacccagagcttcacctttttctgaatgactacacctcagtcttcaccgtcacacagactggtattactcgctacctcaccttacttcaaccagtggacagggaagaacagcaaacttacaccttttcgataacagcatttgatggtgtacaagaaagtgagccagtcatcgtcaatattcaagtgatggatgcaaatgataacacgccaaccttccctgaaatatcctatgatgtgtatgtttatacagacatgagacctggggacagtgtcatacagctcactgcagtcgacgcagacgaagggtcaaatggggagatcacatatgaaatccttgttggggctcagggagacttcatcatcaataaaacaacagggcttatcaccatcgctccaggggtggaaatgatagtcgggcggacttacgcactcacggtccaagcagcggataatgctcctcctgcagagcgaaggaactccatctgcactgtgtatattgaagtgcttccaccaaataatcaaagccctcctcgcttcccacagctgatgtatagccttgaaattagtgaagccatgagggttggtgctgttttattaaatctacaggcaactgatcgagagggagactcaataacatatgccattgagaatggagatcctcagagagtttttaatctttcagaaaccacggggattctaaccttagggaaagcactggacagggaaagcactgatcgctacattctgatcatcacagcttcagatggcaggccagatggggaagagccaaagaaaattaaaaaaccaaaggttgaaattagagagcctagtgaggaggaagaagtagttgtaactatcgaaaaaccaccagcagctgagcctacatacacaacatggaagagagccagaatattccccatgatttttaagaaagttagaggattagctgataaaagaggaatcgttgaccttgagggtgaagagtggcagagacgccttgaggaagaagataaagattatttgaaactcactctggaccaagaggaagcaacagaaagcactgtagaatcagaggaggaatcctccagcgactatactgaatacagtgaagaagagtctgagttcagtgagtctgagactacagaagaggaatctgagtcagagacaccctctgaggaggaggagagttccacccctgaatcagaagaatcggaatccacagagtcagaaggagaaaaagcaaggaaaaacattgtgcttgcaagaagaaggcccatggttgaggaggtcaaggaagtcaagggtaggaaagaggagccacaagaagaacaaaaagaacctaagatggaagaagaagaacactcagaagaagaagaaagtggaccagcccctgtggaagaaagtacagaccctgaagctcaagatatccctgaagagggcagtgcagaatcagcttcggtggaaggaggtgtggaaagtgaggaggaatcagaatcaggtagtagtagcagtagtagcgaaagtcagtctggaggtccatggggctatcaggtaccagcgtatgacagaagcaagaatgcaaaccaaaagaagtcgccaggagcaaactctgaaggttacaacacagcactttgaaagagatcacagtaggtggaagttttgctgtgatgagtgctctcgtgtgcagtgccttctgtgtgttctccaaagtgacacttgaaagggaggaaattgatcaagattt

SEQ ID NO: 54669 - DNA, 9237 bp, Artificial Sequence
  derived and/or modified sequence
caacgtgctgagctaatagcgacagatagagggcagacagattcctgctagcagcttagtgttagttgcttgtggtaactaaggcaggtggcatacatctcagaacgtggagaatgatggtatgctttctgagttaacatgttgaactgttttgcttttctaaaaattttcctagtaacattttcttgatgatatgagagtggatatcaatgcctcacagaaacaagaggtggaacatgtgaatgaatcgtcttggaactagattatgagcactggttctttttaaagggatgtgcaagaggcagccttggcaagaaaacttgctgcataatcttacatggactaaagatgaaactttaaaccgcaaatcagctttgagtgaactttgacagaagatgtttcgacagttttatctctggacatgtttagcttcagggatcatcctgggctctctctttgaaatctgcttgggccagtatgatgatgattgcaaactagctaggggaggaccaccagctaccatagttgctattgatgaagaaagtcggaatggtacaattctggtggacaacatgctgatcaaagggactgctggaggaccagaccccaccatagaactttctttaaaggataatgtggattactgggtgttgatggatcctgttaagcaaatgcttttcctgaacagcaccggaagagttctggatagagatccaccgatgaacatacactccattgtggtgcaggtccagtgcatcaacaaaaaagtgggcactattatctaccatgaagtgcgaatagtggtgagagacaggaatgacaactcacccactttcaagcatgaaagctactatgccacagtgaatgagctcactccagttggtaccacaatattcacaggattttcaggagacaatggagctacagatatagatgatggaccaaatggacagatagagtatgttattcagtataatccagatgatccgacatccaatgacacctttgaaattcccctaatgttgactggaaatatagtgttaaggaagaggctcaactatgaagataagactcgctactttgtcataatccaagctaatgaccgtgcccaaaatctgaatgagaggcgaaccaccaccaccactctcacagtggatgttctggatggagatgacttgggtccaatgtttcttccttgtgtccttgtgccaaacactcgtgattgccgtccactcacttatcaagctgccatacctgagttgagaactccggaagaactgaaccccattattgttacgccaccaatccaagccattgatcaggaccggaatattcaaccgccatcagataggccaggaatcctctattccatccttgttgggactcctgaggattacccacgatttttccatatgcatcctaggacagcagaacttagtctcctggagccagtaaacagagactttcaccagaaatttgatttggttattaaggctgaacaagacaatggtcatcctcttcctgcctttgccggtctacacattgaaatactggatgaaaacaatcaaagtccatattttacaatgcccagttatcaaggctatatcctggaatctgccccagtgggagcaaccatttcggacagtctcaatttgacttcacctttaagaatagtagctctggacaaggacatagaagatacaaaagacccagagcttcacctttttctgaatgactacacctcagtcttcaccgtcacacagactggtattactcgctacctcaccttacttcaaccagtggacagggaagaacagcaaacttacaccttttcgataacagcatttgatggtgtacaagaaagtgagccagtcatcgtcaatattcaagtgatggatgcaaatgataacacgccaaccttccctgaaatatcctatgatgtgtatgtttatacagacatgagacctggggacagtgtcatacagctcactgcagtcgacgcagacgaagggtcaaatggggagatcacatatgaaatccttgttggggctcagggagacttcatcatcaataaaacaacagggcttatcaccatcgctccaggggtggaaatgatagtcgggcggacttacgcactcacggtccaagcagcggataatgctcctcctgcagagcgaaggaactccatctgcactgtgtatattgaagtgcttccaccaaataatcaaagccctcctcgcttcccacagctgatgtatagccttgaaattagtgaagccatgagggttggtgctgttttattaaatctacaggcaactgatcgagagggagactcaataacatatgccattgagaatggagatcctcagagagtttttaatctttcagaaaccacggggattctaaccttagggaaagcactggacagggaaagcactgatcgctacattctgatcatcacagcttcagatggcaggccagatgggacctcaactgccacagtaaacatagtggtgacagatgtcaatgacaatgctccagtgtttgatccttatctgccaagaaatttatctgtggtggaagaagaagccaatgcctttgtgggtcaagtaaaagcaacagaccctgatgctggaataaatggtcaagtgcactacagtttgggtaactttaataatctttttcgtatcacatccaatgggagcatttacacagcagtgaagcttaacagagaagtcagggactactatgaacttgttgttgtggcaacagatggagcagtacaccctcgtcattcaactctaaccttggccatcaaggttttggacattgatgataacagtcctgtgttcaccaattcaacatacactgtccttgttgaagagaatttgccagctgggactaccatccttcaaatagaggccaaagatgtcgaccttggagcaaatgtgtcttaccggataagaagcccagaagtgaagcacttttttgcactacatccatttacaggagaactatcgcttttaaggagtttagattatgaggcatttccagaccaagaagcaagtatcacttttctggtagaggcctttgatatttatggaacaatgccacctggtattgctactgtcacagtgattgtaaaggatatgaatgattatcctcctgtctttagtaaacgaatatacaaagggatggtggctccggatgcagtcaagggtacacctatcacaacagtttatgctgaagatgcagaccctcctggattacctgcaagtcgtgtgaggtatagagtagatgatgtacagtttccttaccctgccagtatttttgaagtggaagaagattctggaagagtaataacacgagtcaatcttaatgaagaacctacaacaatttttaagttggtggtggttgcttttgatgatggggagcctgtgatgtccagcagtgccacagtgaagattcttgtcttacatcctggtgagatcccacgcttcacacaggaggaatatagacctcctccagtaagtgaacttgccaccaaagggaccatggttggtgtaatttctgctgctgccattaatcaaagtattgtgtactccattgtttcaggaaatgaagaagatacatttggaattaataacatcacaggtgttatctatgtgaatggacctctggattatgagaccaggacaagctatgtacttcgagtccaagctgattccctggaagtggtccttgccaatctccgagttccttcaaaaagcaatacagctaaagtatacattgagattcaggatgaaaataatcatcccccagtgtttcagaaaaaattctacatcggaggtgtatctgaagatgcaagaatgtttacttctgtactcagagtgaaggctactgataaagatactggcaattatagtgtcatggcctacagactcataataccaccaattaaagagggaaaagaaggatttgtagtggaaacatatacagggcttatcaaaactgctatgctcttccataatatgaggagatcctacttcaagtttcaagttattgcaactgacgactatgggaagggactgagcggcaaagccgatgtactcgtctccgtggtcaatcagctggatatgcaagtcattgtttccaatgtgcctcctactctagtggaaaaaaagatagaagatcttacagagatcttggatcgctatgttcaggaacaaattcctggtgccaaggtcgtagtggagtccattggagctcgccggcatggagatgccttttccctagaagattacaccaaatgtgacttgactgtctatgcaattgacccccaaaccaacagagccatcgatagaaatgagctttttaaatttttggatggcaaactacttgatatcaataaagactttcagccgtattatggggaaggaggacgcattctggagatccggactccagaggcagtgaccagcattaaaaagagaggagaaagtctaggatacacagaaggggccttgttggctctggccttcatcatcatcctctgctgcattcctgccatcttggtggttttggtcagctacagacacttcaaaagacgtcaagctgagtgtacaaagactgcacgaattcaggccgcattacccgcggctaaaccagcagtgccggctcctgcaccagtggcagcgcccccgccgccgccgccgcctccgccaggtgcgcatctctatgaagaacttggagacagctcaatatacaggtatgaaatgcctcaatatgggagtcgccgtcgattgttaccaccagctggacaggaggaatatggtgaggtggttggtgaagctgaggaagaatatgaggaggaagagtgggcaagaaaaagaatgatcaagttagttgttgatcgagagtatgaaaccagctcaactggagaagacagtgctcctgaatgtcagagaaaccgtcttcaccatcctagtatccacagtaatatcaacggcaatatatatattgcacagaatggttctgtggtgagaacccgccgtgcctgcctcacggacaacttaaaagttgcttcccctgttcgactgggagggccctttaagaaactagacaagttggcagtgacacatgaggagaatgtacctctgaacacattatcaaaggggccattttctactgaaaaaatgaatgcaagaccaactctggttacatttgccccttgccctgtggggactgacaatacagcggtgaagccactaaggaacaggctgaaaagcacagttgaacaggagtccatgattgacagtaagaacatcaaggaggctttggaatttcatagtgaccacacacagtctgatgatgaagagctttggatgggcccctggaacaacctccatataccaatgacaaaactgtgaccaattttttaaaagatattttaattaatttttacttacatttttaataaactgtgctttttattgtcactgagaaaacaatgtatggaatttatatcatgcacacaagctaaaactttgaacaatatgctttaaaattttaagagacagatttgcactcacattgttatcaattaatcgtttttcccagaaaatccttttggacatactttcactaaataacctatcgtttaaacatttagctgttttgttgggtcttgaatttttgttcattttaataaacaagaaataattactaaataatcatttatattttattgattaacatagattatgctttatttctagctccacaaaacatttttagtacatgtaattttattttccatagccaaaagggcaaaaaagaagtaagaggatatttacaggcaatgagtttatacagctgctgtctatactgccctaatttttaaaatgaaagctagaattgcaaagtaaagtaaatgagggaatcacctgtaaataattaattattttaaatcatgagcttgttttctttctttattgtcctgtataaaggttttcacattttaccataaatacatttatatcttgaccctttaggaaaccacttgaagtcgtatgtctttttatcaatattatttacaatattctcttgtcccttcatctcatatcaaatatggtagatactttagtttagtttaatcacttgaggttaaataattgtttggagcaacatggaaatctcacccttagcaaaagcttttagggaagtgagaaaggttcgagtaagcagtaatgcatctagaacgacaatttcataatggaagacatggtgaggttagggaagtctcacattaatgtcactagactttaatagtttgtaaacccagcatatcagagtaaaggaatttggcagggttgaaatgtatataatatataaagcttataaaggctatgaattcataacttcaaatgttgtgtttaacttcttccattttcaggttatttatagaatattttaatgcacatatttatgtgcctaaaatccagaaccaggaaatcattgcctgggcattttttaaaatcaaagaacatggtcttgattttttaccattgaacaaagcacagtgtttcatcataagtagaaatgaaaacagaatatcctttaaaaaacttgccttgtgtgttgcttattttccagatgatgtaaaaagaatgaaacaatatagattaagagaattcagaattctattgaatattacttagtatgatatagatgtagctcacttcaaattttgcacagtattgaccaagttcaggttttaatgaaatttcctcatgcatgcttaatatatggttgaaggactgaataatgcactattatttattcccctcttacatgtttcgcgtcttaaaaattgtttattattatgctatttcctcatttccaaagtgaatgaattgtactgacataaacttgccgacttgtaagagtagtatgtttttacttcagatttccaagaaaatatttgagatcaaatacagtaacatctcatctaccttattttattgagaattaatgcattccatacccttgccaaaaaaacaaaacaaaacaaacaaacaaaaaaaaacctagtggcattagctagattagaaacgtagaatcatgaccacacctcctggcctgccaaacaagcatccacattttcaaaagatcctaaggtggtttatatgcacattaaattttggaagcaatgaagtccggggcttattccttcaggcaccaaagcaatggtttttagtataggatactttgtataggaattagattaagcatatatttccctactaattcaatcagaggtcatcgaatataatttaatattatcttgatacccccagatcatctcagtcagcatcccttgatattctctctatatacagcttcatggctgcgtttttgtcctttgatttctggctgtgacatttaacttattctgttgttgtgcctttctcacatttttttctttcagtttatagcttctagtatcctgatgggaaagtttgtgttttttgtttgttttcttaatgttgaaaaatcatgaagcttaagatgggaattaggtacacggattcaaccaaatgttttgcgactcttagacgctttctttggttaccagtagatttggaaatatgatgttggcagaagtctagtggcctgacatatgagatgtcactgtattttaaactacattttttatgagaaaatatgcaaaattttacaagccacttagcagacacatttcagtaatttaaacttgatcatttcagtaaaaacaatcatgaggtcaatcatctgttacttaatggagatagtataaagagaagcagaatttacacagagcaaccaaaccaaatatttggtcagtatatttttgggtaacgtagagcagcaaaattattactaactaaataaatctggatcaattaaatagttactttcatagaactttcactagtctataaatccctgactcaggattaaaactgtggaacccagaggaaatacccaggtatgtttaatcttaagaatacttcatataaataacgtttcaatgtaaatatttataaagaaattggttgttatttttcctaggaaggtgtaggaaggttttcttgttgttctcaatcagcactagcttcaatcaggcagaagaaacagcaggtcttggctaatcgaggtgagaacagaatgatgtaatgactaatattgcaacccgttgattttagaaggtcttgtgggcattaagggaaagcagaggaagaatgagaaaatatggtcagagtgacataggacatttgtgacttaatgaccatcgaatcacaggtgttaatctccctctctcaatttgtctttctcattaattacagactctgagagttgtcatagaattgcaaccgtaggttggccaaaaccatctttttaaaatacagaagaaagtttgccttgaattttatatgtgatatgtcattcatgttattttaccacattgttcacagggatgttaaagactattatttacttaagtggttgttccaaaggtgattcagtagttaccattaaaatattatttaaaaacatttttatatcatagagccagaagtaattgaatattgactctcgagggaagacattttctgtcttttatttcatgagctttgatttttctctttctctgcttcaccttctgcactttataccttaagtgggatttatataccacttgaatttaattagcaaaataggcaaaaagtgctaataatctattctcagggcagatgcctattggtgcctgcaaattacacagcgataaggctgaaggataggttcaaaataatgttgaggacttacacattttatagatagtttctttctattcccaaatggtatgtgaaatttttgttctattttttttattggttttcaatagttaattttgatctttatcataagaagctttagttatagactggtatttttttcattgcaatctactttaaatttatggtcagttaagcacatgtatggaagattcgaacattgtctatagtttgaaaaatctatcaacaccttcactgctttcccaatttctttatccaaatacctgttcttccttaacaaatattatgttactgtataagaatctgaattagaagttttaagttaaaatgcattgttattcactacacaatgtttcaaaaataaattttcatttgaaaa

SEQ ID NO: 54670 - DNA, 2886 bp, Artificial Sequence
  derived and/or modified sequence
atgttcagacagttctacctgtggacctgcctggccagcggcatcatcctgggcagcctgttcgagatctgcctgggccagtacgacgacgactgcaagctggccagaggcggcccccccgccaccatcgtggccatcgacgaggagagcagaaacggcaccatcctggtggacaacatgctgatcaagggcaccgccggcggccccgaccccaccatcgagctgagcctgaaggacaacgtggactactgggtgctgatggaccccgtgaagcagatgctgttcctgaacagcaccggcagagtgctggacagagacccccccatgaacatccacagcatcgtggtgcaggtgcagtgcatcaacaagaaggtgggcaccatcatctaccacgaggtgagaatcgtggtgagagacagaaacgacaacagccccaccttcaagcacgagagctactacgccaccgtgaacgagctgacccccgtgggcaccaccatcttcaccggcttcagcggcgacaacggcgccaccgacatcgacgacggccccaacggccagatcgagtacgtgatccagtacaaccccgacgaccccaccagcaacgacaccttcgagatccccctgatgctgaccggcaacatcgtgctgagaaagagactgaactacgaggacaagaccagatacttcgtgatcatccaggccaacgacagagcccagaacctgaacgagagaagaaccaccaccaccaccctgaccgtggacgtgctggacggcgacgacctgggccccatgttcctgccctgcgtgctggtgcccaacaccagagactgcagacccctgacctaccaggccgccatccccgagctgagaacccccgaggagctgaaccccatcatcgtgaccccccccatccaggccatcgaccaggacagaaacatccagccccccagcgacagacccggcatcctgtacagcatcctggtgggcacccccgaggactaccccagattcttccacatgcaccccagaaccgccgagctgagcctgctggagcccgtgaacagagacttccaccagaagttcgacctggtgatcaaggccgagcaggacaacggccaccccctgcccgccttcgccggcctgcacatcgagatcctggacgagaacaaccagagcccctacttcaccatgcccagctaccagggctacatcctggagagcgcccccgtgggcgccaccatcagcgacagcctgaacctgaccagccccctgagaatcgtggccctggacaaggacatcgaggacaccaaggaccccgagctgcacctgttcctgaacgactacaccagcgtgttcaccgtgacccagaccggcatcaccagatacctgaccctgctgcagcccgtggacagagaggagcagcagacctacaccttcagcatcaccgccttcgacggcgtgcaggagagcgagcccgtgatcgtgaacatccaggtgatggacgccaacgacaacacccccaccttccccgagatcagctacgacgtgtacgtgtacaccgacatgagacccggcgacagcgtgatccagctgaccgccgtggacgccgacgagggcagcaacggcgagatcacctacgagatcctggtgggcgcccagggcgacttcatcatcaacaagaccaccggcctgatcaccatcgcccccggcgtggagatgatcgtgggcagaacctacgccctgaccgtgcaggccgccgacaacgccccccccgccgagagaagaaacagcatctgcaccgtgtacatcgaggtgctgccccccaacaaccagagcccccccagattcccccagctgatgtacagcctggagatcagcgaggccatgagagtgggcgccgtgctgctgaacctgcaggccaccgacagagagggcgacagcatcacctacgccatcgagaacggcgacccccagagagtgttcaacctgagcgagaccaccggcatcctgaccctgggcaaggccctggacagagagagcaccgacagatacatcctgatcatcaccgccagcgacggcagacccgacggcaccagcaccgccaccgtgaacatcgtggtgaccgacgtgaacgacaacgcccccgtgttcgacccctacctgcccagaaacctgagcgtggtggaggaggaggccaacgccttcgtgggccaggtgaaggccaccgaccccgacgccggcatcaacggccaggtgcactacagcctgggcaacttcaacaacctgttcagaatcaccagcaacggcagcatctacaccgccgtgaagctgaacagagaggtgagagactactacgagctggtggtggtggccaccgacggcgccgtgcaccccagacacagcaccctgaccctggccatcaaggtgctggacatcgacgacaacagccccgtgttcaccaacagcacctacaccgtgctggtggaggagaacctgcccgccggcaccaccatcctgcagatcgaggccaaggacgtggacctgggcgccaacgtgagctacagaatcagaagccccgaggtgaagcacttcttcgccctgcaccccttcaccggcgagctgagcctgctgagaagcctggactacgaggccttccccgaccaggaggccagcatcaccttcctggtggaggccttcgacatctacggcaccatgccccccggcatcgccaccgtgaccgtgatcgtgaaggacatgaacgactacccccccgtgttcagcaagagaatctacaagggcatggtggcccccgacgccgtgaagggcacccccatcaccaccgtgtacgccgaggacgccgacccccccgtgagcagaagacactag

SEQ ID NO: 54671 - DNA, 5055 bp, Artificial Sequence
  derived and/or modified sequence
atgttcagacagttctacctgtggacctgcctggccagcggcatcatcctgggcagcctgttcgagatctgcctgggccagtacgacgacgactgcaagctggccagaggcggcccccccgccaccatcgtggccatcgacgaggagagcagaaacggcaccatcctggtggacaacatgctgatcaagggcaccgccggcggccccgaccccaccatcgagctgagcctgaaggacaacgtggactactgggtgctgatggaccccgtgaagcagatgctgttcctgaacagcaccggcagagtgctggacagagacccccccatgaacatccacagcatcgtggtgcaggtgcagtgcatcaacaagaaggtgggcaccatcatctaccacgaggtgagaatcgtggtgagagacagaaacgacaacagccccaccttcaagcacgagagctactacgccaccgtgaacgagctgacccccgtgggcaccaccatcttcaccggcttcagcggcgacaacggcgccaccgacatcgacgacggccccaacggccagatcgagtacgtgatccagtacaaccccgacgaccccaccagcaacgacaccttcgagatccccctgatgctgaccggcaacatcgtgctgagaaagagactgaactacgaggacaagaccagatacttcgtgatcatccaggccaacgacagagcccagaacctgaacgagagaagaaccaccaccaccaccctgaccgtggacgtgctggacggcgacgacctgggccccatgttcctgccctgcgtgctggtgcccaacaccagagactgcagacccctgacctaccaggccgccatccccgagctgagaacccccgaggagctgaaccccatcatcgtgaccccccccatccaggccatcgaccaggacagaaacatccagccccccagcgacagacccggcatcctgtacagcatcctggtgggcacccccgaggactaccccagattcttccacatgcaccccagaaccgccgagctgagcctgctggagcccgtgaacagagacttccaccagaagttcgacctggtgatcaaggccgagcaggacaacggccaccccctgcccgccttcgccggcctgcacatcgagatcctggacgagaacaaccagagcccctacttcaccatgcccagctaccagggctacatcctggagagcgcccccgtgggcgccaccatcagcgacagcctgaacctgaccagccccctgagaatcgtggccctggacaaggacatcgaggacgtgccccccagcggcgtgcccaccaaggaccccgagctgcacctgttcctgaacgactacaccagcgtgttcaccgtgacccagaccggcatcaccagatacctgaccctgctgcagcccgtggacagagaggagcagcagacctacaccttcagcatcaccgccttcgacggcgtgcaggagagcgagcccgtgatcgtgaacatccaggtgatggacgccaacgacaacacccccaccttccccgagatcagctacgacgtgtacgtgtacaccgacatgagacccggcgacagcgtgatccagctgaccgccgtggacgccgacgagggcagcaacggcgagatcacctacgagatcctggtgggcgcccagggcgacttcatcatcaacaagaccaccggcctgatcaccatcgcccccggcgtggagatgatcgtgggcagaacctacgccctgaccgtgcaggccgccgacaacgccccccccgccgagagaagaaacagcatctgcaccgtgtacatcgaggtgctgccccccaacaaccagagcccccccagattcccccagctgatgtacagcctggagatcagcgaggccatgagagtgggcgccgtgctgctgaacctgcaggccaccgacagagagggcgacagcatcacctacgccatcgagaacggcgacccccagagagtgttcaacctgagcgagaccaccggcatcctgaccctgggcaaggccctggacagagagagcaccgacagatacatcctgatcatcaccgccagcgacggcagacccgacggcaccagcaccgccaccgtgaacatcgtggtgaccgacgtgaacgacaacgcccccgtgttcgacccctacctgcccagaaacctgagcgtggtggaggaggaggccaacgccttcgtgggccaggtgaaggccaccgaccccgacgccggcatcaacggccaggtgcactacagcctgggcaacttcaacaacctgttcagaatcaccagcaacggcagcatctacaccgccgtgaagctgaacagagaggtgagagactactacgagctggtggtggtggccaccgacggcgccgtgcaccccagacacagcaccctgaccctggccatcaaggtgctggacatcgacgacaacagccccgtgttcaccaacagcacctacaccgtgctggtggaggagaacctgcccgccggcaccaccatcctgcagatcgaggccaaggacgtggacctgggcgccaacgtgagctacagaatcagaagccccgaggtgaagcacttcttcgccctgcaccccttcaccggcgagctgagcctgctgagaagcctggactacgaggccttccccgaccaggaggccagcatcaccttcctggtggaggccttcgacatctacggcaccatgccccccggcatcgccaccgtgaccgtgatcgtgaaggacatgaacgactacccccccgtgttcagcaagagaatctacaagggcatggtggcccccgacgccgtgaagggcacccccatcaccaccgtgtacgccgaggacgccgacccccccggcctgcccgccagcagagtgagatacagagtggacgacgtgcagttcccctaccccgccagcatcttcgaggtggaggaggacagcggcagagtgatcaccagagtgaacctgaacgaggagcccaccaccatcttcaagctggtggtggtggccttcgacgacggcgagcccgtgatgagcagcagcgccaccgtgaagatcctggtgctgcaccccggcgagatccccagattcacccaggaggagtacagacccccccccgtgagcgagctggccaccaagggcaccatggtgggcgtgatcagcgccgccgccatcaaccagagcatcgtgtacagcatcgtgagcggcaacgaggaggacaccttcggcatcaacaacatcaccggcgtgatctacgtgaacggccccctggactacgagaccagaaccagctacgtgctgagagtgcaggccgacagcctggaggtggtgctggccaacctgagagtgcccagcaagagcaacaccgccaaggtgtacatcgagatccaggacgagaacaaccacccccccgtgttccagaagaagttctacatcggcggcgtgagcgaggacgccagaatgttcaccagcgtgctgagagtgaaggccaccgacaaggacaccggcaactacagcgtgatggcctacagactgatcatcccccccatcaaggagggcaaggagggcttcgtggtggagacctacaccggcctgatcaagaccgccatgctgttccacaacatgagaagaagctacttcaagttccaggtgatcgccaccgacgactacggcaagggcctgagcggcaaggccgacgtgctggtgagcgtggtgaaccagctggacatgcaggtgatcgtgagcaacgtgccccccaccctggtggagaagaagatcgaggacctgaccgagatcctggacagatacgtgcaggagcagatccccggcgccaaggtggtggtggagagcatcggcgccagaagacacggcgacgccttcagcctggaggactacaccaagtgcgacctgaccgtgtacgccatcgacccccagaccaacagagccatcgacagaaacgagctgttcaagttcctggacggcaagctgctggacatcaacaaggacttccagccctactacggcgagggcggcagaatcctggagatcagaacccccgaggccgtgaccagcatcaagaagagaggcgagagcctgggctacaccgagggcgccctgctggccctggccttcatcatcatcctgtgctgcatccccgccatcctggtggtgctggtgagctacagacagttcaaggtgagacaggccgagtgcaccaagaccgccagaatccaggccgccctgcccgccgccaagcccgccgtgcccgcccccgcccccgtggccgcccccccccccccccccccccccccccccggcgcccacctgtacgaggagctgggcgacagcagcatgcacaagtacgagatgccccagtacggcagcagaagaagactgctgccccccgccggccaggaggagtacggcgaggtggtgggcgaggccgaggaggagtacgaggaggaggagtgggccagaaagagaatgatcaagctggtggtggacagagagtacgagaccagcagcaccggcgaggacagcgcccccgagtgccagagaaacagactgcaccaccccagcatccacagcaacatcaacggcaacatctacatcgcccagaacggcagcgtggtgagaaccagaagagcctgcctgaccgacaacctgaaggtggccagccccgtgagactgggcggccccttcaagaagctggacaagctggccgtgacccacgaggagaacgtgcccctgaacaccctgagcaagggccccttcagcaccgagaagatgaacgccagacccaccctggtgaccttcgccccctgccccgtgggcaccgacaacaccgccgtgaagcccctgagaaacagactgaagagcaccgtggagcaggagagcatgatcgacagcaagaacatcaaggaggccctggagttccacagcgaccacacccagagcgacgacgaggagctgtggatgggcccctggaacaacctgcacatccccatgaccaagctgtag

SEQ ID NO: 54672 - DNA, 2946 bp, Artificial Sequence
  derived and/or modified sequence
atgttcagacagttctacctgtggacctgcctggccagcggcatcatcctgggcagcctgttcgagatctgcctgggccagtacgacgacgactgcaagctggccagaggcggcccccccgccaccatcgtggccatcgacgaggagagcagaaacggcaccatcctggtggacaacatgctgatcaagggcaccgccggcggccccgaccccaccatcgagctgagcctgaaggacaacgtggactactgggtgctgatggaccccgtgaagcagatgctgttcctgaacagcaccggcagagtgctggacagagacccccccatgaacatccacagcatcgtggtgcaggtgcagtgcatcaacaagaaggtgggcaccatcatctaccacgaggtgagaatcgtggtgagagacagaaacgacaacagccccaccttcaagcacgagagctactacgccaccgtgaacgagctgacccccgtgggcaccaccatcttcaccggcttcagcggcgacaacggcgccaccgacatcgacgacggccccaacggccagatcgagtacgtgatccagtacaaccccgacgaccccaccagcaacgacaccttcgagatccccctgatgctgaccggcaacatcgtgctgagaaagagactgaactacgaggacaagaccagatacttcgtgatcatccaggccaacgacagagcccagaacctgaacgagagaagaaccaccaccaccaccctgaccgtggacgtgctggacggcgacgacctgggccccatgttcctgccctgcgtgctggtgcccaacaccagagactgcagacccctgacctaccaggccgccatccccgagctgagaacccccgaggagctgaaccccatcatcgtgaccccccccatccaggccatcgaccaggacagaaacatccagccccccagcgacagacccggcatcctgtacagcatcctggtgggcacccccgaggactaccccagattcttccacatgcaccccagaaccgccgagctgagcctgctggagcccgtgaacagagacttccaccagaagttcgacctggtgatcaaggccgagcaggacaacggccaccccctgcccgccttcgccggcctgcacatcgagatcctggacgagaacaaccagagcccctacttcaccatgcccagctaccagggctacatcctggagagcgcccccgtgggcgccaccatcagcgacagcctgaacctgaccagccccctgagaatcgtggccctggacaaggacatcgaggacaccaaggaccccgagctgcacctgttcctgaacgactacaccagcgtgttcaccgtgacccagaccggcatcaccagatacctgaccctgctgcagcccgtggacagagaggagcagcagacctacaccttcagcatcaccgccttcgacggcgtgcaggagagcgagcccgtgatcgtgaacatccaggtgatggacgccaacgacaacacccccaccttccccgagatcagctacgacgtgtacgtgtacaccgacatgagacccggcgacagcgtgatccagctgaccgccgtggacgccgacgagggcagcaacggcgagatcacctacgagatcctggtgggcgcccagggcgacttcatcatcaacaagaccaccggcctgatcaccatcgcccccggcgtggagatgatcgtgggcagaacctacgccctgaccgtgcaggccgccgacaacgccccccccgccgagagaagaaacagcatctgcaccgtgtacatcgaggtgctgccccccaacaaccagagcccccccagattcccccagctgatgtacagcctggagatcagcgaggccatgagagtgggcgccgtgctgctgaacctgcaggccaccgacagagagggcgacagcatcacctacgccatcgagaacggcgacccccagagagtgttcaacctgagcgagaccaccggcatcctgaccctgggcaaggccctggacagagagagcaccgacagatacatcctgatcatcaccgccagcgacggcagacccgacggcgaggagcccaagaagatcaagaagcccaaggtggagatcagagagcccagcgaggaggaggaggtggtggtgaccatcgagaagccccccgccgccgagcccacctacaccacctggaagagagccagaatcttccccatgatcttcaagaaggtgagaggcctggccgacaagagaggcatcgtggacctggagggcgaggagtggcagagaagactggaggaggaggacaaggactacctgaagctgaccctggaccaggaggaggccaccgagagcaccgtggagagcgaggaggagagcagcagcgactacaccgagtacagcgaggaggagagcgagttcagcgagagcgagaccaccgaggaggagagcgagagcgagacccccagcgaggaggaggagagcagcacccccgagagcgaggagagcgagagcaccgagagcgagggcgagaaggccagaaagaacatcgtgctggccagaagaagacccatggtggaggaggtgaaggaggtgaagggcagaaaggaggagccccaggaggagcagaaggagcccaagatggaggaggaggagcacagcgaggaggaggagagcggccccgcccccgtggaggagagcaccgaccccgaggcccaggacatccccgaggagggcagcgccgagagcgccagcgtggagggcggcgtggagagcgaggaggagagcgagagcggcagcagcagcagcagcagcgagagccagagcggcggcccctggggctaccaggtgcccgcctacgacagaagcaagaacgccaaccagaagaagagccccggcgccaacagcgagggctacaacaccgccctgtag

SEQ ID NO: 54673 - DNA, 1965 bp, Artificial Sequence
  derived and/or modified sequence
atgttcagacagttctacctgtggacctgcctggccagcggcatcatcctgggcagcctgttcgagatctgcctgggccagtacgacgacgactgcaagctggccagaggcggcccccccgccaccatcgtggccatcgacgaggagagcagaaacggcaccatcctggtggacaacatgctgatcaagggcaccgccggcggccccgaccccaccatcgagctgagcctgaaggacaacgtggactactgggtgctgatggaccccgtgaagcagatgctgttcctgaacagcaccggcagagtgctggacagagacccccccatgaacatccacagcatcgtggtgcaggtgcagtgcatcaacaagaaggtgggcaccatcatctaccacgaggtgagaatcgtggtgagagacagaaacgacaacagccccaccttcaagcacgagagctactacgccaccgtgaacgagctgacccccgtgggcaccaccatcttcaccggcttcagcggcgacaacggcgccaccgacatcgacgacggccccaacggccagatcgagtacgtgatccagtacaaccccgacgaccccaccagcaacgacaccttcgagatccccctgatgctgaccggcaacatcgtgctgagaaagagactgaactacgaggacaagaccagatacttcgtgatcatccaggccaacgacagagcccagaacctgaacgagagaagaaccaccaccaccaccctgaccgtggacgtgctggacggcgacgacctgggccccatgttcctgccctgcgtgctggtgcccaacaccagagactgcagacccctgacctaccaggccgccatccccgagctgagaacccccgaggagctgaaccccatcatcgtgaccccccccatccaggccatcgaccaggacagaaacatccagccccccagcgacagacccggcatcctgtacagcatcctggtgggcacccccgaggactaccccagattcttccacatgcaccccagaaccgccgagctgagcctgctggagcccgtgaacagagacttccaccagaagttcgacctggtgatcaaggccgagcaggacaacggccaccccctgcccgccttcgccggcctgcacatcgagatcctggacgagaacaaccagagcccctacttcaccatgcccagctaccagggctacatcctggagagcgcccccgtgggcgccaccatcagcgacagcctgaacctgaccagccccctgagaatcgtggccctggacaaggacatcgaggacaccaaggaccccgagctgcacctgttcctgaacgactacaccagcgtgttcaccgtgacccagaccggcatcaccagatacctgaccctgctgcagcccgtggacagagaggagcagcagacctacaccttcagcatcaccgccttcgacggcgtgcaggagagcgagcccgtgatcgtgaacatccaggtgatggacgccaacgacaacacccccaccttccccgagatcagctacgacgtgtacgtgtacaccgacatgagacccggcgacagcgtgatccagctgaccgccgtggacgccgacgagggcagcaacggcgagatcacctacgagatcctggtgggcgcccagggcgacttcatcatcaacaagaccaccggcctgatcaccatcgcccccggcgtggagatgatcgtgggcagaacctacgccctgaccgtgcaggccgccgacaacgccccccccgccgagagaagaaacagcatctgcaccgtgtacatcgaggtgctgccccccaacaaccagagcccccccagattcccccagctgatgtacagcctggagatcagcgaggccatgagagtgggcgccgtgctgctgaacctgcagcacggcgacagcaacctgagagagagcaccggccagggcaagcactag

SEQ ID NO: 54674 - DNA, 5034 bp, Artificial Sequence
  derived and/or modified sequence
atgttcagacagttctacctgtggacctgcctggccagcggcatcatcctgggcagcctgttcgagatctgcctgggccagtacgacgacgactgcaagctggccagaggcggcccccccgccaccatcgtggccatcgacgaggagagcagaaacggcaccatcctggtggacaacatgctgatcaagggcaccgccggcggccccgaccccaccatcgagctgagcctgaaggacaacgtggactactgggtgctgatggaccccgtgaagcagatgctgttcctgaacagcaccggcagagtgctggacagagacccccccatgaacatccacagcatcgtggtgcaggtgcagtgcatcaacaagaaggtgggcaccatcatctaccacgaggtgagaatcgtggtgagagacagaaacgacaacagccccaccttcaagcacgagagctactacgccaccgtgaacgagctgacccccgtgggcaccaccatcttcaccggcttcagcggcgacaacggcgccaccgacatcgacgacggccccaacggccagatcgagtacgtgatccagtacaaccccgacgaccccaccagcaacgacaccttcgagatccccctgatgctgaccggcaacatcgtgctgagaaagagactgaactacgaggacaagaccagatacttcgtgatcatccaggccaacgacagagcccagaacctgaacgagagaagaaccaccaccaccaccctgaccgtggacgtgctggacggcgacgacctgggccccatgttcctgccctgcgtgctggtgcccaacaccagagactgcagacccctgacctaccaggccgccatccccgagctgagaacccccgaggagctgaaccccatcatcgtgaccccccccatccaggccatcgaccaggacagaaacatccagccccccagcgacagacccggcatcctgtacagcatcctggtgggcacccccgaggactaccccagattcttccacatgcaccccagaaccgccgagctgagcctgctggagcccgtgaacagagacttccaccagaagttcgacctggtgatcaaggccgagcaggacaacggccaccccctgcccgccttcgccggcctgcacatcgagatcctggacgagaacaaccagagcccctacttcaccatgcccagctaccagggctacatcctggagagcgcccccgtgggcgccaccatcagcgacagcctgaacctgaccagccccctgagaatcgtggccctggacaaggacatcgaggacaccaaggaccccgagctgcacctgttcctgaacgactacaccagcgtgttcaccgtgacccagaccggcatcaccagatacctgaccctgctgcagcccgtggacagagaggagcagcagacctacaccttcagcatcaccgccttcgacggcgtgcaggagagcgagcccgtgatcgtgaacatccaggtgatggacgccaacgacaacacccccaccttccccgagatcagctacgacgtgtacgtgtacaccgacatgagacccggcgacagcgtgatccagctgaccgccgtggacgccgacgagggcagcaacggcgagatcacctacgagatcctggtgggcgcccagggcgacttcatcatcaacaagaccaccggcctgatcaccatcgcccccggcgtggagatgatcgtgggcagaacctacgccctgaccgtgcaggccgccgacaacgccccccccgccgagagaagaaacagcatctgcaccgtgtacatcgaggtgctgccccccaacaaccagagcccccccagattcccccagctgatgtacagcctggagatcagcgaggccatgagagtgggcgccgtgctgctgaacctgcaggccaccgacagagagggcgacagcatcacctacgccatcgagaacggcgacccccagagagtgttcaacctgagcgagaccaccggcatcctgaccctgggcaaggccctggacagagagagcaccgacagatacatcctgatcatcaccgccagcgacggcagacccgacggcaccagcaccgccaccgtgaacatcgtggtgaccgacgtgaacgacaacgcccccgtgttcgacccctacctgcccagaaacctgagcgtggtggaggaggaggccaacgccttcgtgggccaggtgaaggccaccgaccccgacgccggcatcaacggccaggtgcactacagcctgggcaacttcaacaacctgttcagaatcaccagcaacggcagcatctacaccgccgtgaagctgaacagagaggtgagagactactacgagctggtggtggtggccaccgacggcgccgtgcaccccagacacagcaccctgaccctggccatcaaggtgctggacatcgacgacaacagccccgtgttcaccaacagcacctacaccgtgctggtggaggagaacctgcccgccggcaccaccatcctgcagatcgaggccaaggacgtggacctgggcgccaacgtgagctacagaatcagaagccccgaggtgaagcacttcttcgccctgcaccccttcaccggcgagctgagcctgctgagaagcctggactacgaggccttccccgaccaggaggccagcatcaccttcctggtggaggccttcgacatctacggcaccatgccccccggcatcgccaccgtgaccgtgatcgtgaaggacatgaacgactacccccccgtgttcagcaagagaatctacaagggcatggtggcccccgacgccgtgaagggcacccccatcaccaccgtgtacgccgaggacgccgacccccccggcctgcccgccagcagagtgagatacagagtggacgacgtgcagttcccctaccccgccagcatcttcgaggtggaggaggacagcggcagagtgatcaccagagtgaacctgaacgaggagcccaccaccatcttcaagctggtggtggtggccttcgacgacggcgagcccgtgatgagcagcagcgccaccgtgaagatcctggtgctgcaccccggcgagatccccagattcacccaggaggagtacagacccccccccgtgagcgagctggccaccaagggcaccatggtgggcgtgatcagcgccgccgccatcaaccagagcatcgtgtacagcatcgtgagcggcaacgaggaggacaccttcggcatcaacaacatcaccggcgtgatctacgtgaacggccccctggactacgagaccagaaccagctacgtgctgagagtgcaggccgacagcctggaggtggtgctggccaacctgagagtgcccagcaagagcaacaccgccaaggtgtacatcgagatccaggacgagaacaaccacccccccgtgttccagaagaagttctacatcggcggcgtgagcgaggacgccagaatgttcaccagcgtgctgagagtgaaggccaccgacaaggacaccggcaactacagcgtgatggcctacagactgatcatcccccccatcaaggagggcaaggagggcttcgtggtggagacctacaccggcctgatcaagaccgccatgctgttccacaacatgagaagaagctacttcaagttccaggtgatcgccaccgacgactacggcaagggcctgagcggcaaggccgacgtgctggtgagcgtggtgaaccagctggacatgcaggtgatcgtgagcaacgtgccccccaccctggtggagaagaagatcgaggacctgaccgagatcctggacagatacgtgcaggagcagatccccggcgccaaggtggtggtggagagcatcggcgccagaagacacggcgacgccttcagcctggaggactacaccaagtgcgacctgaccgtgtacgccatcgacccccagaccaacagagccatcgacagaaacgagctgttcaagttcctggacggcaagctgctggacatcaacaaggacttccagccctactacggcgagggcggcagaatcctggagatcagaacccccgaggccgtgaccagcatcaagaagagaggcgagagcctgggctacaccgagggcgccctgctggccctggccttcatcatcatcctgtgctgcatccccgccatcctggtggtgctggtgagctacagacacttcaagagaagacaggccgagtgcaccaagaccgccagaatccaggccgccctgcccgccgccaagcccgccgtgcccgcccccgcccccgtggccgcccccccccccccccccccccccccccccggcgcccacctgtacgaggagctgggcgacagcagcatctacagatacgagatgccccagtacggcagcagaagaagactgctgccccccgccggccaggaggagtacggcgaggtggtgggcgaggccgaggaggagtacgaggaggaggagtgggccagaaagagaatgatcaagctggtggtggacagagagtacgagaccagcagcaccggcgaggacagcgcccccgagtgccagagaaacagactgcaccaccccagcatccacagcaacatcaacggcaacatctacatcgcccagaacggcagcgtggtgagaaccagaagagcctgcctgaccgacaacctgaaggtggccagccccgtgagactgggcggccccttcaagaagctggacaagctggccgtgacccacgaggagaacgtgcccctgaacaccctgagcaagggccccttcagcaccgagaagatgaacgccagacccaccctggtgaccttcgccccctgccccgtgggcaccgacaacaccgccgtgaagcccctgagaaacagactgaagagcaccgtggagcaggagagcatgatcgacagcaagaacatcaaggaggccctggagttccacagcgaccacacccagagcgacgacgaggagctgtggatgggcccctggaacaacctgcacatccccatgaccaagctgtag

SEQ ID NO: 54675 - protein, 1932 aa, Artificial Sequence
  derived and/or modified sequence
MFRQFYLWTCLASGIILGSLFEICLGQYDDGTILVDNMLIKGTAGGPDPTIELSLKDNVDYWVLMDPVKQMLFLNSTGRVLDRDPPMNIHSIVVQVQCINKKVGTIIYHEVRIVVRDRNDNSPTFKHESYYATVNELTPVGTTIFTGFSGDNGATDIDDGPNGQIEYVIQYNPDDPTSNDTFEIPLMLTGNIVLRKRLNYEDKTRYFVIIQANDRAQNLNERRTTTTTLTVDVLDGDDLGPMFLPCVLVPNTRDCRPLTYQAAIPELRTPEELNPIIVTPPIQAIDQDRNIQPPSDRPGILYSILVGTPEDYPRFFHMHPRTAELSLLEPVNRDFHQKFDLVIKAEQDNGHPLPAFAGLHIEILDENNQSPYFTMPSYQGYILESAPVGATISDSLNLTSPLRIVALDKDIEDTKDPELHLFLNDYTSVFTVTQTGITRYLTLLQPVDREEQQTYTFSITAFDGVQESEPVIVNIQVMDANDNTPTFPEISYDVYVYTDMRPGDSVIQLTAVDADEGSNGEITYEILVGAQGDFIINKTTGLITIAPGVEMIVGRTYALTVQAADNAPPAERRNSICTVYIEVLPPNNQSPPRFPQLMYSLEISEAMRVGAVLLNLQATDREGDSITYAIENGDPQRVFNLSETTGILTLGKALDRESTDRYILIITASDGRPDGTSTATVNIVVTDVNDNAPVFDPYLPRNLSVVEEEANAFVGQVKATDPDAGINGQVHYSLGNFNNLFRITSNGSIYTAVKLNREVRDYYELVVVATDGAVHPRHSTLTLAIKVLDIDDNSPVFTNSTYTVLVEENLPAGTTILQIEAKDVDLGANVSYRIRSPEVKHFFALHPFTGELSLLRSLDYEAFPDQEASITFLVEAFDIYGTMPPGIATVTVIVKDMNDYPPVFSKRIYKGMVAPDAVKGTPITTVYAEDADPPGLPASRVRYRVDDVQFPYPASIFEVEEDSGRVITRVNLNEEPTTIFKLVVVAFDDGEPVMSSSATVKILVLHPGEIPRFTQEEYRPPPVSELATKGTMVGVISAAAINQSIVYSIVSGNEEDTFGINNITGVIYVNGPLDYETRTSYVLRVQADSLEVVLANLRVPSKSNTAKVYIEIQDENNHPPVFQKKFYIGGVSEDARMFTSVLRVKATDKDTGNYSVMAYRLIIPPIKEGKEGFVVETYTGLIKTAMLFHNMRRSYFKFQVIATDDYGKGLSGKADVLVSVVNQLDMQVIVSNVPPTLVEKKIEDLTEILDRYVQEQIPGAKVVVESIGARRHGDAFSLEDYTKCDLTVYAIDPQTNRAIDRNELFKFLDGKLLDINKDFQPYYGEGGRILEIRTPEAVTSIKKRGESLGYTEGALLALAFIIILCCIPAILVVLVSYRQRQAECTKTARIQAALPAAKPAVPAPAPVAAPPPPPPPPPGAHLYEELGDSSMHNLFLLYHFQQSRGNNSVSEDRKHQQVVMPFSSNTIEAHKSAHVDGSLKSNKLKSARKFTFLSDEDDLSAHNPLYKENISQVSTNSDISQRTDFVDPFSPKIQAKSKSLRGPREKIQRLWSQSVSLPRRLMRKVPNRPEIIDLQQWQGTRQKAENENTGICTNKRGSSNPLLTTEEANLTEKEEIRQGETLMIEGTEQLKSLSSDSSFCFPRPHFSFSTLPTVSRTVELKSEPNVISSPAECSLELSPSRPCVLHSSLSRRETPICMLPIETERNIFENFAHPPNISPSACPLPPPPPISPPSPPPAPAPLAPPPDISPFSLFCPPPSPPSIPLPLPPPTFFPLSVSTSGPPTPPLLPPFPTPLPPPPPSIPCPPPPSASFLSTECVCITGVKCTTNLMPAEKIKSSMTQLSTTTVCKTDPQREPKGILRHVKNLAELEKSVANMYSQIEKNYLRTNVSELQTMCPSEVTNMEITSEQNKGSLNNIVEGTEKQSHSQSTSL

SEQ ID NO: 54676 - DNA, 5799 bp, Artificial Sequence
  derived and/or modified sequence
atgtttcggcagttctacttatggacatgccttgcctcaggaatcatcctcgggtcattgttcgagatctgtttggggcaatatgacgatggtacaatactggtagacaatatgcttatcaagggtactgccggtggtccagaccccaccattgaactgtctttgaaagacaatgtggattattgggtacttatggaccccgtaaagcaaatgttgttccttaattccaccgggcgtgtgttggatagagatccccccatgaatatccacagtattgtggtccaggttcagtgcataaacaagaaagtgggcacgattatctaccatgaagtgcgcatcgttgtgagagaccgcaatgacaactctccgacgttcaaacatgagtcatactacgccacagttaatgagctaaccccagtggggaccaccattttcactggcttctccggggataacggggctaccgacattgatgatggccctaatgggcagatcgaatacgtcatccagtataatcccgatgatccgacaagtaatgacacgttcgagatacctctgatgcttacaggcaatattgtccttcgtaaaagattgaattacgaagataaaacacgttacttcgtaattatccaggcaaatgaccgcgcacagaatctcaacgagcgcagaacaaccaccaccaccttaactgtggatgtcctggatggtgacgacctcgggcccatgtttttgccctgcgtgctggtaccaaatacaagagattgccgtccgctgacctatcaagctgctatccccgagctgcgaacccccgaggagctgaatcccatcatcgtcactccccctatacaggcaattgaccaggatcgaaacatccagcctccctctgatcggccaggcatcttgtactccattttggtgggcacccccgaagactaccctcggttcttccatatgcaccccaggaccgctgaattgagcctgttggaacctgttaaccgcgacttccatcagaagttcgatctcgtgatcaaagccgagcaggacaatggccaccccctcccggcctttgctgggctccatattgaaattctggacgaaaataaccagagcccatacttcactatgccaagctaccagggctatatccttgagtccgccccagtaggcgcgactatttccgactccctgaaccttacgtcccctttgagaattgtggctctggacaaggatattgaggacaccaaagacccggaactccacttgtttctgaacgactacactagtgttttcactgtgacacaaacaggaattaccaggtatctgacattgttacagcccgtggatcgcgaggagcagcagacctataccttttctatcactgctttcgacggtgttcaggaatctgagcccgtgatcgtgaatatccaggtaatggatgcgaacgacaatacccctacattccccgagatctcatatgacgtgtatgtgtatacagatatgcggcccggcgatagtgtgattcaacttacggccgtggatgctgacgaaggaagcaatggggaaataacttacgagattctcgtgggggcccagggtgacttcattataaataaaaccactggtctcattacgatcgctccgggggtagaaatgattgtggggcgcacctacgcgttaaccgtccaggccgctgacaatgcaccccccgcagaacgccggaatagtatctgtaccgtctatatcgaagtgctccctccgaacaatcagagccctcccagatttccacaactgatgtatagccttgagataagcgaagcaatgcgggtcggtgcagtgcttttgaaccttcaggccacagatcgggagggggattcgataacttatgctattgagaacggtgatccccagcgtgtgtttaacctgtcggaaactaccggcatacttacgctgggcaaagccttagatcgggagtctaccgacagatatatactcatcatcacggcctccgacgggcggcccgatgggacatcaaccgctacagtgaatatcgtggtgactgacgttaacgacaacgccccagtgtttgatccttatctcccacgcaatctgagcgtagtggaggaggaagctaatgcgtttgtgggtcaggtgaaagccacagaccctgacgccggtatcaacgggcaggttcactactctctcggcaacttcaacaatctcttccgtattacatctaacgggtcaatttataccgccgtcaaactgaaccgcgaagtgagagattactacgagctcgtcgtcgtggctacggatggagccgttcatccccgccactcgaccctgacactggctatcaaggtactcgatatagacgataacagccctgtgtttactaatagtacctacacggtgttggtagaagagaacttgcctgcagggacaaccatcctgcaaattgaggctaaagacgtcgatctcggcgccaatgtatcctatcgaatacgctctccagaagtaaaacatttcttcgctttacacccctttaccggggaattgtctctactacggtccctggactacgaggcatttcctgatcaggaagcgtccatcaccttcctggtggaggctttcgatatctacggaacaatgcccccagggattgccacagtgaccgtgatcgtgaaagacatgaatgactatcctcctgtattctctaagagaatatacaaaggcatggttgcccctgacgccgtgaaaggcacaccaataactactgtttacgccgaggatgcagacccccctggattgcctgcatctagagtccgctatcgggttgacgatgtgcaatttccttatccggcatcgatctttgaggtggaagaagattccggccgagtgattacacgggtcaatctaaatgaagaacccacaacgatctttaaactggtggttgtggcttttgatgatggtgagccagtcatgagcagctctgctacagtgaagattctggtcttgcacccaggtgaaatacctagattcactcaggaagagtataggccccctccagtgagtgaacttgctaccaaagggacgatggtgggggtgatttccgccgcggctattaaccagtcaattgtctattcgatagtgtcaggcaacgaggaggatacttttggaattaacaacatcaccggggtgatctatgtcaacggaccgctcgactacgagacccgcacttcttatgtcctgcgcgtgcaggccgactctctcgaagtggtgcttgccaatttacgtgtcccatcaaagtccaataccgccaaggtgtatattgaaatccaggacgagaataatcacccaccagtgttccagaaaaaattctatattgggggcgtatccgaagatgcacggatgtttacctcagtgctgcgtgttaaggctacagacaaggatacaggcaactactctgtgatggcgtaccgtctgatcatccccccaatcaaggagggcaaggagggattcgtcgtcgaaacttatacgggcctcattaaaacggccatgctctttcataatatgaggaggagctacttcaaattccaggtgatagcaacagacgattacggaaaagggctgtctggcaaagccgatgtgctggttagcgtggttaaccagctggacatgcaggtgattgttagcaatgtccctccgacccttgttgaaaaaaaaatcgaggaccttacagagatcttagaccgctatgttcaggaacagattcccggggcaaaggtcgtcgtggagtccataggcgccagaaggcacggggacgccttctcgctggaagattataccaaatgcgacttgactgtttacgccatcgatccccagacaaaccgtgcgattgaccgcaacgagctctttaaattcctggacggcaaactgctcgacataaacaaggactttcagccctactatggcgaaggcggacgcattctggagatacgcacacccgaagcggtcacttcaattaagaagagaggcgagtcgctggggtacactgagggcgcattgctggcactggccttcatcattatcttgtgttgcattcctgccattctagtggtgctggtgtcatacaggcagaggcaagctgagtgtactaagacagcccggattcaggcggccttaccggcggcgaaacctgccgtgccagccccagccccggtggcagctcctccccccccacccccaccccctccgggcgcacacctgtacgaggagctgggggattctagcatgcacaacttgtttctgctgtaccactttcagcagagtagaggcaataacagcgtcagtgaggatcgcaaacatcagcaagtagtgatgccatttagttctaacacgatcgaggcccacaagtctgcccacgtcgacggcagtctgaagtcgaataagctcaaatctgccaggaaatttacttttctcagtgatgaggatgacctctctgctcacaaccccctgtataaggagaacatttcccaagtctccacgaacagtgacatctctcagcgcaccgatttcgtagacccatttagtcctaagatccaggccaagagcaaaagcttacgcggcccccgggaaaagatacagcgtttgtggtcccagtcagtgtcgcttcctagacgtttgatgcgcaaagtgcctaacagacctgaaattattgaccttcagcagtggcaaggtactaggcagaaggcggagaatgaaaacacggggatttgcaccaataagagaggcagtagtaacccactgcttacaaccgaggaggccaatctgactgaaaaagaagagataaggcagggagagacccttatgattgagggcacagaacaattgaaaagtctgtcttcagattccagcttctgtttccctcgtcctcactttagcttttctactttgcctaccgtctccagaacagtcgagcttaagtccgaaccaaatgtaatctccagccctgcagagtgcagccttgagctgtccccttcccgaccatgtgttctgcactcaagcttatcccgccgggagactccaatatgtatgctaccaattgaaaccgagcgaaacatctttgaaaactttgcccaccctccaaacatatctccctcggcgtgccctcttcctccaccgccccctatttcgccaccctccccgccacccgcacccgcacctcttgcaccaccacctgatataagtccattctcccttttttgtccaccccccagcccaccctcgattcccctgccactccctccacctactttcttccccctctctgtgagcacgtccgggccaccaactccgcccctgcttcccccctttcccactccgcttccaccaccccccccgtccatcccatgtccaccccccccaagtgcgtcgttcctgagcaccgaatgtgtttgcataaccggagtgaaatgtactacaaatctgatgcctgcagagaagattaagtccagcatgacccagctgtctacaaccacggtctgcaaaaccgatcctcagcgtgagcctaaaggaattcttcgacacgtaaagaatctggcagaactggagaaatccgttgctaatatgtattcccagatcgaaaagaactaccttagaacaaacgtatctgaacttcagacaatgtgtcctagtgaggtgactaatatggagattacctcggagcagaataagggaagcctgaacaatatagtggaagggaccgagaagcagtcccactcccagagcacttccctttag

SEQ ID NO: 54677 - DNA, 5799 bp, Artificial Sequence
  derived and/or modified sequence
atgttccggcagttctacctgtggacctgcctggccagcggcatcatcctgggcagcctgtttgagatctgcctgggccagtatgatgatggcaccatcctggtggacaacatgctgatcaagggcacagctgggggccctgaccccaccatcgagctgagcctgaaggacaacgtggactactgggtgctgatggaccctgtgaagcagatgctgttcctgaacagcacaggccgggtgctggaccgggacccccccatgaacatccacagcatcgtggtgcaggtgcagtgcatcaacaagaaggtgggcaccatcatctaccacgaggtgagaattgtggtgcgggacagaaatgacaacagccccaccttcaagcatgagagctactatgccaccgtgaatgagctgacccctgtgggcaccaccatcttcaccggcttcagcggggacaacggggccacagacattgatgatggccccaacggccagattgaatatgtgatccagtacaacccagatgaccccaccagcaatgacacctttgagatccccctgatgctgactggaaacatcgtgctgaggaagaggctgaactatgaggacaagacccgctactttgtgatcatccaggccaatgaccgggcccagaacctgaatgaaagaaggaccaccaccaccaccctgactgtggatgtgctggatggagatgacctgggccccatgttcctgccctgtgtgctggtgcccaacacccgggactgccggcccctgacctaccaggccgccatccctgagctgcggaccccagaggagctgaaccccatcatcgtgaccccacccatccaggccatcgaccaggacaggaacatccagcccccaagtgaccggcccggcatcctgtacagcatcctggtgggcaccccagaggactacccccgcttcttccacatgcaccccaggacagctgagctgagcctgctggagcctgtgaacagagacttccaccagaagtttgacctggtgatcaaggccgagcaggacaatggccaccccctgcctgcctttgctggcctgcacatcgagatcctggatgagaacaaccagagcccctacttcaccatgcccagctaccagggctacatcctggagagcgcccctgtgggcgccaccatcagtgacagcctgaacctgaccagccccctgcgcatcgtggccctggacaaggacatcgaggacaccaaggaccctgagctgcacctgttcctgaatgactacaccagcgtcttcaccgtgacccagacaggcatcacccgctacctgaccctgctgcagcctgtggaccgggaggagcagcagacctacaccttcagcatcacagcctttgatggagtgcaggagagcgagcccgtcatcgtgaacatccaggtgatggatgccaatgacaacacccccaccttccctgagatctcctatgatgtgtatgtgtacacagacatgaggcctggggacagcgtcatccagctgacagctgtggatgctgatgagggcagcaatggagagatcacctatgagatcctggtgggcgcccagggcgacttcatcatcaacaagaccaccggcctcatcaccatcgcccctggggtggagatgattgtgggccgcacctacgccctgactgtgcaggccgctgacaatgcccccccagctgagaggagaaattccatctgcaccgtgtacatcgaggtgctgccccccaacaaccagagccccccacgcttcccccagctgatgtacagcctggagatcagcgaggccatgagggtgggcgctgtgctgctgaacctgcaggccacagaccgggagggggacagcatcacctacgccattgaaaatggagacccccagagggtcttcaacctgtctgagaccaccggcatcctgaccctgggcaaggccctggaccgggagagcacagaccgctacatcctgatcatcacagccagtgatggccgcccagatggcaccagcacagccaccgtgaacatcgtggtgacagatgtgaatgacaatgcccctgtgtttgacccctacctgcccaggaacctgtctgtggtggaggaggaggccaatgcctttgtgggccaggtgaaggccacagatcctgatgctggcatcaatggccaggtgcactacagcctgggcaacttcaacaacctcttccgcatcaccagcaatggcagcatctacacagctgtgaagctgaaccgggaggtgcgggactactatgagctggtggtggtggccacagatggagctgtgcaccccaggcacagcaccctgaccctggccatcaaggtgctggacattgatgacaacagccctgtgttcaccaacagcacctacacagtgctggtggaggagaacctgcctgctggcaccaccatcctgcagatcgaggccaaggatgtggacctgggcgccaacgtgtcctaccgcatccgcagccctgaggtgaagcacttctttgccctgcaccccttcaccggggagctgagcctgctgcggagcctggactatgaggccttcccagaccaggaggccagcatcaccttcctggtggaggcctttgacatctacggcaccatgcctcctggcatcgccaccgtgacagtgattgtgaaggacatgaatgactacccacctgtgttcagcaagaggatctacaagggcatggtggccccagatgctgtgaagggcacccccatcaccaccgtgtatgcagaagatgctgaccccccaggcctgcctgccagccgggtgcgctacagagtggatgatgtgcagttcccctacccagccagcatctttgaggtggaggaggacagcggccgggtcatcaccagggtgaacctgaatgaggagcccaccaccatcttcaagctggtggtggtggcctttgatgatggagagcctgtgatgagcagcagcgccaccgtgaagatcctggtgctgcaccctggagagatcccccgcttcacccaggaggagtaccggcccccacctgtgtctgagctggccaccaagggcaccatggtgggcgtcatctctgctgctgccatcaaccagagcatcgtgtacagcatcgtgtctggaaatgaggaggacaccttcggcatcaacaacatcaccggggtcatctacgtgaatggccccctggactatgagaccaggaccagctatgtgctgcgggtgcaggccgacagcctggaggtggtgctggccaacctgcgggtgcccagcaagagcaacacagccaaggtgtacatcgagatccaggatgagaacaaccacccccctgtgttccagaagaagttctacatcggcggcgtgtctgaagatgccaggatgttcacctctgtgctgcgggtgaaggccacagacaaggacaccggcaactacagcgtgatggcctaccgcctcatcatcccccccatcaaggagggcaaggagggctttgtggtggagacctacacaggcctcatcaagacagccatgctgttccacaacatgaggaggagctacttcaagttccaggtgattgccacagatgattatggcaagggcctgagcggcaaggcagatgtgctggtgtctgtggtgaaccagctggacatgcaggtgattgtgtccaatgtgccccccaccctggtggagaagaagattgaggacctgacagagatcctggaccgctacgtgcaggagcagatccctggggccaaggtggtggtggagagcattggagccaggagacatggagatgccttcagcctggaggactacaccaagtgtgacctgactgtgtatgccatcgacccccagaccaacagagccatcgacagaaatgagctgttcaagttcctggatggcaagctgctggacatcaacaaggacttccagccctactatggagagggcggccgcatcctggagatccgcaccccagaggccgtgaccagcatcaagaagagaggagagagcctgggctacacagaaggagccctgctggccctggccttcatcatcatcctgtgctgcatcccagccatcctggtggtgctggtgtcctaccggcagaggcaggctgaatgtaccaagacagcccgcatccaggccgccctgcctgctgccaagccagctgtgcctgccccagcccctgtggccgcccctcctcctcctcctcctcctcctcctggggcccacctgtatgaggagctgggggacagctccatgcacaacctcttcctgctgtaccacttccagcagagccggggcaacaacagcgtgtctgaggacaggaagcaccagcaggtggtgatgcccttcagcagcaacaccatcgaggcccacaagagcgcccacgtggatggcagcctgaagagcaacaagctgaagagcgccaggaagttcaccttcctgagtgatgaagatgacctgagcgcccacaaccccctgtacaaggagaacatcagccaggtgtccaccaacagcgacatcagccagaggacagactttgtggaccccttcagccccaagatccaggccaagagcaagagcctgcggggcccccgggagaagatccagaggctgtggagccagagcgtgtccctgccccggcggctgatgaggaaggtgcccaacagacctgagatcatcgacctgcagcagtggcagggcacccggcagaaggcagaaaatgaaaatacaggcatctgcaccaacaagaggggcagcagcaaccccctgctgaccacagaggaggccaacctgacagagaaggaggagatccggcagggcgagaccctgatgattgagggcacagagcagctgaagagcctgagcagtgacagcagcttctgcttcccccggccccacttctccttcagcaccctgcccaccgtgtccaggacagtggagctgaagtctgagcccaacgtcatcagcagccctgctgagtgcagcctggagctgagccccagccggccctgtgtgctgcacagcagcctgagcagaagagagacccccatctgcatgctgcccattgaaacagaaagaaacatctttgaaaattttgcccacccccccaacatcagccccagcgcctgccccctgcccccacctccacccatcagcccccccagccccccaccagccccagcccccctggcccctcctccagacatcagccccttcagcctcttctgccccccacccagcccccccagcatccccctgcccctgcccccacccaccttcttccccctgtctgtgtccaccagcggcccccccaccccacccctgctgccccccttccccacccccctgcccccacctcctccttccatcccctgccccccacctccttctgccagcttcctgagcacagaatgtgtgtgcatcactggagtgaagtgcaccaccaacctgatgcctgctgagaagatcaagagctccatgacccagctgagcaccaccaccgtgtgcaagacagacccccagcgggagcccaagggcatcctgcggcacgtgaagaacctggccgagctggagaagtctgtggccaacatgtacagccagatcgagaagaactacctgcggaccaacgtgtctgagctgcagaccatgtgccccagcgaggtgaccaacatggagatcaccagcgagcagaacaagggcagcctgaacaacatcgtggagggcacagagaagcagagccacagccagagcaccagcctgtag

SEQ ID NO: 54678 - DNA, 5799 bp, Artificial Sequence
  derived and/or modified sequence
atgttccggcagttctacctgtggacctgcctggccagcggcatcatcctgggatccctgttcgagatttgtctcggccagtatgacgacggcaccatcttagttgacaatatgctgattaagggcacagcggggggccccgaccctactattgagctgagcctcaaagataatgtggattactgggtactcatggatcccgtgaagcagatgctctttctgaattcaacaggtcgggtgcttgatcgcgacccaccaatgaatattcattcgatcgtggtccaggtccagtgcataaataaaaaggtcggaaccattatctaccacgaagttcgaattgtggtcagggatcgcaacgacaacagtccaacattcaaacacgaatcttattacgcaaccgtgaacgaactcacccctgtagggactactatcttcaccggatttagcggcgacaacggagccaccgatatcgacgacggacctaacgggcagatcgagtacgtgatacagtacaatcccgatgatcctacgagtaatgacacgttcgagatcccactgatgctgactggaaatatagtcctgcgtaaacgccttaattatgaggataaaacaaggtactttgtgattatccaggctaatgaccgagcccagaatctgaatgagcgacgaacaactacaaccacattgaccgtagatgttcttgacggcgatgaccttggccctatgttccttccatgtgtactggtgcctaatacaagagactgcaggccacttacctaccaagcagcgataccggagctgcgaacacccgaagaacttaacccaatcatcgtgactccccctatccaagctatagaccaggacagaaatattcagcccccctctgatcgtccaggcattctttactcaattttggttgggacccctgaggactaccctcgtttcttccatatgcaccctcgcactgcagaactgtcgttactagagcccgtcaatagagatttccaccagaagtttgaccttgtgatcaaggctgaacaagataatggacaccccctccccgccttcgccggcctacacattgagattctcgacgagaacaatcagtccccatactttacaatgccttcgtaccaggggtatatactggaaagtgctccagtgggtgcaacaatctccgacagcctgaatctcacctccccactacgaatcgtggcgttggacaaggacattgaggatactaaggatcctgagctccacctttttctgaacgattatactagtgtatttactgtcacccagactggcataacccgatacttgacccttctgcaaccggtggatcgggaggaacagcagacctatactttttccatcaccgcgttcgatggggtgcaagagtcagagcctgtgattgtgaatatccaggttatggatgccaacgataacactcctactttcccagagatctcatacgatgtgtacgtctacaccgacatgaggcccggcgactccgtcattcaactcaccgcagtcgacgccgacgaagggtcaaatggtgagatcacatacgagatcctggtcggtgcccagggcgactttataattaataagactacgggcctcattactatcgcccccggggtggaaatgattgtcgggcgtacctatgcattaaccgtccaagctgccgacaacgcaccgccagccgagaggcgtaattccatctgcaccgtgtatatcgaggtgctgcctccgaacaaccagagcccccctcggtttccgcagctgatgtacagtttggagatcagcgaagcaatgcgcgttggcgctgtcctgttgaatcttcaggctaccgatcgagaaggagattccattacctacgcaatcgaaaatggagatcctcagagagtttttaatttatccgaaaccacgggaatactgactctaggaaaggccctggacagggaaagcaccgacagatatatcctcatcattactgcgagcgatggcagacccgatggaacgtcaactgcaaccgtaaatattgttgtgacagatgtaaatgataatgctcccgtgtttgatccttatctcccacggaaccttagtgtggtggaagaggaagccaacgcttttgtgggccaggttaaagccaccgatccggatgctggtattaacgggcaggtacactattcactcggcaattttaataatctcttccgcattacctctaacggctctatctacactgccgtgaagctcaaccgcgaggtcagggactactacgagctcgtagtggtggctacggatggcgcagtccaccctcggcattctacgttaaccttggcaataaaggtcttagatattgatgacaattctccagttttcaccaatagtacatacaccgttctagtggaagaaaacttaccggctggtactacaatcttacagatcgaggccaaagatgtcgatctaggagccaatgtaagttatagaattaggagccctgaagttaaacacttttttgcactacatcctttcaccggcgagttgagtctcctgaggagccttgattatgaggcgttcccagatcaggaggcgagcatcacctttctggtggaagcatttgatatttatggcactatgccacccggcatcgcaacagtgactgttattgtcaaggatatgaacgattacccgccagttttttccaagagaatctacaagggtatggtggctcctgatgctgtgaaagggaccccgattactacagtatatgctgaggatgccgatccgcctggcttgcccgccagccgagtgcgttatcgggtggacgacgtccagttcccttaccctgcaagcatcttcgaggtggaggaagacagcgggcgcgtgatcacacgcgttaacctaaacgaggagccaaccactatatttaaactcgtcgtggtggctttcgatgatggtgaacccgtgatgtcctcaagcgccactgtgaagattctcgtgttgcacccaggagagatccctcgcttcacccaagaggagtacaggcccccccctgtttctgagttagccacaaaagggactatggtaggtgtgatcagtgcagccgccattaatcagtctatcgtttactccatcgtcagcgggaatgaagaggatacattcggaattaataacatcactggcgtcatctacgtcaacggtccactcgattatgagaccagaaccagctacgtgctccgggtacaagctgattcacttgaagtggtgcttgccaacttgcgtgtgcctagcaaatcgaacacggccaaggtatatattgaaatccaagatgaaaacaaccatccaccagtctttcagaagaaattttatataggaggcgtatccgaagatgcaagaatgttcaccagcgtgttgagggtcaaggccaccgacaaggacacaggaaactattctgtgatggcttataggctgataatccctccaattaaggagggcaaggaaggcttcgtggtggaaacgtatactggattgatcaagactgcgatgcttttccacaatatgaggagatcctacttcaagttccaggtgatagccacggacgactacggtaagggcctaagcggcaaggcagatgtgctggtcagcgtggtgaaccaactcgacatgcaagtaatcgtgagcaacgtgcctcccactctggttgaaaaaaagatcgaggacctcaccgaaatcctggacagatacgtgcaggagcagattcccggcgcgaaggtggtggtggaatcaatcggagcacggcggcatggcgatgccttttctctagaggattacaccaagtgtgacctgaccgtgtacgcaatcgaccctcagaccaaccgcgccattgatcggaatgagctgtttaagttcctggacgggaaactgctcgatattaacaaggatttccagccttactatggggagggcggtagaatcctggaaatccggacacctgaagccgtgactagcattaaaaagagaggagagtccctcggatatacagaaggcgccctgctggcactggctttcatcattattctgtgctgcattcccgcaattcttgtggtgctggtgtcttacaggcagcgtcaagcagagtgtacaaagaccgcgcggatccaagcagcgctgcccgcagcgaaaccagcagtcccagcaccagcccccgtcgccgcaccaccacccccccccccccctccacccggagcccatctgtatgaagaacttggcgatagtagcatgcataatctgtttctcctctatcatttccagcagtctcgcgggaacaatagcgtgtcagaggataggaaacatcagcaggtcgtgatgccattttcaagtaacacgattgaggcccataagagcgcccatgtcgacgggagtctgaaatctaataagctgaaaagcgcaaggaaattcactttcctcagcgacgaagacgacttatctgctcacaacccgctctataaggagaacatctcacaggtgagcactaacagcgatatatcacagcgaacagatttcgtggacccattcagccccaaaattcaggccaaaagcaagtctctccgcggtccgagggagaaaatacagcggctgtggtcccagagtgtctcgttgccccggaggttgatgcgcaaggtgccgaaccgacccgaaattatcgatttgcaacagtggcaaggcacgcgtcagaaagccgaaaacgaaaatacaggaatttgtactaacaaacgcggaagctccaaccctctattgacaactgaggaggctaacctgactgaaaaagaagaaatacgccagggggagaccttaatgatcgagggcaccgagcagttgaagtcactttcaagtgatagcagcttctgctttcctcggcctcatttttctttctctaccctgccgaccgtcagccggactgttgagctaaaatccgagcccaatgttatcagttcacctgccgaatgctctctggagttgtccccgagccgtccctgtgttctgcactcaagtctgtcgcgaagggagactccaatttgtatgctgccaatcgagaccgaacggaacatctttgagaacttcgctcaccccccaaacatcagcccatcggcttgccccctgccaccaccaccacctattagtcccccgtcccccccacccgctcctgcacccttggcacccccaccagatatcagtccattcagcctcttctgcccgccccctagccccccctccattcctctcccactgccccctccgactttctttccactctcagtgtctacctcaggacccccaacacccccacttctccctccttttccaaccccacttcccccacccccgccatcgataccttgccctccccccccatccgcatcatttttgtcgactgaatgtgtatgtatcactggcgtgaagtgtactactaacctcatgccagctgagaaaataaagagttctatgacgcagctctccactacgacggtgtgtaaaactgaccctcaacgggagccaaagggcatcctccgccatgttaagaacttggccgagcttgagaagtctgtggctaatatgtatagtcagatagaaaagaattaccttaggaccaacgtgagtgagcttcaaacgatgtgcccttccgaagtcacaaacatggagatcacctccgaacaaaacaaaggaagcctaaataacatcgtggagggcaccgaaaagcagagtcattcccagagtacctcactgtag

SEQ ID NO: 54679 - DNA, 5798 bp, Artificial Sequence
  derived and/or modified sequence
atgtttcggcagttctacctgtggacttgcctggcaagcggaatcatcctgggtagtcttttcgagatctgtctggggcaatacgacgatggaacaattctcgtagacaacatgttaataaagggcacagccggtgggcctgatcctacgatcgaactatcattaaaggataatgtggattactgggtcctgatggacccagtcaaacagatgctctttctaaactcaaccggtagggtgctggaccgcgacccaccaatgaacatccacagcatagttgtacaagttcagtgcataaacaaaaaggtgggcacaatcatttatcacgaggtgcggattgttgtcagggatcgaaacgataacagccctacctttaaacacgagtcatactacgctacagtaaacgagcttacaccagttgggacaaccattttcactgggttttccggcgataacggggcaacagatatcgatgacggccctaatggacagatcgagtacgtgatccagtataatccagacgatcccacgagtaacgatacttttgaaattccacttatgctcacgggtaacatcgtgctacgaaagcggttgaattacgaggacaagaccagatattttgtcataatccaggccaacgatcgagcccagaacctgaacgaaaggagaactacaaccaccactctgacagtggacgtcctcgatggggacgatctggggccaatgtttttgccttgcgtgcttgttccaaacactcgagactgtcgtccattgacctaccaggccgcaatccctgagttgagaacccctgaagaactcaaccccattatagtaacaccgcctatccaggctatcgaccaggatcgaaacatccagccaccatccgacagacctggcattctttattcaattttggttgggacccccgaagattatccgcgattcttccacatgcatccaaggaccgccgagctgtccctgctggagccagtgaatagggacttccaccagaagttcgatcttgttatcaaggccgagcaagacaatgggcacccgctgccagcattcgctggcctccacatagagatacttgatgaaaataaccaatcaccttacttcacaatgccttcgtatcagggatatattcttgagtccgcacctgttggcgctaccatctctgactcactgaatctgacaagccctctgcgcatagttgccctggacaaggacattgaagacacaaaggatcccgagctgcaccttttcctgaacgattatacatcggtgtttactgttacacagacaggaataactagatatctgaccctgcttcagcctgtggaccgcgaggaacagcagacatacacgttctctataaccgcctttgatggcgtccaggagtcagagccggtgattgtgaacatccaagtcatggacgcaaacgacaacacccctacatttccggagatatcatatgatgtgtacgtttataccgacatgaggcctggggattccgtgattcaattgacggcggtggacgctgatgagggctcgaacggcgaaatcacttacgaaattctggtgggagctcaaggcgactttattattaataaaacaactgggcttattactatcgccccaggtgtggaaatgattgtggggagaacatacgcgctgacagtgcaggcggctgataacgctcccccagccgaacgcaggaactcaatttgcacggtatatattgaggtactgccccctaacaatcagtctccccctcgattccctcaattaatgtattcgctggagatatccgaagctatgagggtgggcgcagtgcttctgaatttacaggctaccgatcgggaaggcgatagcatcacctacgccatcgagaacggcgatccccagcgcgtgtttaatctgtccgagacgacgggaatcctcaccctgggcaaggcgcttgatagggagtcgacggatagatatattctgattattaccgccagcgatggaaggcccgacgggacatccaccgccactgttaacatcgtcgttacagacgtgaatgataacgcacctgtcttcgatccatatttgccaaggaacctttctgtcgttgaggaagaggccaatgcctttgtcgggcaagtcaaggcaaccgatcccgacgctggaataaatggccaggtgcactattcccttggcaatttcaacaacctgtttcgaattacgagcaatgggtccatttacactgccgtgaagttgaatagagaggttcgtgattactacgaactggtagtggtcgcaacagatggggcagtgcatccacgtcattctaccttgacactcgccatcaaggtgttagacatagacgacaacagtccagtatttactaacagcacctatactgtgctcgtcgaggaaaacttaccagccggaacaaccattcttcagatcgaagccaaggatgtggacctgggcgcaaacgtgtcttaccgcatccgttcacctgaggtaaaacatttcttcgcacttcatcctttcaccggagagctatctttgctacgttcgttggattatgaagcatttcctgatcaggaagcaagtattacctttctggtggaagcttttgacatctatgggaccatgcctcctggtattgcaaccgtaaccgttatcgtcaaagatatgaacgattatcccccagttttcagcaaacgtatctataaagggatggtcgcacccgatgcagtgaaggggacccccatcacaacagtttacgctgaagatgcagacccaccaggtttgccagcttccagggtgagatatagagtggatgatgtccagttcccctacccagccagtatcttcgaagtcgaggaagattcaggcagagttataacgcgagtcaatcttaatgaagagccaactaccatattcaagctggtggtagtggcttttgatgacggagagccggtcatgtcatccagcgccaccgtcaaaatcttggttcttcaccccggtgagatcccgagatttacgcaggaagaataccgaccaccgcctgtgagtgaactggccaccaaaggcaccatggtgggcgtgatttcagccgcagctatcaatcaaagtatcgtgtatagcattgtttctggaaacgaggaggacaccttcggtatcaacaacatcaccggggtgatctacgtcaatgggcctctggattatgagacgagaacgagctacgtcttgagggtgcaggccgactcgcttgaagtggtactggccaacctgcgagtgccaagtaagagcaacaccgccaaagtgtacatcgaaatccaggacgagaacaaccaccccccagtttttcaaaagaaattctatatcggaggagtgtccgaggacgctagaatgttcacaagtgtgctgcgtgtgaaagccaccgataaggacaccggaaactattccgtcatggcctaccgactgattatccccccaataaaagagggaaaggagggattcgtggtcgagacctacaccgggctgatcaaaaccgcaatgttattccacaacatgcgccgatcgtactttaagttccaggtgattgccactgatgactatggtaaggggctgtctggtaaagctgatgtcctagtaagtgtggtgaatcagctggatatgcaggtaattgtctcaaatgtgccaccaactctggtcgaaaagaagatcgaggacttaaccgaaatcctcgaccggtacgtgcaggaacaaattcccggagcaaaagtggttgtcgagagcataggcgctcgacgtcacggcgatgcttttagtcttgaggactacacgaagtgtgatctgaccgtgtatgcaatcgatccccaaactaacagggcaatcgaccgtaatgagttatttaagttccttgacggcaagctgttggacattaacaaggattttcagccgtactatggggagggcggtagaatcctcgaaattcgcactcccgaagccgtgacctccataaagaaacgcggagagtcgttgggatatactgaaggggcactattagccctggccttcattattatcctctgctgcatcccagcgatcttggtggtcttggtatcatacaggcagaggcaagccgaatgtactaagactgccagaattcaggccgctctgcctgccgcaaagccagccgttcccgctccagcgccagtcgcggcacccccacctcctccaccaccacccccaggggcacacctgtacgaagaattaggagattcctccatgcataatttgttcctgctctaccatttccaacagagcagggggaacaattcggtgagcgaagaccgtaaacaccagcaggtagtcatgccctttagttcaaacacgatagaagctcataagtccgcacacgtagacggctcccttaagtcaaacaagttgaagagcgcacggaaattcacattcctgtctgatgaagatgacctctccgcgcataacccattatacaaggagaatatttcccaggtgtctaccaacagcgacatctcacagaggacagatttcgttgacccgttctcaccaaagattcaagcaaagagtaagtccctgagggggccaagagagaagattcagaggctgtggagtcagagtgtctctttgcctcgaagactgatgcgaaaagtcccaaacagacctgagattatcgacctgcaacaatggcagggcaccaggcagaaagcagaaaatgaaaatacagggatctgcactaacaagcggggttcatctaatccccttcttacaacagaagaggcgaacctgaccgagaaagaggaaattagacagggagagacattgatgattgaaggtacggagcaattgaagagcctgagcagcgatagcagtttttgctttccacggccacattttagcttttcaactcttccgactgtttctaggacggtcgagttgaaatcggagcccaacgtgatctcctctccagcagaatgctctctggagctgagtcccagtcgcccatgcgtgctacatagctccctgagccggagggaaacaccgatctgtatgttgccgatagagaccgaacgtaatatattcgaaaattttgcccaccctcctaatattagcccgtctgcctgccccttaccaccacctcccccaatctccccaccaagcccacctccagcacccgctccgctcgctccgcctcctgacatttctcctttcagccttttctgccccccaccttcacccccttccatcccactgccgttgcccccacccacattttttcccttgagcgtctctacctctggcccaccaacccctccgctattgcctcccttcccaacgcctctgccgccacccccaccatcaatcccctgtcccccaccaccatctgcttccttcctgtctactgagtgcgtttgtattaccggagtcaaatgtactacaaacttgatgcccgcagagaagatcaaaagcagtatgacccagcttagcactactactgtctgtaagacagacccccagcgcgagcccaagggcatattacgccacgtgaaaaatctcgctgaattagagaagagcgttgctaacatgtacagccagatcgaaaaaaactaccttaggactaatgtgagtgagctccagactatgtgcccaagcgaggtgacaaatatggaaattacttcagaacagaataagggcagtttgaataatattgtcgaaggaaccgagaagcagagccactcccagagtactagccttta

SEQ ID NO: 54680 - DNA, 6882 bp, Artificial Sequence
  derived and/or modified sequence
caacgtgctgagctaatagcgacagatagagggcagacagattcctgctagcagcttagtgttagttgcttgtggtaactaaggcaggtggcatacatctcagaacgtggagaatgatggtatgctttctgagttaacatgttgaactgttttgcttttctaaaaattttcctagtaacattttcttgatgatatgagagtggatatcaatgcctcacagaaacaagaggtggaacatgtgaatgaatcgtcttggaactagattatgagcactggttctttttaaagggatgtgcaagaggcagccttggcaagaaaacttgctgcataatcttacatggactaaagatgaaactttaaaccgcaaatcagctttgagtgaactttgacagaagatgtttcgacagttttatctctggacatgtttagcttcagggatcatcctgggctctctctttgaaatctgcttgggccagtatgatgatggtacaattctggtggacaacatgctgatcaaagggactgctggaggaccagaccccaccatagaactttctttaaaggataatgtggattactgggtgttgatggatcctgttaagcaaatgcttttcctgaacagcaccggaagagttctggatagagatccaccgatgaacatacactccattgtggtgcaggtccagtgcatcaacaaaaaagtgggcactattatctaccatgaagtgcgaatagtggtgagagacaggaatgacaactcacccactttcaagcatgaaagctactatgccacagtgaatgagctcactccagttggtaccacaatattcacaggattttcaggagacaatggagctacagatatagatgatggaccaaatggacagatagagtatgttattcagtataatccagatgatccgacatccaatgacacctttgaaattcccctaatgttgactggaaatatagtgttaaggaagaggctcaactatgaagataagactcgctactttgtcataatccaagctaatgaccgtgcccaaaatctgaatgagaggcgaaccaccaccaccactctcacagtggatgttctggatggagatgacttgggtccaatgtttcttccttgtgtccttgtgccaaacactcgtgattgccgtccactcacttatcaagctgccatacctgagttgagaactccggaagaactgaaccccattattgttacgccaccaatccaagccattgatcaggaccggaatattcaaccgccatcagataggccaggaatcctctattccatccttgttgggactcctgaggattacccacgatttttccatatgcatcctaggacagcagaacttagtctcctggagccagtaaacagagactttcaccagaaatttgatttggttattaaggctgaacaagacaatggtcatcctcttcctgcctttgccggtctacacattgaaatactggatgaaaacaatcaaagtccatattttacaatgcccagttatcaaggctatatcctggaatctgccccagtgggagcaaccatttcggacagtctcaatttgacttcacctttaagaatagtagctctggacaaggacatagaagatacaaaagacccagagcttcacctttttctgaatgactacacctcagtcttcaccgtcacacagactggtattactcgctacctcaccttacttcaaccagtggacagggaagaacagcaaacttacaccttttcgataacagcatttgatggtgtacaagaaagtgagccagtcatcgtcaatattcaagtgatggatgcaaatgataacacgccaaccttccctgaaatatcctatgatgtgtatgtttatacagacatgagacctggggacagtgtcatacagctcactgcagtcgacgcagacgaagggtcaaatggggagatcacatatgaaatccttgttggggctcagggagacttcatcatcaataaaacaacagggcttatcaccatcgctccaggggtggaaatgatagtcgggcggacttacgcactcacggtccaagcagcggataatgctcctcctgcagagcgaaggaactccatctgcactgtgtatattgaagtgcttccaccaaataatcaaagccctcctcgcttcccacagctgatgtatagccttgaaattagtgaagccatgagggttggtgctgttttattaaatctacaggcaactgatcgagagggagactcaataacatatgccattgagaatggagatcctcagagagtttttaatctttcagaaaccacggggattctaaccttagggaaagcactggacagggaaagcactgatcgctacattctgatcatcacagcttcagatggcaggccagatgggacctcaactgccacagtaaacatagtggtgacagatgtcaatgacaatgctccagtgtttgatccttatctgccaagaaatttatctgtggtggaagaagaagccaatgcctttgtgggtcaagtaaaagcaacagaccctgatgctggaataaatggtcaagtgcactacagtttgggtaactttaataatctttttcgtatcacatccaatgggagcatttacacagcagtgaagcttaacagagaagtcagggactactatgaacttgttgttgtggcaacagatggagcagtacaccctcgtcattcaactctaaccttggccatcaaggttttggacattgatgataacagtcctgtgttcaccaattcaacatacactgtccttgttgaagagaatttgccagctgggactaccatccttcaaatagaggccaaagatgtcgaccttggagcaaatgtgtcttaccggataagaagcccagaagtgaagcacttttttgcactacatccatttacaggagaactatcgcttttaaggagtttagattatgaggcatttccagaccaagaagcaagtatcacttttctggtagaggcctttgatatttatggaacaatgccacctggtattgctactgtcacagtgattgtaaaggatatgaatgattatcctcctgtctttagtaaacgaatatacaaagggatggtggctccggatgcagtcaagggtacacctatcacaacagtttatgctgaagatgcagaccctcctggattacctgcaagtcgtgtgaggtatagagtagatgatgtacagtttccttaccctgccagtatttttgaagtggaagaagattctggaagagtaataacacgagtcaatcttaatgaagaacctacaacaatttttaagttggtggtggttgcttttgatgatggggagcctgtgatgtccagcagtgccacagtgaagattcttgtcttacatcctggtgagatcccacgcttcacacaggaggaatatagacctcctccagtaagtgaacttgccaccaaagggaccatggttggtgtaatttctgctgctgccattaatcaaagtattgtgtactccattgtttcaggaaatgaagaagatacatttggaattaataacatcacaggtgttatctatgtgaatggacctctggattatgagaccaggacaagctatgtacttcgagtccaagctgattccctggaagtggtccttgccaatctccgagttccttcaaaaagcaatacagctaaagtatacattgagattcaggatgaaaataatcatcccccagtgtttcagaaaaaattctacatcggaggtgtatctgaagatgcaagaatgtttacttctgtactcagagtgaaggctactgataaagatactggcaattatagtgtcatggcctacagactcataataccaccaattaaagagggaaaagaaggatttgtagtggaaacatatacagggcttatcaaaactgctatgctcttccataatatgaggagatcctacttcaagtttcaagttattgcaactgacgactatgggaagggactgagcggcaaagccgatgtactcgtctccgtggtcaatcagctggatatgcaagtcattgtttccaatgtgcctcctactctagtggaaaaaaagatagaagatcttacagagatcttggatcgctatgttcaggaacaaattcctggtgccaaggtcgtagtggagtccattggagctcgccggcatggagatgccttttccctagaagattacaccaaatgtgacttgactgtctatgcaattgacccccaaaccaacagagccatcgatagaaatgagctttttaaatttttggatggcaaactacttgatatcaataaagactttcagccgtattatggggaaggaggacgcattctggagatccggactccagaggcagtgaccagcattaaaaagagaggagaaagtctaggatacacagaaggggccttgttggctctggccttcatcatcatcctctgctgcattcctgccatcttggtggttttggtcagctacagacaacgtcaagctgagtgtacaaagactgcacgaattcaggccgcattacccgcggctaaaccagcagtgccggctcctgcaccagtggcagcgcccccgccgccgccgccgcctccgccaggtgcgcatctctatgaagaacttggagacagctcaatgcataatcttttccttctctaccattttcaacaaagcaggggaaataactcagtctcagaagacaggaaacatcaacaagttgtgatgcccttttcttccaatactattgaggctcacaagtcagctcatgtagacggatcacttaagagcaacaaactgaagtctgcaagaaaattcacatttctatctgatgaggatgacttaagtgcccataatcccctttataaggaaaacataagtcaagtatcaacaaattcagacatttcacagagaacagattttgtagacccattttcacccaaaatacaagccaagagtaagtctctgaggggcccaagagaaaagattcagaggctgtggagtcagtcagtcagcttacccaggaggctgatgaggaaagttccaaatagaccagagatcatagatctgcagcagtggcaaggcaccaggcagaaagctgaaaatgaaaacactggaatctgtacaaacaaaagaggtagcagcaatccattgcttacaactgaagaggcaaatttgacagagaaagaggaaataaggcaaggtgaaacactgatgatagaaggaacagaacagttgaaatctctctcttcagactcttcattttgctttcccaggcctcacttctcattctccactttgccaactgtttcaagaactgtggaactcaaatcagaacctaatgtcatcagttctcctgctgagtgttccttggaactttctccttcaaggccttgtgttttacattcttcactctctaggagagagacacctatttgtatgttacctattgaaaccgaaagaaatatttttgaaaattttgcccatccaccaaacatctctccttctgcctgtccccttccccctcctcctcctatttctcctccttctcctcctcctgctcctgctcctcttgctcctcctcctgacatttctcctttttctcttttttgtcctcctccctctcctccttctatccctcttcctcttcctcctcctacattttttccactttccgtttcaacgtctggtcccccaacaccacctcttctacctccatttccaactcctcttcctccaccacctccttctattccttgccctccacctccttcagcttcatttctgtccacagagtgtgtctgtataacaggtgttaaatgcacgaccaacttgatgcctgccgagaaaattaagtcctctatgacacagctatcaacaacgacagtgtgtaaaacagaccctcagagagaaccaaaaggcatcctcagacacgttaaaaacttagcagaacttgaaaaatcagtagctaacatgtacagtcaaatagaaaaaaactatctacgcacaaatgtttcagaacttcaaactatgtgcccttcagaagtaacaaatatggaaatcacatctgaacaaaacaaggggagtttgaacaatattgtcgagggaactgaaaaacaatctcacagtcaatctacttcactgtaatgttgcttttcttattttagtcgggcaaacctcttgttgatcatagtcttcaagttgaacatcaaatttgaacgtcaaagaagactctattattttaccccaaattcaatgaaatgcagttttttttctcgtttttaatttaaaaagatattaacctcatcactactaactcactcatataatagatttaccttactttttaaaaactacaaagtagcataatttgttctacatttatttgaaaagtaagtaattttaatctcttttttagtgggaatatgtgggcatgaaaattagatacccaacttaaaccaaaggcatgtctatcatgtggatgcagtaacatttacatttagtttttgatcgtagttttatatgaatgttccaagaaaaaagcagactgttacaaataagttaaaactgatatgattgataggttctgttttttcttgaagcctatgtatttggtaagaagaaatactaccgaagtaaaatataatgtacctagattgtaggagatgacagacataaggtatttcaaaataaatctcaggtgctataacatgtagtcatctgttttctgataagaacatcttttactctgacttgcttttatcttagtagtatgcttatggatttagtagtatgcttatggatttgataaatcttatactttttcagttgctgt

SEQ ID NO: 54681 - DNA, 5799 bp, Artificial Sequence
  derived and/or modified sequence
atgttcagacagttctacctgtggacctgcctggccagcggcatcatcctgggcagcctgttcgagatctgcctgggccagtacgacgacggcaccatcctggtggacaacatgctgatcaagggcaccgccggcggccccgaccccaccatcgagctgagcctgaaggacaacgtggactactgggtgctgatggaccccgtgaagcagatgctgttcctgaacagcaccggcagagtgctggacagagacccccccatgaacatccacagcatcgtggtgcaggtgcagtgcatcaacaagaaggtgggcaccatcatctaccacgaggtgagaatcgtggtgagagacagaaacgacaacagccccaccttcaagcacgagagctactacgccaccgtgaacgagctgacccccgtgggcaccaccatcttcaccggcttcagcggcgacaacggcgccaccgacatcgacgacggccccaacggccagatcgagtacgtgatccagtacaaccccgacgaccccaccagcaacgacaccttcgagatccccctgatgctgaccggcaacatcgtgctgagaaagagactgaactacgaggacaagaccagatacttcgtgatcatccaggccaacgacagagcccagaacctgaacgagagaagaaccaccaccaccaccctgaccgtggacgtgctggacggcgacgacctgggccccatgttcctgccctgcgtgctggtgcccaacaccagagactgcagacccctgacctaccaggccgccatccccgagctgagaacccccgaggagctgaaccccatcatcgtgaccccccccatccaggccatcgaccaggacagaaacatccagccccccagcgacagacccggcatcctgtacagcatcctggtgggcacccccgaggactaccccagattcttccacatgcaccccagaaccgccgagctgagcctgctggagcccgtgaacagagacttccaccagaagttcgacctggtgatcaaggccgagcaggacaacggccaccccctgcccgccttcgccggcctgcacatcgagatcctggacgagaacaaccagagcccctacttcaccatgcccagctaccagggctacatcctggagagcgcccccgtgggcgccaccatcagcgacagcctgaacctgaccagccccctgagaatcgtggccctggacaaggacatcgaggacaccaaggaccccgagctgcacctgttcctgaacgactacaccagcgtgttcaccgtgacccagaccggcatcaccagatacctgaccctgctgcagcccgtggacagagaggagcagcagacctacaccttcagcatcaccgccttcgacggcgtgcaggagagcgagcccgtgatcgtgaacatccaggtgatggacgccaacgacaacacccccaccttccccgagatcagctacgacgtgtacgtgtacaccgacatgagacccggcgacagcgtgatccagctgaccgccgtggacgccgacgagggcagcaacggcgagatcacctacgagatcctggtgggcgcccagggcgacttcatcatcaacaagaccaccggcctgatcaccatcgcccccggcgtggagatgatcgtgggcagaacctacgccctgaccgtgcaggccgccgacaacgccccccccgccgagagaagaaacagcatctgcaccgtgtacatcgaggtgctgccccccaacaaccagagcccccccagattcccccagctgatgtacagcctggagatcagcgaggccatgagagtgggcgccgtgctgctgaacctgcaggccaccgacagagagggcgacagcatcacctacgccatcgagaacggcgacccccagagagtgttcaacctgagcgagaccaccggcatcctgaccctgggcaaggccctggacagagagagcaccgacagatacatcctgatcatcaccgccagcgacggcagacccgacggcaccagcaccgccaccgtgaacatcgtggtgaccgacgtgaacgacaacgcccccgtgttcgacccctacctgcccagaaacctgagcgtggtggaggaggaggccaacgccttcgtgggccaggtgaaggccaccgaccccgacgccggcatcaacggccaggtgcactacagcctgggcaacttcaacaacctgttcagaatcaccagcaacggcagcatctacaccgccgtgaagctgaacagagaggtgagagactactacgagctggtggtggtggccaccgacggcgccgtgcaccccagacacagcaccctgaccctggccatcaaggtgctggacatcgacgacaacagccccgtgttcaccaacagcacctacaccgtgctggtggaggagaacctgcccgccggcaccaccatcctgcagatcgaggccaaggacgtggacctgggcgccaacgtgagctacagaatcagaagccccgaggtgaagcacttcttcgccctgcaccccttcaccggcgagctgagcctgctgagaagcctggactacgaggccttccccgaccaggaggccagcatcaccttcctggtggaggccttcgacatctacggcaccatgccccccggcatcgccaccgtgaccgtgatcgtgaaggacatgaacgactacccccccgtgttcagcaagagaatctacaagggcatggtggcccccgacgccgtgaagggcacccccatcaccaccgtgtacgccgaggacgccgacccccccggcctgcccgccagcagagtgagatacagagtggacgacgtgcagttcccctaccccgccagcatcttcgaggtggaggaggacagcggcagagtgatcaccagagtgaacctgaacgaggagcccaccaccatcttcaagctggtggtggtggccttcgacgacggcgagcccgtgatgagcagcagcgccaccgtgaagatcctggtgctgcaccccggcgagatccccagattcacccaggaggagtacagacccccccccgtgagcgagctggccaccaagggcaccatggtgggcgtgatcagcgccgccgccatcaaccagagcatcgtgtacagcatcgtgagcggcaacgaggaggacaccttcggcatcaacaacatcaccggcgtgatctacgtgaacggccccctggactacgagaccagaaccagctacgtgctgagagtgcaggccgacagcctggaggtggtgctggccaacctgagagtgcccagcaagagcaacaccgccaaggtgtacatcgagatccaggacgagaacaaccacccccccgtgttccagaagaagttctacatcggcggcgtgagcgaggacgccagaatgttcaccagcgtgctgagagtgaaggccaccgacaaggacaccggcaactacagcgtgatggcctacagactgatcatcccccccatcaaggagggcaaggagggcttcgtggtggagacctacaccggcctgatcaagaccgccatgctgttccacaacatgagaagaagctacttcaagttccaggtgatcgccaccgacgactacggcaagggcctgagcggcaaggccgacgtgctggtgagcgtggtgaaccagctggacatgcaggtgatcgtgagcaacgtgccccccaccctggtggagaagaagatcgaggacctgaccgagatcctggacagatacgtgcaggagcagatccccggcgccaaggtggtggtggagagcatcggcgccagaagacacggcgacgccttcagcctggaggactacaccaagtgcgacctgaccgtgtacgccatcgacccccagaccaacagagccatcgacagaaacgagctgttcaagttcctggacggcaagctgctggacatcaacaaggacttccagccctactacggcgagggcggcagaatcctggagatcagaacccccgaggccgtgaccagcatcaagaagagaggcgagagcctgggctacaccgagggcgccctgctggccctggccttcatcatcatcctgtgctgcatccccgccatcctggtggtgctggtgagctacagacagagacaggccgagtgcaccaagaccgccagaatccaggccgccctgcccgccgccaagcccgccgtgcccgcccccgcccccgtggccgcccccccccccccccccccccccccccccggcgcccacctgtacgaggagctgggcgacagcagcatgcacaacctgttcctgctgtaccacttccagcagagcagaggcaacaacagcgtgagcgaggacagaaagcaccagcaggtggtgatgcccttcagcagcaacaccatcgaggcccacaagagcgcccacgtggacggcagcctgaagagcaacaagctgaagagcgccagaaagttcaccttcctgagcgacgaggacgacctgagcgcccacaaccccctgtacaaggagaacatcagccaggtgagcaccaacagcgacatcagccagagaaccgacttcgtggaccccttcagccccaagatccaggccaagagcaagagcctgagaggccccagagagaagatccagagactgtggagccagagcgtgagcctgcccagaagactgatgagaaaggtgcccaacagacccgagatcatcgacctgcagcagtggcagggcaccagacagaaggccgagaacgagaacaccggcatctgcaccaacaagagaggcagcagcaaccccctgctgaccaccgaggaggccaacctgaccgagaaggaggagatcagacagggcgagaccctgatgatcgagggcaccgagcagctgaagagcctgagcagcgacagcagcttctgcttccccagaccccacttcagcttcagcaccctgcccaccgtgagcagaaccgtggagctgaagagcgagcccaacgtgatcagcagccccgccgagtgcagcctggagctgagccccagcagaccctgcgtgctgcacagcagcctgagcagaagagagacccccatctgcatgctgcccatcgagaccgagagaaacatcttcgagaacttcgcccacccccccaacatcagccccagcgcctgccccctgcccccccccccccccatcagcccccccagccccccccccgcccccgcccccctggcccccccccccgacatcagccccttcagcctgttctgccccccccccagcccccccagcatccccctgcccctgcccccccccaccttcttccccctgagcgtgagcaccagcggcccccccaccccccccctgctgccccccttccccacccccctgcccccccccccccccagcatcccctgcccccccccccccagcgccagcttcctgagcaccgagtgcgtgtgcatcaccggcgtgaagtgcaccaccaacctgatgcccgccgagaagatcaagagcagcatgacccagctgagcaccaccaccgtgtgcaagaccgacccccagagagagcccaagggcatcctgagacacgtgaagaacctggccgagctggagaagagcgtggccaacatgtacagccagatcgagaagaactacctgagaaccaacgtgagcgagctgcagaccatgtgccccagcgaggtgaccaacatggagatcaccagcgagcagaacaagggcagcctgaacaacatcgtggagggcaccgagaagcagagccacagccagagcaccagcctgtag

SEQ ID NO: 54682 - protein, 219 aa, Artificial Sequence
  derived and/or modified sequence
MGGAQLELPSGARPGVCVRRSFRAHAGDQPRRPPGPIPVPGTMKQESAAPNTPPTSQSPTPSAQFPRNDGDPQALWIFGYGSLVWRPDFAYSDSRVGFVRGYSRRFWQGDTFHRGSDKMPGRVVTLLEDHEGCTWGVAYQVQGEQNPGYLGPAPEEAIATQILACRGFSGHNLEYLLRLADFMQLCGPQAQDEHLAAIVDAVGTMLPCFCPTEQALALV

SEQ ID NO: 54683 - DNA, 660 bp, Artificial Sequence
  derived and/or modified sequence
atgggcggcgcccagctggagctgcccagcggcgccagacccggcgtgtgcgtgagaagaagcttcagagcccacgccggcgaccagcccagaagaccccccggccccatccccgtgcccggcaccatgaagcaggagagcgccgcccccaacaccccccccaccagccagagccccacccccagcgcccagttccccagaaacgacggcgacccccaggccctgtggatcttcggctacggcagcctggtgtggagacccgacttcgcctacagcgacagcagagtgggcttcgtgagaggctacagcagaagattctggcagggcgacaccttccacagaggcagcgacaagatgcccggcagagtggtgaccctgctggaggaccacgagggctgcacctggggcgtggcctaccaggtgcagggcgagcagaaccccggctacctgggccccgcccccgaggaggccatcgccacccagatcctggcctgcagaggcttcagcggccacaacctggagtacctgctgagactggccgacttcatgcagctgtgcggcccccaggcccaggacgagcacctggccgccatcgtggacgccgtgggcaccatgctgccctgcttctgccccaccgagcaggccctggccctggtgtag

SEQ ID NO: 54684 - DNA, 660 bp, Artificial Sequence
  derived and/or modified sequence
atgggaggcgcccagctggagttgccttctggcgctcgcccaggagtttgcgtgaggcggtcttttcgggctcacgcgggggatcagcctcggaggccacccggtccaatccccgtgccggggactatgaaacaggagtcagccgctccaaatacccccccaacatcacaatctcccacaccctcggctcaattcccccgcaacgacggagacccgcaggctctgtggatttttggctacggctccctagtgtggagaccagatttcgcctattccgattccagagtcgggtttgtgagggggtatagccgccgtttctggcaaggcgatacctttcataggggctccgataagatgcctgggcgggtggttaccctcctggaagaccatgaagggtgcacttggggagtggcataccaagttcagggcgaacagaatccggggtacttggggcctgcacctgaggaagcgatagccacccagatcctcgcatgccgcggatttagtggccataacctagaataccttttgagactggccgactttatgcaactctgcgggccccaggcccaggacgaacacctggccgcaatcgtggacgcagtgggaacaatgctaccttgtttttgtcctacagaacaggctctggccttagtgtag

SEQ ID NO: 54685 - DNA, 660 bp, Artificial Sequence
  derived and/or modified sequence
atgggcggggcccagctggagctgcccagcggggcccggcctggggtgtgtgtgagaagaagcttccgggcccacgccggggaccagcccaggaggcctcctggccccatccctgtgcccggcaccatgaagcaggagagcgctgcccccaacaccccacccaccagccagagccccacccccagcgcccagttccccagaaatgatggagacccccaggccctgtggatcttcggctacggcagcctggtgtggaggccagactttgcctacagcgacagccgggtgggctttgtgcggggctacagccgccgcttctggcagggcgacaccttccaccggggcagtgacaagatgcctggccgggtggtgaccctgctggaggaccacgagggctgcacctggggcgtggcctaccaggtgcagggcgagcagaaccctggctacctgggccctgcccctgaggaggccatcgccacccagatcctggcctgccggggcttcagcggccacaacctggagtacctgctgcggctggccgacttcatgcagctgtgtggcccccaggcccaggatgagcacctggccgccatcgtggatgctgtgggcaccatgctgccctgcttctgccccacagagcaggccctggccctggtgtag

SEQ ID NO: 54686 - DNA, 660 bp, Artificial Sequence
  derived and/or modified sequence
atgggcggcgcccagctggagctgcccagcggcgcccggcccggcgtctgcgtccggaggtcattccgcgcccatgccggagatcagccacggagacctccagggcctattccggtgccgggaacaatgaaacaggaatctgcggcgcccaacactccgcctaccagtcaaagtcctaccccctcagctcagttcccccgtaatgatggcgatcctcaagccctttggatattcgggtatggctccctggtgtggcggccggacttcgcctattccgacagtagggtgggctttgttcgaggctactctagaagattctggcagggcgatactttccacaggggctcagacaaaatgcctggacgagtcgtaacacttctcgaggatcatgaaggatgcacgtggggcgtagcctaccaggtccagggtgagcaaaatccaggctatcttggaccggctcccgaagaggccatcgcaacacagatactagcgtgtagggggttttctggacataatctcgagtatctgctcagacttgccgactttatgcagctgtgtgggccccaagcacaagatgaacacctggccgcaattgtggatgctgtgggcaccatgttgccttgtttttgccctactgaacaggctcttgccctggtctag

SEQ ID NO: 54687 - DNA, 660 bp, Artificial Sequence
  derived and/or modified sequence
atgggtggcgcacaactggagctgccctctggcgctcggccaggggtgtgcgtacggagaagtttcagggcacatgccggtgaccagcctcgcaggcctcccggtccaatccctgtgcctggcacaatgaaacaagagagcgctgcgcctaacactccacctacatctcagagtccgactcccagcgctcaattcccacgcaatgatggagacccgcaagccctctggatctttggttatggttccttagtgtggcgtcccgacttcgcatattctgattcaagggtagggttcgtcagaggctattcgaggcgcttttggcagggcgacactttccatcggggatccgataaaatgcctgggagagtcgttacacttctcgaggaccacgaaggatgcacctggggagtcgcatatcaggttcagggggaacagaaccctggctatcttggcccagcgccagaagaagcgattgctacccagatccttgcttgcagaggtttcagtggccataacctggaatatctgttgcgactggcagattttatgcagctgtgtggcccacaggcccaggatgagcacctggctgctatcgtggacgccgtcggaaccatgctgccatgtttctgtcctaccgaacaggctttagcgcttgtttag

SEQ ID NO: 54688 - DNA, 1204 bp, Artificial Sequence
  derived and/or modified sequence
gagacggaagtttacgacgcccagagcgctccttctggacgtgccctggactcgacttgggactgagtctgtgccgcctaggctggcagggactcggccagatgcactagcggcaaggctgggctgacaccgcctgggactcgctcgccgtacctccaaggggcccaggtcatgagggggcggctggggagacgcccgcccggtgcccgccctgggcccggcgggtgccccctgcccgccgcctgacgcaatccgaggcgcccttgctgcatgccggcgctggagaaacctcccctgccgttgcatcactcctgccaggtttgccacagaggtggagctgaaccaatcagcgggcgcgctgggcccgcggcgcggttaagtgagaagcagaatccgaagttgattggccaaaaggggatttgccccaccccaatcaccgcggcagctggccgcggtgggcgtggtctcccggcaagaaggtttaaagggcgcctccatggggggcgctcagctggagctaccgagcggtgccaggccaggtgtgtgcgtccgtcggtctttccgtgcccacgccggagaccagccccggaggccgcctgggcctatccctgtgccaggcaccatgaagcaggagtctgcagccccgaacaccccgcccacctcgcagtcccctacgccgtccgctcagttcccccgaaacgacggcgaccctcaagcgctgtggattttcgggtacggctccctggtgtggaggcccgacttcgcctacagcgacagccgtgtgggcttcgtgcgcggctacagccgccgtttctggcagggagacaccttccatcggggcagcgacaagatgcctggccgtgtggtgacgctccttgaagatcatgagggctgcacttggggcgtggcataccaagtgcaaggggagcagaaccctggttacctgggccctgcgcctgaagaggccattgccacgcagatcctggcctgccggggcttctccggccacaaccttgaatacttgctgcgtctggcagacttcatgcagctctgtgggcctcaggcgcaggacgagcacctggcagccatcgtggacgctgtgggcaccatgttgccctgcttctgccccaccgagcaggctctggcgctggtgtgaggggctgagcccctgcggggagtgctcatgtggacatcagggccagac

SEQ ID NO: 54689 - protein, 196 aa, Artificial Sequence
  derived and/or modified sequence
MADSAQAQKLVYLVTGGCGFLGEHVVRMLLQREPRLGELRVFDQHLGPWLEELKTGPVRVTAIQGDVTQAHEVAAAVAGAHVVIHTAGLVDVFGRASPKTIHEVNVQGTRNVIEACVQTGTRFLVYTSSMEVVGPNTKGHPFYRGNEDTPYEAVHRHPYPCSKALAEWLVLEANGRKAMLPGCTCWQPGSWSSGQP

SEQ ID NO: 54690 - DNA, 591 bp, Artificial Sequence
  derived and/or modified sequence
atggcagattcagcacaggctcaaaagttagtctacttggtgactggaggctgcggctttcttggcgagcacgttgtccggatgctcctgcagcgcgagcctaggctgggggagctgcgggtcttcgaccaacacctgggcccatggctggaagagctgaagactggacctgtcagagttaccgctattcagggtgacgtgacgcaagctcacgaggtagctgccgccgttgcgggagcccatgtcgtgatacatacagccggcctggtggacgtgttcgggcgggcctcaccaaagaccattcacgaagtgaatgtccagggaacacgtaacgtgatcgaggcgtgtgtgcagaccggcacacgctttctggtgtacacctcgagtatggaggtcgtcggaccaaataccaaagggcaccctttctacagagggaatgaggacactccatacgaggcagtgcaccgacatccatatccctgttcaaaagctttggctgagtggttagtgctagaagccaacgggagaaaggctatgttgcccggctgtacctgttggcaaccaggctcctggtctagtggccagccctag

SEQ ID NO: 54691 - DNA, 591 bp, Artificial Sequence
  derived and/or modified sequence
atggccgacagcgcccaggctcagaaactggtctacctcgtcacaggtgggtgcgggtttctgggcgaacatgtcgtgagaatgctgctccaacgcgaaccgcgtttgggcgagcttcgcgtctttgaccaacatttgggtccctggctcgaggagctcaaaacaggtcccgtgcgggtcacagctatccagggggacgtgacacaggctcacgaggtcgccgctgcagtcgccggtgcacacgtggtgatccatactgcaggtctcgtagacgtgtttggcagagcttccccgaagacgattcacgaggttaatgtccaaggcactcgcaatgtgatagaagcatgcgtgcagacaggaacaaggttcctggtttacacctctagcatggaagtagtcgggccaaacaccaaagggcacccgttctatcgcgggaacgaagacactccctacgaggccgtccatcgacacccttatccttgttcaaaggctctggccgagtggctggtgctggaagccaatgggagaaaagctatgttgcctgggtgtacctgctggcagcccggatcatggtccagtgggcagccctag

SEQ ID NO: 54692 - DNA, 2215 bp, Artificial Sequence
  derived and/or modified sequence
ggaggagccagcggaaggacggtgtgcgggccggccagccctggacgaaagaagagggcccctccaggccagtctgggcaccctgggatagcggctgcagcccgcccctctctccgtaactcagccatcagcaggggcagacggcaggtggcctggttgctgcagctcccaggatcagctctgccctccccgcaaacgccagcctcgtcaccgctccagggcacctccagcagtaacaggtggttgcagcaggtggcagccagcccctggatgagccaaggtctcttccccagccaggcatggccgactctgcacaggcccagaagctggtgtacctggtcacagggggctgtggcttcctgggagagcacgtggtgcgaatgctgctgcagcgggagccccggctcggggagctgcgggtctttgaccaacacctgggtccctggctggaggagctgaagacagggcctgtgagggtgactgccatccagggggacgtgacccaggcccatgaggtggcagcagctgtggccggagcccatgtggtcatccacacggctgggctggtagacgtgtttggcagggccagtcccaagaccatccatgaggtcaacgtgcagggtacccggaacgtgatcgaggcttgtgtgcagaccggaacacggttcctggtctacaccagcagcatggaagttgtggggcctaacaccaaaggtcaccccttctacaggggcaacgaagacaccccatacgaagcagtgcacaggcacccctatccttgcagcaaggccctggccgagtggctggtcctggaggccaacgggaggaaggcaatgttgcctggatgcacgtgctggcagcccgggagctggagcagcgggcaaccctgatgggcggccaggtatacttctgctacgatggatcaccctacaggagctacgaggatttcaacatggagttcctgggcccctgcggactgcggctggtgggcgcccgcccattgctgccctactggctgctggtgttcctggctgccctcaatgccctgctgcagtggctgctgcggccactggtgctctacgcacccctgctgaacccctacacgctggccgtggccaacaccaccttcaccgtcagcaccgacaaggctcagcgccatttcggctatgagcccctgttctcgtgggaggatagccggacccgtaccattctctgggtacaggccgctacgggttcagcccagtgacggtggggctggggcctggaggcccagatacagcacatccacccaggtcccgagccctcacaccctggacgggaagggacagctgcattccagagcaggaggcagggctctggggccagaatggctgtccttgtcgtagagccctccacattttctttttcttttttgagacagggtcttgctctgtcacccagactggagtgcagtggtgtgatcatagctcactgcaccctcaacctcctgggttcaagcaatcctcctgcctcagcctcctgaacagctgggaccacaggtgcacgccaccacacctggcttttttttgttgtttttagagacagggtctcactatattgctcaggctggtcttgaactcctgggctcaagtgatcttcccacgtgggcctcccaaaacgctggaactacaagtgtgagccaccgcgcctggcccaagccctccacattttcaatccaggagccttgagtctgtgttgtgtcctgacacctccaagttctagggccgtcaggacacgggagggtttggggacagagtgtccttcctctgtcctctcatcccagtcctgatggccgcttggtgagtgtctggtgccctggtggcctgccccagctctcttctggctttctgagcaggaagcgagcagaggctccacaggcttacgctgctctcctgacagccacacgcgaccctcggtgcagagtgcagaggcggctctggttcctccagccacctcagtccctctttgggaggtgatgttcccattgtttttcaaaggcctcaccttcaactgtctgtcttagaattcccctctggagggctatggcctccctatgctttcacttcccacctctctacctaagttccttcccagcacatcgccagccctgggcctggggatgtccccaatgctgtacctggctgaccccggattaaaagcctcatccacgaccgtg

SEQ ID NO: 54693 - DNA, 2022 bp, Artificial Sequence
  derived and/or modified sequence
ggaggagccagcggaaggacggtgtgcgggccggccagccctggacgaaagaagagggcccctccaggccagtctgggcaccctgggatagcggctgcagccaggcatggccgactctgcacaggcccagaagctggtgtacctggtcacagggggctgtggcttcctgggagagcacgtggtgcgaatgctgctgcagcgggagccccggctcggggagctgcgggtctttgaccaacacctgggtccctggctggaggagctgaagacagggcctgtgagggtgactgccatccagggggacgtgacccaggcccatgaggtggcagcagctgtggccggagcccatgtggtcatccacacggctgggctggtagacgtgtttggcagggccagtcccaagaccatccatgaggtcaacgtgcagggtacccggaacgtgatcgaggcttgtgtgcagaccggaacacggttcctggtctacaccagcagcatggaagttgtggggcctaacaccaaaggtcaccccttctacaggggcaacgaagacaccccatacgaagcagtgcacaggcacccctatccttgcagcaaggccctggccgagtggctggtcctggaggccaacgggaggaaggcaatgttgcctggatgcacgtgctggcagcccgggagctggagcagcgggcaaccctgatgggcggccaggtatacttctgctacgatggatcaccctacaggagctacgaggatttcaacatggagttcctgggcccctgcggactgcggctggtgggcgcccgcccattgctgccctactggctgctggtgttcctggctgccctcaatgccctgctgcagtggctgctgcggccactggtgctctacgcacccctgctgaacccctacacgctggccgtggccaacaccaccttcaccgtcagcaccgacaaggctcagcgccatttcggctatgagcccctgttctcgtgggaggatagccggacccgtaccattctctgggtacaggccgctacgggttcagcccagtgacggtggggctggggcctggaggcccagatacagcacatccacccaggtcccgagccctcacaccctggacgggaagggacagctgcattccagagcaggaggcagggctctggggccagaatggctgtccttgtcgtagagccctccacattttctttttcttttttgagacagggtcttgctctgtcacccagactggagtgcagtggtgtgatcatagctcactgcaccctcaacctcctgggttcaagcaatcctcctgcctcagcctcctgaacagctgggaccacaggtgcacgccaccacacctggcttttttttgttgtttttagagacagggtctcactatattgctcaggctggtcttgaactcctgggctcaagtgatcttcccacgtgggcctcccaaaacgctggaactacaagtgtgagccaccgcgcctggcccaagccctccacattttcaatccaggagccttgagtctgtgttgtgtcctgacacctccaagttctagggccgtcaggacacgggagggtttggggacagagtgtccttcctctgtcctctcatcccagtcctgatggccgcttggtgagtgtctggtgccctggtggcctgccccagctctcttctggctttctgagcaggaagcgagcagaggctccacaggcttacgctgctctcctgacagccacacgcgaccctcggtgcagagtgcagaggcggctctggttcctccagccacctcagtccctctttgggaggtgatgttcccattgtttttcaaaggcctcaccttcaactgtctgtcttagaattcccctctggagggctatggcctccctatgctttcacttcccacctctctacctaagttccttcccagcacatcgccagccctgggcctggggatgtccccaatgctgtacctggctgaccccggattaaaagcctcatccacgaccgtg

SEQ ID NO: 54694 - DNA, 591 bp, Artificial Sequence
  derived and/or modified sequence
atggctgacagcgcccaggcccagaagctggtgtacctggtgactggaggctgcggcttcctgggggagcacgtggtgaggatgctgctgcagcgggagccccggctgggggagctgcgggtgtttgaccagcacctgggcccctggctggaggagctgaagacaggccctgtgcgggtgacagccatccagggagatgtgacccaggcccacgaggtggccgctgctgtggccggggcccacgtggtgatccacacagctggcctggtggatgtgtttggccgggccagccccaagaccatccacgaggtgaatgtgcagggcaccagaaatgtgattgaggcctgtgtgcagacaggcacccgcttcctggtgtacaccagctccatggaggtggtgggccccaacaccaagggccaccccttctacagaggaaatgaagacaccccctatgaagctgtgcaccgccacccctacccctgcagcaaggccctggccgagtggctggtgctggaggccaacggcaggaaggccatgctgcccggctgcacctgctggcagcccggctcctggagcagcggccagccctag

SEQ ID NO: 54695 - DNA, 591 bp, Artificial Sequence
  derived and/or modified sequence
atggccgacagcgcccaggcccagaagctggtgtacctggtgaccggtggctgtgggtttcttggcgagcatgttgtgcgaatgctgctgcagagagaaccacgactgggagaattgcgggtgttcgaccaacatctcggtccttggcttgaagaactaaagaccggtcctgtccgagttactgccatccagggcgatgtgacccaagctcatgaggtggcagctgccgtagccggcgcgcatgttgtcatccacacagccggactggtcgacgtgtttggacgggcctcccccaaaacaattcacgaagtgaatgtccaaggaacccgcaatgtgatcgaggcatgcgtccagactggcacacgcttcctagtctacacctctagtatggaggtcgtgggacccaatacgaagggccatcctttttaccgaggaaatgaagatacaccgtacgaggcagttcaccggcatccatacccatgcagtaaggcattggccgaatggctggtcctggaagctaatggacggaaggccatgctgcctgggtgcacatgttggcaaccagggagctggtcaagcggtcaaccctag

SEQ ID NO: 54696 - DNA, 591 bp, Artificial Sequence
  derived and/or modified sequence
atggccgacagcgcccaggcccagaagctggtgtacctggtgaccggcggatgcggattcctgggggagcacgtagtacggatgctcctccagagggagcctaggctgggggagttacgggtgtttgatcaacacctggggccttggctcgaggaactaaagaccggacctgttcgggtaacagccatacaaggcgacgtcacgcaggcgcacgaggtggccgccgcagtcgctggcgcacacgtggtgattcatacagcaggcctcgtggatgtgtttggtcgcgcttctcctaaaaccatccatgaggtaaacgttcagggtacacggaatgttatagaagcctgcgtacagacgggaaccaggtttcttgtgtacacctcatcaatggaggtcgttgggccgaacaccaagggtcacccgttttatcgtggcaatgaagacaccccatacgaagctgttcacaggcatccctacccatgctccaaggccctagccgaatggctcgtcctggaggccaacggcagaaaggcaatgctgcctgggtgtacctgttggcagcctggctcctggtcttccggccagccttag

SEQ ID NO: 54697 - DNA, 591 bp, Artificial Sequence
  derived and/or modified sequence
atggccgatagcgctcaggcccagaaactcgtgtacctagtgacgggaggctgtggcttcctcggagagcacgtcgtgagaatgctgctccagcgcgagcccagactgggtgagctgagagtgtttgaccagcatctcggaccatggcttgaggaactgaagaccggccctgttcgggtaaccgccatccagggcgatgtgacacaggcccatgaagttgcagcagcagtggccggagctcacgtggtgattcataccgcgggtctggtcgacgtcttcgggagagcgagtcccaaaactatacacgaagtgaacgttcaggggacgagaaacgtgatcgaggcctgtgtgcagacggggacccgcttcttggtatatacctcatccatggaggtggtgggtccaaacacaaaaggtcatcctttttatcgcggtaacgaagacacaccctacgaggccgtgcaccgacatccttatccttgcagcaaagccctggccgagtggcttgtgctcgaagccaacggcaggaaggccatgctgccaggctgtacatgttggcagccgggtagctggagcagtgggcagccttag

SEQ ID NO: 54698 - DNA, 591 bp, Artificial Sequence
  derived and/or modified sequence
atggccgattcagctcaagcacagaagctagtctatctagtcactggtgggtgcgggtttctgggagaacatgtcgtgcgcatgttgcttcagcgcgaacctcgtctcggggaactgcgagttttcgatcaacacttgggaccttggctcgaagagctgaaaacaggccctgttagagtgacggcaattcagggagacgtgacccaggctcacgaggtagccgctgctgtcgcaggagcccacgttgtcatccacaccgcgggtctggtagacgtgttcggcagggccagccccaaaacgatccatgaggtgaatgtccaggggacccggaacgtgattgaggcatgcgtgcagacgggcaccagatttttggtgtatactagttcgatggaggtggtcggaccaaatacaaagggtcacccattttataggggaaacgaagataccccgtatgaagccgtccaccggcatccttacccttgctccaaagcgttagctgagtggctggtgttggaggcaaacggccgaaaggctatgctcccaggatgtacctgttggcaaccgggatcttggtccagcggtcagccgtag

SEQ ID NO: 54699 - DNA, 591 bp, Artificial Sequence
  derived and/or modified sequence
atggccgacagcgcccaggcccagaagctggtgtacctggtgaccggcggctgcggcttcctgggcgagcacgtggtgagaatgctgctgcagagagagcccagactgggcgagctgagagtgttcgaccagcacctgggcccctggctggaggagctgaagaccggccccgtgagagtgaccgccatccagggcgacgtgacccaggcccacgaggtggccgccgccgtggccggcgcccacgtggtgatccacaccgccggcctggtggacgtgttcggcagagccagccccaagaccatccacgaggtgaacgtgcagggcaccagaaacgtgatcgaggcctgcgtgcagaccggcaccagattcctggtgtacaccagcagcatggaggtggtgggccccaacaccaagggccaccccttctacagaggcaacgaggacaccccctacgaggccgtgcacagacacccctacccctgcagcaaggccctggccgagtggctggtgctggaggccaacggcagaaaggccatgctgcccggctgcacctgctggcagcccggcagctggagcagcggccagccctag

SEQ ID NO: 54700 - protein, 422 aa, Artificial Sequence
  derived and/or modified sequence
MSSSCSGLSRVLVAVATALVSASSPCPQAWGPPGVQYGQPGRSVKLCCPGVTAGDPVSWFRDGEPKLLQGPDSGLGHELVLAQADSTDEGTYICQTLDGALGGTVTLQLGYPPARPVVSCQAADYENFSCTWSPSQISGLPTRYLTSYRKKTVLGADSQRRSPSTGPWPCPQDPLGAARCVVHGAEFWSQYRINVTEVNPLGASTRLLDVSLQSILRPDPPQGLRVESVPGYPRRLRASWTYPASWPCQPHFLLKFRLQYRPAQHPAWSTVEPAGLEEVITDAVAGLPHAVRVSARDFLDAGTWSTWSPEAWGTPSTGTIPKEIPAWGQLHTQPEVEPQVDSPAPPRPSLQPHPRLLDHRDSVEQVAVLASLGILSFLGLVAGALALGLWLRLRRGGKDGSPKPGFLASVIPVDRRPGAPNL

SEQ ID NO: 54701 - protein, 390 aa, Artificial Sequence
  derived and/or modified sequence
MSSSCSGLSRVLVAVATALVSASSPCPQAWGPPGVQYGQPGRSVKLCCPGVTAGDPVSWFRDGEPKLLQGPDSGLGHELVLAQADSTDEGTYICQTLDGALGGTVTLQLGYPPARPVVSCQAADYENFSCTWSPSQISGLPTRYLTSYRKKTVLGADSQRRSPSTGPWPCPQDPLGAARCVVHGAEFWSQYRINVTEVNPLGASTRLLDVSLQSILRPDPPQGLRVESVPGYPRRLRASWTYPASWPCQPHFLLKFRLQYRPAQHPAWSTVEPAGLEEVITDAVAGLPHAVRVSARDFLDAGTWSTWSPEAWGTPSTGTIPKEIPAWGQLHTQPEVEPQVDSPAPPRPSLQPHPRLLDHRDSVEQVAVLASLGILSFLGLVAGALALGLW

SEQ ID NO: 54702 - protein, 270 aa, Artificial Sequence
  derived and/or modified sequence
MSSSCSGLSRVLVAVATALVSASSPCPQAWGPPGVQYGQPGRSVKLCCPGVTAGDPVSWFRDGEPKLLQGPDSGLGHELVLAQADSTDEGTYICQTLDGALGGTVTLQLGYPPARPVVSCQAADYENFSCTWSPSQISGLPTRYLTSYRKKTVLGADSQRRSPSTGPWPCPQDPLGAARCVVHGAEFWSQYRINVTEVNPLGASTRLLDVSLQSILRPDPPQGLRVESVPGYPRRLRASWTYPASWPCQPHFLLKFRLQYRPAQHPAWST

SEQ ID NO: 54703 - protein, 167 aa, Artificial Sequence
  derived and/or modified sequence
MSSSCSGLSRVLVAVATALVSASSPCPQAWGPPGVQYGQPGRSVKLCCPGVTAGDPVSWFRDGEPKLLQGPDSGLGHELVLAQADSTDEGTYICQTLDGALGGTVTLQLGYPPARPVVSCQAADYENFSCTWSPSQISGLPTRYLTSYRKKTVLGADSQRRSPSTGP

SEQ ID NO: 54704 - protein, 139 aa, Artificial Sequence
  derived and/or modified sequence
MSSSCSGLSRVLVAVATALVSASSPCPQAWGPPGVQYGQPGRSVKLCCPGVTAGDPVSWFRDGEPKLLQGPDSGLGHELVLAQADSTDEGTYICQTLDGALGGTVTLQLGYPPARPVVSCQAADYENFSCTWSPSQISG

SEQ ID NO: 54705 - DNA, 1269 bp, Artificial Sequence
  derived and/or modified sequence
atgagctcatcctgcagcggcctttcccgagtgctggtggctgtcgccactgcgctggtgagtgcttcaagcccatgtcctcaggcctgggggccccccggggtacaatatggtcagccagggagaagtgtgaagctgtgttgtccaggcgtcaccgccggcgacccagtgagctggtttagagacggggagcctaaattactacaagggccggacagtggcctaggccacgaactggttctggcccaagccgactccactgacgagggcacttacatctgtcagacgctggacggagctctgggtggtacggtgaccctgcagctgggatacccacctgcacgacctgtagtctcatgtcaagctgcggactacgagaatttctcctgcacctggtcgccttcccagataagcggactgcccacacgctatctgaccagctataggaagaagacagtgctcggagcggatagtcaaagaagaagcccctctactggaccctggccctgtccccaagatccactgggcgcagcacgctgcgtcgtccatggggccgaattctggagtcagtaccgaattaatgttaccgaggtaaacccattaggtgccagtaccaggcttttggatgtctccctgcagagcatcctccggcccgaccctcctcagggcttgcgtgtcgaatctgtcccagggtaccctcgccgtttgcgggccagttggacatacccagcatcttggccgtgccagccacactttttactcaagttcaggctgcagtaccgcccggcccagcaccccgcatggtctacagtggaaccagctgggctggaagaggttataactgatgcagtggccgggctccctcacgcagtgcgggtcagcgccagagacttcctcgatgccggaacatggagcacttggagtcctgaggcatggggcacgcccagcaccggcaccatcccgaaagaaatccccgcctggggccagctgcacacacaacctgaagtggagccacaggtggactcgcctgccccccctaggccgtcccttcagccgcatccacgcctgctcgatcaccgggatagtgtagaacaagtagctgtgcttgcgtctttaggcatcctgtcatttctgggactcgtagccggcgcactcgccctgggcttgtggctgaggttgcgacgcgggggtaaggacgggagcccaaaaccagggtttcttgcatcggtgatacccgtggaccggagaccaggcgctccaaacctgtag

SEQ ID NO: 54706 - DNA, 1173 bp, Artificial Sequence
  derived and/or modified sequence
atgagtagctcatgctccggccttagtcgagtgctggttgcggtggccacagccctggtgagcgcctcttccccttgccctcaggcatggggccctcccggggtccaatacgggcaacctggtcggagtgtcaaactgtgttgccccggcgtaacagcaggtgatccagtcagttggttcagagacggcgagcccaagttgctccagggaccggattccggactaggtcacgagcttgttcttgcccaggccgattcgacagacgagggcacctatatctgccaaactcttgacggagctctagggggcacagtcaccttgcagctcggctacccgcccgcacgccctgtggtgtcttgccaagcagcagattatgagaatttttcctgcacctggagtccttcccagatcagcggcctgccaactcgatacttgacaagctaccgaaagaagaccgttctgggtgccgattcccagaggcgcagcccatccaccgggccctggccttgcccccaagacccactgggagctgcccgctgtgtcgtacatggcgccgagttctggtctcagtacaggatcaatgtcaccgaggtgaaccccctgggcgcttctactaggctgctggacgtgagccttcaatctatccttcgacccgaccccccccagggcctgagagtggagtctgtgcccggttacccacggcggctgcgcgcctcctggacctaccccgcaagttggccctgccagccacactttctactgaaattcagactacagtatcgacccgcacaacaccccgcatggagtacagtggagcccgccggcctagaggaagtgatcaccgacgccgttgctggacttccgcatgctgtgcgagtgagcgcacgagacttcctggacgccggaacgtggagtacatggagcccagaagcctggggaacccctagcaccgggacaatacccaaagaaatccctgcttgggggcagctgcacacgcaaccggaggttgagccccaggtggacagtcctgcaccccctaggccaagcctccagcctcacccaagactgctggatcatagagactctgtcgaacaggtggcagtcctcgcctccctgggcatcctgagttttctgggtctagttgcgggcgccttggccctcgggctatggtag

SEQ ID NO: 54707 - DNA, 1269 bp, Artificial Sequence
  derived and/or modified sequence
atgtcttcaagctgctccgggctttctagggttctggtggcagtagcaacagccctggtgagcgcatcttctccatgcccccaagcctggggaccgcccggcgtccagtatgggcaaccggggaggtctgtgaagttgtgctgtccaggtgtaactgctggagatcccgtgtcatggttcagggacggtgagcctaagcttctgcagggcccagattccgggctggggcacgaactggtgttggcccaggcagatagtactgatgaggggacctatatatgccagacgttagatggcgcactaggagggacagttactttgcaactggggtatccacccgcccgcccagttgtgagttgccaggcagctgactatgaaaattttagctgcacttggagcccaagccagatcagcggattacctacgaggtatctgacctcataccgaaaaaagaccgtcctcggtgctgactctcaacggcggtccccctccaccggcccctggccatgtccccaagacccattaggagccgcaagatgcgtggtacacggcgcagaattttggagccagtaccgcatcaacgtcaccgaggtaaatccattgggcgcctctactaggctactggatgtcagtctgcaaagtattctgcgccctgatcccccacagggattgagagtggagtctgtgccaggctatccacgccggctgagggcctcatggacctaccctgccagctggccttgtcaacctcattttctgctgaagtttcgccttcagtaccgccccgcacagcacccagcctggagcaccgtggaaccagccggccttgaagaagtcatcactgacgccgtcgcaggtctgccccacgccgttagggtatctgctcgggattttcttgacgcgggaacctggagcacctggagccctgaagcatggggaacccccagtaccgggacaatccccaaggagatccccgcttggggacagttacatactcagccagaggtggagccccaggtggattctcccgccccacctcggccttccctccaaccacatcctagactcctggaccacagggattctgtcgaacaagtggcagtgctagctagcctgggtattttgagctttttgggtctggtcgccggcgcgctcgccctgggcctgtggctaaggctccgcaggggggggaaggatggctcacccaagccgggattcctcgcttcagtgattcctgtggatcgtagaccaggcgcccccaatctctag

SEQ ID NO: 54708 - DNA, 1269 bp, Artificial Sequence
  derived and/or modified sequence
atgagctcaagctgcagtggactgtcccgcgttctcgtcgctgttgcaaccgcgcttgtgtccgcctctagcccctgccctcaggcatggggccctcccggcgttcagtatgggcagcccggccggtctgttaaactttgttgtcctggagtcaccgcaggtgaccccgtgtcctggtttagagatggcgagcccaagctgttgcaaggacctgacagcggactggggcatgaattagtgctggctcaagctgactcaaccgatgaaggcacttacatctgtcaaacactcgacggcgccctcggtggtactgtaactcttcagctaggctaccctccagccaggcctgtggtgtcgtgtcaggccgcggactatgagaacttctcgtgtacttggagtccaagccagatttcaggattgcctacaagatatcttacctcatacagaaagaaaaccgttctgggagcagacagtcaacgcagatcgccatcaacaggaccatggccatgcccacaggacccactcggcgctgcacggtgtgtggtgcacggagcagagttctggagccagtaccggataaacgtgaccgaagtgaaccccctcggggcctctacgagactgctggacgtctcattacagagtatactccgaccggatcccccacaggggcttagggtggagtcagtcccaggatatccacggcggctgcgcgcatcctggacctaccctgctagttggccatgtcagccacactttctgcttaaattccgcctgcaatacaggccggcccagcaccccgcttggtccactgttgagcctgctggcctggaggaggtgatcacagacgccgtggcaggtctgccccacgcagttagggtgagcgcccgcgacttcctggacgcggggacttggtctacttggtcaccagaggcctggggcaccccttctacaggaaccatccctaaggagattcccgcatggggacagctacacactcagcctgaggtggaacctcaagtagactcccctgctccaccccgcccctctctccagccacatcctagactcctggaccacagagacagtgtggagcaagtcgcggtgctggcttcactgggcatactgtctttccttggcttagtggcaggggcattggcactgggactttggcttcgtcttcgccgggggggcaaggatggcagtccgaaacccggctttttagcttcagtgataccggttgatcggcgacccggggctcctaacctctag

SEQ ID NO: 54709 - DNA, 813 bp, Artificial Sequence
  derived and/or modified sequence
atgtcgtcttcctgctcaggcttaagccgggtgctcgttgctgtcgccaccgctttggtaagcgcctcctccccatgtccccaggcatggggaccccccggggtccagtacggacagcccggaagatctgtgaaattgtgttgccctggcgtgacggctggagatcccgtctcatggttccgggacggcgaacccaaactactccaaggtccagactccggattaggacacgaactggtcctcgcacaggcggacagcacggacgagggcacgtacatttgccaaaccctggacggcgctcttggggggaccgtcacactacaactggggtaccctcccgctcggcccgtggtgtcttgccaagccgccgactacgagaatttctcatgtacatggtccccaagccagatctccgggttacccactagatatctgaccagctacagaaaaaaaacagttcttggggcagactcccagcgtagatcaccatcgaccggcccctggccctgtccacaggatcctctgggcgcggctagatgtgttgttcatggtgcagagttctggtctcagtatcgcatcaatgttacagaagtaaacccactgggggccagcacccgcctgctggatgtgtcgctccaatctatcctgagaccagaccccccacaaggacttagggtagagtccgtccctggttacccacgccgcttacgggcatcttggacatatcccgcgtcatggccctgtcagcctcatttcctgctcaaattccggttgcaatatcggcctgcccagcaccctgcctggtcaacttag

SEQ ID NO: 54710 - DNA, 504 bp, Artificial Sequence
  derived and/or modified sequence
atgtccagttcctgctctggactgtctagggttctcgtggctgtcgctacagcccttgtgtccgcttcatctccgtgtccgcaggcttggggaccacctggcgtccaatatgggcaacccggcagatccgtcaaattgtgttgtcctggagttaccgccggagaccctgtatcttggtttcgagatggagaacctaagctcctccaagggcctgactcaggtctgggacatgaactcgtcctcgctcaagcagactccaccgacgagggtacgtatatatgtcaaacgctcgatggagccctgggcggcaccgtcacactgcagctggggtatccgccggctcgtcctgtcgtgtcctgccaggccgctgactacgagaatttcagctgtacctggagccctagccagatctcaggtttgcccactcggtatctgactagttatcggaagaagacagtgctcggagcggactcccaacgtcgcagcccttcgacagggccttag

SEQ ID NO: 54711 - DNA, 420 bp, Artificial Sequence
  derived and/or modified sequence
atgagcagttcttgcagcggactgagcagggtgctcgttgccgtggcgaccgctctggtgagtgccagttcaccgtgtccacaggcttggggtcctcccggcgtacagtacggccagccggggcgaagtgtgaagttgtgctgcccgggggtgacagctggcgatcccgtctcctggtttagggatggagagcccaaactcctccagggccccgactccggcctgggacatgagctggttctcgcccaggctgatagcacagatgagggtacctacatctgtcagacactggatggcgcccttggggggaccgtgacccttcaattagggtacccccccgccaggcccgtagtctcttgccaggccgcagactatgaaaacttttcctgcacttggtccccgtcccagatcagtggttag

SEQ ID NO: 54712 - DNA, 1723 bp, Artificial Sequence
  derived and/or modified sequence
gggggctgtagctggtgagaggaagtcctagaggctatggacactctgctgctgggatcaccgagatgagcagcagctgctcagggctgagcagggtcctggtggccgtggctacagccctggtgtctgcctcctccccctgcccccaggcctggggccccccaggggtccagtatgggcagccaggcaggtccgtgaagctgtgttgtcctggagtgactgccggggacccagtgtcctggtttcgggatggggagccaaagctgctccagggacctgactctgggctagggcatgaactggtcctggcccaggcagacagcactgatgagggcacctacatctgccagaccctggatggtgcacttgggggcacagtgaccctgcagctgggctaccctccagcccgccctgttgtctcctgccaagcagccgactatgagaacttctcttgcacttggagtcccagccagatcagcggtttacccacccgctacctcacctcctacaggaagaagacagtcctaggagctgatagccagaggaggagtccatccacagggccctggccatgcccacaggatcccctaggggctgcccgctgtgttgtccacggggctgagttctggagccagtaccggattaatgtgactgaggtgaacccactgggtgccagcacacgcctgctggatgtgagcttgcagagcatcttgcgccctgacccaccccagggcctgcgggtagagtcagtaccaggttacccccgacgcctgcgagccagctggacataccctgcctcctggccgtgccagccccacttcctgctcaagttccgtttgcagtaccgtccggcgcagcatccagcctggtccacggtggagccagctggactggaggaggtgatcacagatgctgtggctgggctgccccatgctgtacgagtcagtgcccgggactttctagatgctggcacctggagcacctggagcccggaggcctggggaactccgagcactgggaccataccaaaggagataccagcatggggccagctacacacgcagccagaggtggagcctcaggtggacagccctgctcctccaaggccctccctccaaccacaccctcggctacttgatcacagggactctgtggagcaggtagctgtgctggcgtctttgggaatcctttctttcctgggactggtggctggggccctggcactggggctctggctgaggctgagacggggtgggaaggatggatccccaaagcctgggttcttggcctcagtgattccagtggacaggcgtccaggagctccaaacctgtagaggacccaggagggcttcggcagattccacctataattctgtcttgctggtgtggatagaaaccaggcaggacagtagatccctatggttggatctcagctggaagttctgtttggagcccatttctgtgagaccctgtatttcaaatttgcagctgaaaggtgcttgtacctctgatttcaccccagagttggagttctgctcaaggaacgtgtgtaatgtgtacatctgtgtccatgtgtgaccatgtgtctgtgaggcagggaacatgtattctctgcatgcatgtatgtaggtgcctggggagtgtgtgtgggtccttggctcttggcctttccccttgcaggggttgtgcaggtgtgaataaagagaataaggaagttcttgga

SEQ ID NO: 54713 - DNA, 1453 bp, Artificial Sequence
  derived and/or modified sequence
gggggctgtagctggtgagaggaagtcctagaggctatggacactctgctgctgggatcaccgagatgagcagcagctgctcagggctgagcagggtcctggtggccgtggctacagccctggtgtctgcctcctccccctgcccccaggcctggggccccccaggggtccagtatgggcagccaggcaggtccgtgaagctgtgttgtcctggagtgactgccggggacccagtgtcctggtttcgggatggggagccaaagctgctccagggacctgactctgggctagggcatgaactggtcctggcccaggcagacagcactgatgagggcacctacatctgccagaccctggatggtgcacttgggggcacagtgaccctgcagctgggctaccctccagcccgccctgttgtctcctgccaagcagccgactatgagaacttctcttgcacttggagtcccagccagatcagcggtttacccacccgctacctcacctcctacaggaagaagacagtcctaggagctgatagccagaggaggagtccatccacagggccctggccatgcccacaggatcccctaggggctgcccgctgtgttgtccacggggctgagttctggagccagtaccggattaatgtgactgaggtgaacccactgggtgccagcacacgcctgctggatgtgagcttgcagagcatcttgcgccctgacccaccccagggcctgcgggtagagtcagtaccaggttacccccgacgcctgcgagccagctggacataccctgcctcctggccgtgccagccccacttcctgctcaagttccgtttgcagtaccgtccggcgcagcatccagcctggtccacggtggagccagctggactggaggaggtgatcacagatgctgtggctgggctgccccatgctgtacgagtcagtgcccgggactttctagatgctggcacctggagcacctggagcccggaggcctggggaactccgagcactgggaccataccaaaggagataccagcatggggccagctacacacgcagccagaggtggagcctcaggtggacagccctgctcctccaaggccctccctccaaccacaccctcggctacttgatcacagggactctgtggagcaggtagctgtgctggcgtctttgggaatcctttctttcctgggactggtggctggggccctggcactggggctctggtaagtgactgccattggtccctcagcctctgatcctcacacatgctctgatgcccatagaccacattcatctccacccttcatgactgcccgctgaacctgtctgattctggaactacctccccatacctccatcccccatgccccacttgattttaactgattcctctcctgaccctttactaataaaccctttggcggagactgagataacccaca

SEQ ID NO: 54714 - DNA, 1700 bp, Artificial Sequence
  derived and/or modified sequence
gagggcgagggcagagggcgctggcggcagcggccgcggaagatgagcagcagctgctcagggctgagcagggtcctggtggccgtggctacagccctggtgtctgcctcctccccctgcccccaggcctggggccccccaggggtccagtatgggcagccaggcaggtccgtgaagctgtgttgtcctggagtgactgccggggacccagtgtcctggtttcgggatggggagccaaagctgctccagggacctgactctgggctagggcatgaactggtcctggcccaggcagacagcactgatgagggcacctacatctgccagaccctggatggtgcacttgggggcacagtgaccctgcagctgggctaccctccagcccgccctgttgtctcctgccaagcagccgactatgagaacttctcttgcacttggagtcccagccagatcagcggtttacccacccgctacctcacctcctacaggaagaagacagtcctaggagctgatagccagaggaggagtccatccacagggccctggccatgcccacaggatcccctaggggctgcccgctgtgttgtccacggggctgagttctggagccagtaccggattaatgtgactgaggtgaacccactgggtgccagcacacgcctgctggatgtgagcttgcagagcatcttgcgccctgacccaccccagggcctgcgggtagagtcagtaccaggttacccccgacgcctgcgagccagctggacataccctgcctcctggccgtgccagccccacttcctgctcaagttccgtttgcagtaccgtccggcgcagcatccagcctggtccacggtggagccagctggactggaggaggtgatcacagatgctgtggctgggctgccccatgctgtacgagtcagtgcccgggactttctagatgctggcacctggagcacctggagcccggaggcctggggaactccgagcactgggaccataccaaaggagataccagcatggggccagctacacacgcagccagaggtggagcctcaggtggacagccctgctcctccaaggccctccctccaaccacaccctcggctacttgatcacagggactctgtggagcaggtagctgtgctggcgtctttgggaatcctttctttcctgggactggtggctggggccctggcactggggctctggctgaggctgagacggggtgggaaggatggatccccaaagcctgggttcttggcctcagtgattccagtggacaggcgtccaggagctccaaacctgtagaggacccaggagggcttcggcagattccacctataattctgtcttgctggtgtggatagaaaccaggcaggacagtagatccctatggttggatctcagctggaagttctgtttggagcccatttctgtgagaccctgtatttcaaatttgcagctgaaaggtgcttgtacctctgatttcaccccagagttggagttctgctcaaggaacgtgtgtaatgtgtacatctgtgtccatgtgtgaccatgtgtctgtgaggcagggaacatgtattctctgcatgcatgtatgtaggtgcctggggagtgtgtgtgggtccttggctcttggcctttccccttgcaggggttgtgcaggtgtgaataaagagaataaggaagttcttgga

SEQ ID NO: 54715 - DNA, 3008 bp, Artificial Sequence
  derived and/or modified sequence
atctaccccaaatttctgaacaaaattaatattcagtattatatctagcctatagattctcttactcttggtgtaatgacagcattcccagtttaggaaactgttttaaaatcttgtgtcttggttgtggctgaggctttgggaaggccagagccccctttgccaccacccctagggtgtcagctccaagcctgggcctgagggtttgatggggagcgggtgagctggatcctgatcccagtggtcagtggccagatcctgggctgctggccagaaccctggctttgtgagtggctgcagcttggctctgctccagcccacaggggctaaaggggcgggtagggagtgtgtagggagcgtgtacgtggctttgtgtccttggctcctccagactctcacatgtgcgggcaccatatacttctgctgcccttgtgccccaatcattgcacaaacagaaacagctctgacagagaagggactgctagagttaggaaccctagggcctggaaggaaggtatggctctcagagtgacctggggtctattcagtcccctctggacctgtttccctggcaacgctgtgggaacaacagtctatgcaacacaggagacctgatgccactggtgtcctccaaattttaaggcgaaggcaggcattgtgaatgatgcagggatggccagaatggtttttgccttcgttctttccccaggggaaccaagcctgtgggtggggaaatcacactaaggctggacagtgactgaatctggcccaggagaaacttggctgcctgccttccagaccagggtttttcttccctgagatcctggaggggaagtacctggaacttgggagtgttgccctggtctggaagatctgatagacatagtatgcacacatttccctcgagcttcccatgactggggagtagatgagaaccctgagtgggtggctggtttcttgaggcatacatatacccgacacaccttacacctctgatttggctgcattttggaatcatctgggaagttttaaacaatactggtgcctaggtccaacctccagagactctgatttaattggtatggggtggggttttgcagttttcaaaccacaatatccagcaaagtttgagaaccactgccctacacagccctccttcttctttatcttatctggagtcaggggcaccttcagcttctccaatcacctggccagtggctcttgtttccagtcctgctgttccagggtggataggccttcaggcggagacccaggaatccagctccagactctgtcccaagcagcctcttcagtccgggacgggacaggaagtgtccggcggaggtgggggtggagatgagcagcagctgctcagggctgagcagggtcctggtggccgtggctacagccctggtgtctgcctcctccccctgcccccaggcctggggccccccaggggtccagtatgggcagccaggcaggtccgtgaagctgtgttgtcctggagtgactgccggggacccagtgtcctggtttcgggatggggagccaaagctgctccagggacctgactctgggctagggcatgaactggtcctggcccaggcagacagcactgatgagggcacctacatctgccagaccctggatggtgcacttgggggcacagtgaccctgcagctgggctaccctccagcccgccctgttgtctcctgccaagcagccgactatgagaacttctcttgcacttggagtcccagccagatcagcggtttacccacccgctacctcacctcctacaggaagaagacagtcctaggagctgatagccagaggaggagtccatccacagggccctggccatgcccacaggatcccctaggggctgcccgctgtgttgtccacggggctgagttctggagccagtaccggattaatgtgactgaggtgaacccactgggtgccagcacacgcctgctggatgtgagcttgcagagcatcttgcgccctgacccaccccagggcctgcgggtagagtcagtaccaggttacccccgacgcctgcgagccagctggacataccctgcctcctggccgtgccagccccacttcctgctcaagttccgtttgcagtaccgtccggcgcagcatccagcctggtccacggtggagccagctggactggaggaggtgatcacagatgctgtggctgggctgccccatgctgtacgagtcagtgcccgggactttctagatgctggcacctggagcacctggagcccggaggcctggggaactccgagcactgggaccataccaaaggagataccagcatggggccagctacacacgcagccagaggtggagcctcaggtggacagccctgctcctccaaggccctccctccaaccacaccctcggctacttgatcacagggactctgtggagcaggtagctgtgctggcgtctttgggaatcctttctttcctgggactggtggctggggccctggcactggggctctggctgaggctgagacggggtgggaaggatggatccccaaagcctgggttcttggcctcagtgattccagtggacaggcgtccaggagctccaaacctgtagaggacccaggagggcttcggcagattccacctataattctgtcttgctggtgtggatagaaaccaggcaggacagtagatccctatggttggatctcagctggaagttctgtttggagcccatttctgtgagaccctgtatttcaaatttgcagctgaaaggtgcttgtacctctgatttcaccccagagttggagttctgctcaaggaacgtgtgtaatgtgtacatctgtgtccatgtgtgaccatgtgtctgtgaggcagggaacatgtattctctgcatgcatgtatgtaggtgcctggggagtgtgtgtgggtccttggctcttggcctttccccttgcaggggttgtgcaggtgtgaataaagagaataaggaagtt

SEQ ID NO: 54716 - DNA, 944 bp, Artificial Sequence
  derived and/or modified sequence
gtgatttctaacagccttaccccacttggtgcatcaatttttctcctaggaagcctcagttttggagaggaagagccaggctttagcctcccatctcaggggtcggggatttttgactctacctctccccacagatgagcagcagctgctcagggctgagcagggtcctggtggccgtggctacagccctggtgtctgcctcctccccctgcccccaggcctggggccccccaggggtccagtatgggcagccaggcaggtccgtgaagctgtgttgtcctggagtgactgccggggacccagtgtcctggtttcgggatggggagccaaagctgctccagggacctgactctgggctagggcatgaactggtcctggcccaggcagacagcactgatgagggcacctacatctgccagaccctggatggtgcacttgggggcacagtgaccctgcagctgggctaccctccagcccgccctgttgtctcctgccaagcagccgactatgagaacttctcttgcacttggagtcccagccagatcagcggtttacccacccgctacctcacctcctacaggaagaagacagtcctaggagctgatagccagaggaggagtccatccacagggccctggccatgcccacaggatcccctaggggctgcccgctgtgttgtccacggggctgagttctggagccagtaccggattaatgtgactgaggtgaacccactgggtgccagcacacgcctgctggatgtgagcttgcagagcatcttgcgccctgacccaccccagggcctgcgggtagagtcagtaccaggttacccccgacgcctgcgagccagctggacataccctgcctcctggccgtgccagccccacttcctgctcaagttccgtttgcagtaccgtccggcgcagcatccagcctggtccacg

SEQ ID NO: 54717 - DNA, 537 bp, Artificial Sequence
  derived and/or modified sequence
aaagcactgggtatacagtgggaaaggggacctcagatgagcagcagctgctcagggctgagcagggtcctggtggccgtggctacagccctggtgtctgcctcctccccctgcccccaggcctggggccccccaggggtccagtatgggcagccaggcaggtccgtgaagctgtgttgtcctggagtgactgccggggacccagtgtcctggtttcgggatggggagccaaagctgctccagggacctgactctgggctagggcatgaactggtcctggcccaggcagacagcactgatgagggcacctacatctgccagaccctggatggtgcacttgggggcacagtgaccctgcagctgggctaccctccagcccgccctgttgtctcctgccaagcagccgactatgagaacttctcttgcacttggagtcccagccagatcagcggtttacccacccgctacctcacctcctacaggaagaagacagtcctaggagctgatagccagaggaggagtccatccacagggccc

SEQ ID NO: 54718 - DNA, 575 bp, Artificial Sequence
  derived and/or modified sequence
agagggggcggggcagggaaggggaaggaggggatggctctggggtcccagaactgagtggagtaggagacgggggctgtagctggtgagaggaagtcctagaggctatggacactctgctgctgggatcaccgaggtagggtggggctaagcaggatgagcagcagctgctcagggctgagcagggtcctggtggccgtggctacagccctggtgtctgcctcctccccctgcccccaggcctggggccccccaggggtccagtatgggcagccaggcaggtccgtgaagctgtgttgtcctggagtgactgccggggacccagtgtcctggtttcgggatggggagccaaagctgctccagggacctgactctgggctagggcatgaactggtcctggcccaggcagacagcactgatgagggcacctacatctgccagaccctggatggtgcacttgggggcacagtgaccctgcagctgggctaccctccagcccgccctgttgtctcctgccaagcagccgactatgagaacttctcttgcacttggagtcccagccagatcagcggttt

SEQ ID NO: 54719 - DNA, 1269 bp, Artificial Sequence
  derived and/or modified sequence
atgagcagcagctgcagcggcctgagccgggtgctggtggccgtggccacagccctggtgtctgccagcagcccctgcccccaggcctggggccccccaggagtgcagtatggccagcccggccgctctgtgaagctgtgctgccctggggtgacagctggggaccctgtgtcctggttcagagatggagagcccaagctgctgcagggcccagattctggcctgggccacgagctggtgctggcccaggccgacagcacagatgagggcacctacatctgccagaccctggatggagccctgggcggcaccgtgaccctgcagctgggctaccccccagcccggcctgtggtgtcctgccaggccgctgactatgagaacttcagctgcacctggagccccagccagatcagcggcctgcccacccgctacctgaccagctacaggaagaagacagtgctgggcgctgacagccagaggaggagccccagcacaggcccctggccctgcccccaggaccccctgggcgccgcccgctgtgtggtgcatggagctgagttctggagccagtaccgcatcaacgtgacagaggtgaaccccctgggcgccagcacccggctgctggatgtgtccctgcagagcatcctgcggccagaccccccccagggcctgcgggtggagagcgtgcccggctacccccggcggctgcgggcctcctggacctacccagcctcctggccctgccagccccacttcctgctgaagttccggctgcagtacagacctgcccagcacccagcctggagcacagtggagcccgccggcctggaggaggtgatcacagatgctgtggccggcctgccccatgctgtgcgggtgtctgcccgggacttcctggatgctggcacctggagcacctggagccctgaggcctggggcacccccagcacaggcaccatccccaaggagatcccagcctggggccagctgcacacccagcctgaggtggagccccaggtggacagccctgccccaccccggcccagcctgcagccccacccccggctgctggaccaccgggacagcgtggagcaggtggccgtgctggccagcctgggcatcctgtccttcctgggcctggtggccggggccctggccctgggcctgtggctgcggctgcggcggggcggcaaggatggcagccccaagccaggcttcctggccagcgtcatccctgtggacagaagacctggggcccccaacctgtag

SEQ ID NO: 54720 - DNA, 1173 bp, Artificial Sequence
  derived and/or modified sequence
atgagcagcagctgcagcggcctgagccgggtgctggtggccgtggccacagccctggtgtctgccagcagcccctgcccccaggcctggggccccccaggagtgcagtatggccagcccggccgctctgtgaagctgtgctgccctggggtgacagctggggaccctgtgtcctggttcagagatggagagcccaagctgctgcagggcccagattctggcctgggccacgagctggtgctggcccaggccgacagcacagatgagggcacctacatctgccagaccctggatggagccctgggcggcaccgtgaccctgcagctgggctaccccccagcccggcctgtggtgtcctgccaggccgctgactatgagaacttcagctgcacctggagccccagccagatcagcggcctgcccacccgctacctgaccagctacaggaagaagacagtgctgggcgctgacagccagaggaggagccccagcacaggcccctggccctgcccccaggaccccctgggcgccgcccgctgtgtggtgcatggagctgagttctggagccagtaccgcatcaacgtgacagaggtgaaccccctgggcgccagcacccggctgctggatgtgtccctgcagagcatcctgcggccagaccccccccagggcctgcgggtggagagcgtgcccggctacccccggcggctgcgggcctcctggacctacccagcctcctggccctgccagccccacttcctgctgaagttccggctgcagtacagacctgcccagcacccagcctggagcacagtggagcccgccggcctggaggaggtgatcacagatgctgtggccggcctgccccatgctgtgcgggtgtctgcccgggacttcctggatgctggcacctggagcacctggagccctgaggcctggggcacccccagcacaggcaccatccccaaggagatcccagcctggggccagctgcacacccagcctgaggtggagccccaggtggacagccctgccccaccccggcccagcctgcagccccacccccggctgctggaccaccgggacagcgtggagcaggtggccgtgctggccagcctgggcatcctgtccttcctgggcctggtggccggggccctggccctgggcctgtggtag

SEQ ID NO: 54721 - DNA, 813 bp, Artificial Sequence
  derived and/or modified sequence
atgagcagcagctgcagcggcctgagccgggtgctggtggccgtggccacagccctggtgtctgccagcagcccctgcccccaggcctggggccccccaggagtgcagtatggccagcccggccgctctgtgaagctgtgctgccctggggtgacagctggggaccctgtgtcctggttcagagatggagagcccaagctgctgcagggcccagattctggcctgggccacgagctggtgctggcccaggccgacagcacagatgagggcacctacatctgccagaccctggatggagccctgggcggcaccgtgaccctgcagctgggctaccccccagcccggcctgtggtgtcctgccaggccgctgactatgagaacttcagctgcacctggagccccagccagatcagcggcctgcccacccgctacctgaccagctacaggaagaagacagtgctgggcgctgacagccagaggaggagccccagcacaggcccctggccctgcccccaggaccccctgggcgccgcccgctgtgtggtgcatggagctgagttctggagccagtaccgcatcaacgtgacagaggtgaaccccctgggcgccagcacccggctgctggatgtgtccctgcagagcatcctgcggccagaccccccccagggcctgcgggtggagagcgtgcccggctacccccggcggctgcgggcctcctggacctacccagcctcctggccctgccagccccacttcctgctgaagttccggctgcagtacagacctgcccagcacccagcctggagcacctag

SEQ ID NO: 54722 - DNA, 504 bp, Artificial Sequence
  derived and/or modified sequence
atgagcagcagctgcagcggcctgagccgggtgctggtggccgtggccacagccctggtgtctgccagcagcccctgcccccaggcctggggccccccaggagtgcagtatggccagcccggccgctctgtgaagctgtgctgccctggggtgacagctggggaccctgtgtcctggttcagagatggagagcccaagctgctgcagggcccagattctggcctgggccacgagctggtgctggcccaggccgacagcacagatgagggcacctacatctgccagaccctggatggagccctgggcggcaccgtgaccctgcagctgggctaccccccagcccggcctgtggtgtcctgccaggccgctgactatgagaacttcagctgcacctggagccccagccagatcagcggcctgcccacccgctacctgaccagctacaggaagaagacagtgctgggcgctgacagccagaggaggagccccagcacaggcccctag

SEQ ID NO: 54723 - DNA, 420 bp, Artificial Sequence
  derived and/or modified sequence
atgagcagcagctgcagcggcctgagccgggtgctggtggccgtggccacagccctggtgtctgccagcagcccctgcccccaggcctggggccccccaggagtgcagtatggccagcccggccgctctgtgaagctgtgctgccctggggtgacagctggggaccctgtgtcctggttcagagatggagagcccaagctgctgcagggcccagattctggcctgggccacgagctggtgctggcccaggccgacagcacagatgagggcacctacatctgccagaccctggatggagccctgggcggcaccgtgaccctgcagctgggctaccccccagcccggcctgtggtgtcctgccaggccgctgactatgagaacttcagctgcacctggagccccagccagatcagcggctag

SEQ ID NO: 54724 - DNA, 1269 bp, Artificial Sequence
  derived and/or modified sequence
atgagcagcagctgcagcggcctgagccgggtgctggtggccgtggctactgctcttgtaagcgcaagcagtccatgtccccaggcctggggcccgccaggagtccagtatggacaaccgggtcggagtgtcaagctgtgctgccctggagtcactgccggagaccctgtcagctggttccgagacggggagcccaaactactacaggggcctgattccggcctgggccatgaactcgtccttgctcaggccgattctactgacgaaggaacctatatatgtcaaaccttagacggagcccttggtggcactgtgacactgcagttgggatacccaccagcacggccagtcgtgagttgccaggccgccgattacgaaaacttttcttgcacttggagtccaagtcagatttctggcctgcccacacggtaccttacatcgtatagaaagaaaaccgtcttgggggcagatagccagaggcggtctccttccacaggcccgtggccgtgtccgcaggacccccttggcgcagctagatgcgtcgtgcacggagctgagttctggtcacaatacaggattaacgtcactgaggttaatcctctgggtgcctcaacacgactgctggacgtgtccctgcaaagcatcctgagacccgaccctccgcagggacttcgcgtggagtcggttccgggataccccaggagactgagagcaagttggacttatcctgccagctggccgtgccagccacattttttattgaagtttaggctgcaatatcgtccagctcagcatccagcatggtccaccgtggagcctgcaggcctagaggaggttataacagatgctgttgctggcctgccacatgctgtccgcgtgagcgcaagggactttcttgatgcggggacctggtctacctggagtccagaagcatggggcactccctcaaccggaacgattcccaaagaaatccctgcatggggccagctgcacacacaacctgaagtggagccccaggtagattcccctgcacctcccagaccatccctacagccgcacccgagactgctggaccatcgggatagcgtggaacaggtggcagtgctcgcctctctcggcatactcagcttcctgggtctggttgcgggcgctttggccctgggtctgtggctgaggctccgcagagggggcaaagacggttcaccaaagccaggtttcttggcctccgtaatccctgttgatcggaggcccggggcaccaaatctctag

SEQ ID NO: 54725 - DNA, 1173 bp, Artificial Sequence
  derived and/or modified sequence
atgagcagcagctgcagcggcctgagccgggtgctggtggccgtggcgactgccctagtttctgcatcctccccatgcccccaagcctggggacctcctggagtgcagtacggccagcccgggcgctccgtgaaactgtgctgcccgggggtaacagctggggacccagtctcatggttccgagacggggaaccgaagctgctgcagggccctgattcagggctcgggcatgaattggtgctggctcaggctgatagcacagatgagggaacctacatctgccaaacactggacggcgccctcggcggcacggtcaccctgcagctgggctacccacccgcccgacccgtggtctcctgtcaggcagctgactacgaaaacttttcttgcacgtggagcccctctcaaatctccggtctgccaactcggtacctgacctcttacagaaaaaagactgtcttaggcgccgacagccagcgaagaagcccctccacgggaccctggccttgcccgcaggatccattgggcgcggctcgttgtgtcgtgcacggcgccgaattctggtcacagtaccgaatcaatgtgacagaggtgaacccactgggagcatccaccaggcttcttgacgtgagtctgcagagtatattgcgccctgaccctccgcagggcttaagagtggagtccgtgcccggctatccgcgcagacttcgcgccagttggacctatcctgcttcctggccctgtcaacctcatttcctcttgaaattcaggcttcagtatagacccgctcagcaccccgcttggagtaccgtggaaccggctggcctggaagaggtgatcacagacgccgtggcgggtctgccccatgccgtccgtgtgtccgccagagatttcctggacgccggtacctggtcgacttggtcgcctgaggcctggggaacccctagtactggcactatcccaaaggaaatcccggcttggggacagctgcatacccaaccagaggtggaacctcaggtggattcacctgctcccccccggccttccttacagccccatccacgccttctggaccaccgagattctgttgaacaagtcgccgtgctggcctcacttggtattctgtcctttctgggactggtggcgggcgctctggccttagggctctggtag

SEQ ID NO: 54726 - DNA, 1269 bp, Artificial Sequence
  derived and/or modified sequence
atgagcagcagctgcagcggcctgagccgggtgctggtggccgtggcaaccgctcttgtgtctgcttccagtccttgcccccaggcgtggggccccccaggtgtgcagtacgggcagcctggccggagcgtcaagctgtgttgtcctggagttacagccggggatcctgtctcctggttcagggacggcgagcctaagcttctccaaggaccagactctgggttaggacacgagctggtcctggcccaagccgattcaacagatgagggaacctatatctgtcagaccctggatggcgctctgggcggtaccgtgacactgcagctgggctatccacccgcacggccagtggttagctgccaagccgcagattatgaaaacttttcttgtacctggagtccctcacagatatcgggtctgcccacacgctacttaactagctatcgaaaaaagactgtgctaggcgccgactcacagcggagatctccctctaccggaccatggccctgcccacaagaccctctgggggcggcaagatgtgttgtgcatggcgcagaattttggagccagtacagaattaacgttactgaagtaaatcccctgggtgcgagcacccgcctccttgacgtttccctgcaaagcatactccggccagacccaccccagggcctacgggttgaatctgttccagggtaccctagacgcctgcgcgctagttggacttaccccgcaagttggccttgtcagcctcactttctcctgaagttccgcctgcaataccgacctgcgcagcatcctgcctggtctaccgttgaacctgctggcctcgaagaggtgatcacagatgccgtcgcgggcctcccgcatgccgtcagggtctctgcgagagatttcctggatgctggtacttggtcaacttggtctcccgaggcgtggggaactccaagcactggcaccattcccaaggaaatccccgcatggggtcagctacacactcagcccgaggttgagccccaggttgattcccccgccccaccacgaccaagtttgcaaccacacccccgtcttcttgaccatcgcgacagcgtcgagcaggtagctgtgcttgcgagccttgggattctatcctttcttgggctcgtggcaggagccctggccctgggcctttggctacgccttcgaaggggtggaaaggacggaagtcctaagccaggcttcttagcaagcgtcataccagtggacaggaggcctggcgctcccaatctctag

SEQ ID NO: 54727 - DNA, 1269 bp, Artificial Sequence
  derived and/or modified sequence
atgagcagcagctgcagcggcctgagccgggtgctggtggccgtggcaactgctttagtttcggcctcttctccctgccctcaggcttggggaccgccaggagtgcaatacggtcagcctgggaggtcagtcaaactgtgctgcccaggtgtgacagccggcgatcccgtctcgtggtttcgcgatggggagcctaaactccttcagggacctgactctggcctagggcatgagctggtgcttgcccaggcagatagcacagatgagggcacttacatttgtcagactctcgacggcgcccttggcggcactgtgactctgcagctagggtacccaccagcaagacctgtagtctcttgccaggctgcagactacgagaatttcagttgcacttggtctcccagtcaaatttcggggctgcccacacgttacctaacttcctatagaaaaaagaccgtgctcggggcggattcacagagaagatctccctccaccggtccctggccttgtccgcaagatccgttgggtgccgctcgctgcgtagtgcacggcgccgaattctggagtcagtataggatcaacgtgactgaagtaaaccctttaggtgcatctacacgcttgctcgacgtgtcacttcaatctattctgcggcccgaccccccgcagggcttacgtgtggagtctgtccccggataccccaggcggctcagggcttcatggacctatcccgcaagctggccatgccaaccccatttcctccttaaattcaggctgcaatatcgccccgcgcagcaccctgcatggtccaccgtggaaccagccggtctcgaagaagtcattactgatgcggtggctggtcttccccacgccgtcagagtttccgctcgcgactttctggatgcaggtacatggagtacctggtcaccagaggcttggggaacaccaagcactggtacaatacccaaagaaattcctgcttggggccagctacacacacagcccgaggtggagccacaggtcgattccccagcacccccacgtccttcactccaaccacacccccgcctactggaccacagagattccgtggagcaggtagccgtactggcttccctggggattctgtcattcctcgggttggtagcaggggctctggcactgggcctgtggctcagattgaggcgaggaggcaaagacggatccccaaaaccgggatttttagcatctgtgattccagtcgatcggagacctggcgccccaaacttgtag

SEQ ID NO: 54728 - DNA, 813 bp, Artificial Sequence
  derived and/or modified sequence
atgagcagcagctgcagcggcctgagccgggtgctggtggccgtggccaccgccctggtcagcgcatcttccccctgtccacaggcatgggggcctcctggtgtgcaatacggacaacccgggaggagcgttaaattgtgctgcccaggagttaccgcaggggaccctgtgtcctggttccgagatggcgagcctaaacttctccaaggccctgacagtggcctcgggcacgaactagtactcgcgcaggcagatagcaccgatgaagggacttatatctgtcagacgttggacggtgctctgggggggacagtgacattgcagttaggctatcctccagcccgccccgtcgtcagttgtcaggcagcagattacgaaaatttctcttgcacttggagtccttcccagatcagcggactacccacccggtatttaacctcttacaggaagaagaccgtgcttggtgccgactcccaaagacggtcgcctagcacagggccctggccctgcccacaggatcctctgggtgccgcccgttgtgtggtgcacggggccgagttttggtctcagtacaggatcaatgtgactgaggtgaaccccctgggcgctagcacccggctcttggatgtgtccctgcagtccatactcaggccagatccgccccaggggcttcgggtagagagtgtacccggatatccacgcagacttagggcttcctggacctaccccgcctcatggccttgccagcctcattttttactcaagtttcgcctacagtatcgccctgcacagcaccctgcgtggagcacctag

SEQ ID NO: 54729 - DNA, 504 bp, Artificial Sequence
  derived and/or modified sequence
atgagcagcagctgcagcggcctgagccgggtgctggtggccgtggctacagcactcgtgtccgccagctctccatgtccccaggcttggggcccgcccggggtgcagtacggacagcctggtaggagcgtcaaattatgctgccctggggtgactgccggagatcccgtttcctggttccgcgacggtgagcctaagttactgcaggggcccgatagtggactgggacacgagctcgtactggcccaagctgactctacagatgaaggaacatacatctgccagactctggacggcgcgcttggcgggactgtgacactgcagctgggatacccccctgcccgcccagtcgtttcctgtcaagccgccgattacgagaatttttcatgtacctggagcccgtcgcagatcagcggcttacccacacggtacctcacctcttaccgtaaaaaaacggtgctgggtgcagacagccagagaaggagtccgagtaccgggccttag

SEQ ID NO: 54730 - DNA, 420 bp, Artificial Sequence
  derived and/or modified sequence
atgagcagcagctgcagcggcctgagccgggtgctggtggccgtggcaaccgcactggtgtccgctagcagcccatgccctcaggcctggggcccgcctggggtgcagtacggtcagcccgggaggtccgtgaaactatgttgtcccggagtgacggcaggcgaccccgtgagctggtttcgcgacggggaacccaaactcttacagggcccggacagcggcctcggtcacgagctcgtgctggctcaagccgactcaactgacgagggaacctacatctgccagactctggatggtgcccttggcggtaccgtgacattgcagcttgggtaccctccagctcgacctgtggtgtcatgccaggctgccgactacgagaacttcagctgtacttggtcaccctcccagatctctggctag

SEQ ID NO: 54731 - DNA, 1269 bp, Artificial Sequence
  derived and/or modified sequence
atgagctcttcatgcagtgggctgagcagagtgctggtggcagtggctaccgctctcgtgtccgcgagtagcccgtgcccccaggcctggggcccaccgggagttcaatacggacaacccggaaggagtgtcaaattatgctgtccaggagtgaccgctggggaccccgtgagctggtttagagatggcgaacctaagctcctgcagggtccagactctggtctgggccacgaactggtcctcgcacaagcagactcgaccgatgaaggcacttacatctgtcaaacactggatggcgcactgggcggaacagtcacgctgcagctgggatatccgcctgctcgacctgtcgtttcctgtcaggccgctgactatgagaacttctcgtgcacctggtccccttcccaaatctccggcctgccaacacgatatctgacttcatatagaaaaaagaccgtgttgggggcagactcccaacggagatctccctccaccggcccttggccatgtccgcaggacccccttggcgcagccaggtgcgtcgtgcatggagcggagttttggtctcaataccgcattaatgtgacggaagtcaatccactaggagccagcaccaggctgctcgacgtcagcttgcagtctatactgcggcctgaccccccacaggggctgcgcgtggagtctgtgccaggatatccccgacgcctccgcgcatcatggacgtacccggcatcctggccctgtcagcctcattttcttctgaagttcaggctgcagtataggcctgctcagcatccggcatggtcaaccgtcgagcctgccggtcttgaagaggtgattactgatgccgttgccggactaccgcatgccgtcagagtcagcgccagagactttctggacgcaggaacctggtctacctggtctcctgaggcatggggaacgcccagtacaggcaccattccaaaagagattcccgcttggggccagttacatacgcagcctgaagtcgaacctcaggtagacagtccagcaccacctagaccgagcctccagccacacccaagactactggatcatagagactcggtggaacaggtcgctgttctggcttcgcttggcatactgagctttttgggacttgtggccggagccttggctctgggactctggcttaggttacgacgcggtggcaaagatggttcacccaagccaggatttctagcatcagttattcctgtcgacaggcgcccaggcgctccaaacctgtag

SEQ ID NO: 54732 - DNA, 1173 bp, Artificial Sequence
  derived and/or modified sequence
atgtcttctagctgcagcgggttaagtagagtgctcgtcgccgtcgccaccgccttggtgagtgccagctcaccctgtccccaagcatggggacccccaggcgtgcagtatggacaacccggtaggtctgtcaaactgtgctgtccaggtgtgacggccggtgatccggtgtcctggttcagggacggcgagccgaagctcttgcaggggccagatagcggcctgggacacgagctagtgctggcccaagcagattctactgacgaaggtacgtacatttgtcaaaccctcgatggagcgctagggggaacagtgacccttcagctgggctatcccccagctcggccagttgtatcttgtcaagctgccgattacgagaacttttcatgcacctggtcgccatcccaaatctctggcctgcctacgcgctacctcacaagctaccggaagaagacagtgctgggggcagactcccagcgaagaagcccctccacaggcccttggccttgtccacaggaccctctgggagctgcaagatgtgtagtacacggtgctgaattctggtcacagtacagaataaacgttactgaggtgaaccccctcggggcaagcacacgcctgctcgatgtctccttacagtccatcctgcggccagacccgccacaggggctcagggttgagtccgtgcctgggtaccccagacgtctccgcgcttcttggacgtatccggctagctggccttgccagccacactttcttctgaaattccggcttcagtatcggcctgcacagcacccagcctggtctacggttgagcccgctggactggaagaggtcatcaccgatgctgtggccggtcttccacacgccgttagagtttctgctcgcgatttcctggatgccggtacttggtctacgtggagccctgaagcctggggcacgccttcaacagggacaataccaaaggagattcctgcctggggccagctccacacgcagcccgaggtggagccacaggtagatagccccgcaccaccgagaccgtcgctccaaccccacccacggttactcgatcaccgcgatagtgtggagcaagtggcagtgctcgcctcactaggcatcctgtctttcctagggttagtagctggggctctagctttaggactgtggtag

SEQ ID NO: 54733 - DNA, 1269 bp, Artificial Sequence
  derived and/or modified sequence
atgtctagtagttgctccggcttgtctagggtgctggtcgcagtcgcaaccgcgctggtgtctgcatctagcccttgtcctcaggcctggggaccaccgggagtgcagtatgggcagccaggccgtagcgtgaaactttgttgtccgggagttaccgccggagaccctgtctcctggttcagagacggcgagcctaagctccttcagggacccgacagcgggcttggacacgagctggtcctcgcgcaggctgactcgactgacgaaggcacctatatctgccaaaccttggatggcgctttgggcggtaccgtcacgttacagttgggttatccccctgccaggcctgttgtgtcttgccaggcggctgactatgagaatttcagctgcacatggtccccctcacagatctctggtctacccactagatacctcaccagttatagaaagaagaccgttctcggggcagacagtcagagaagaagcccttcaacggggccttggccatgccctcaggaccccctcggtgccgctcggtgtgtggtccatggcgcagaattttggtcccagtaccggatcaacgtgaccgaggttaacccccttggagcctcgaccagacttctggacgttagcttacaatccatcttaagaccagacccgccacagggtctgcgcgtggagagcgtgccgggatatcccaggaggctgcgagcatcgtggacgtatccagcatcttggccatgccagccacacttcctcctgaaattccggctgcagtacaggcccgcacagcaccccgcttggagtacagtcgaacctgcaggcctggaagaagtcattaccgatgcagtggccggtctcccccatgcagtgcgtgtgtcagccagagatttcctagatgccggtacatggtcaacttggtccccagaggcgtggggcacacccagcacaggaactataccgaaggaaattcccgcatggggccagcttcacacccagcctgaggtagaaccccaggtggatagccctgcaccccctaggccttccctacagccccatccaaggttgctggatcatagggattctgttgaacaggtcgcggttctggcgagcttaggcatcttaagcttccttggcctagtcgctggcgcattggcccttgggctgtggttgaggctgagacgtggtggcaaagacggatctcccaaaccaggatttctggcatcagtgattccagtggatagacggcctggcgctccaaatctgtag

SEQ ID NO: 54734 - DNA, 1269 bp, Artificial Sequence
  derived and/or modified sequence
atgagcagcagctgctccgggctgtcgagggtcttggtcgctgtggccactgcgctggtttctgcgtctagcccatgtcctcaggcctggggcccaccaggagtgcagtacgggcagcctgggaggtccgtcaaactgtgttgtccaggagttactgctggggacccagtgtcatggttcagggacggagaaccaaagctattacaaggaccggacagcgggctgggacatgagctcgtccttgctcaagcagattccactgacgagggaacatatatctgccaaactctggacggggcactgggcggaactgttaccctgcagctggggtatccaccggctaggcccgttgtttcgtgtcaggctgctgattatgagaacttctcctgtacgtggtcaccatcccagatttcagggttgcctaccagatacttaacaagctacagaaagaaaacagtgcttggagctgatagtcagaggagaagcccctccacaggtccttggccatgtccacaggatcctcttggggctgctagatgcgttgtgcacggagccgaattttggtcacagtaccgcattaacgtaactgaggtgaacccattgggtgcttccactcgccttctcgacgtgtccctgcagagtattttaagacccgatccaccccagggtctgagagttgaatccgtaccaggctatcccagaaggctgagggccagctggacttaccccgcttcatggccatgccaaccccactttttgcttaagttcagactccagtaccggcctgcacagcaccctgcctggagcactgtggaacccgctggcctggaagaagtgatcacagatgcagttgcagggctgccccacgccgtccgggtgtccgcacgggattttctagatgcaggaacctggtccacctggtcccccgaggcatggggtacaccaagtactggaactattccaaaggagatccccgcttgggggcagttgcacacccaaccagaagtggaacctcaggtggattcgcccgctccacccaggccttctctccagcctcatcctcggttgctagaccatcgggatagtgttgaacaggtggccgtgctggcgtcattgggcatcttatccttcctgggcctcgtggccggtgccctggcgctaggcctgtggttacgcttaaggcgaggtggaaaagatggcagccccaagcctgggtttctggccagtgtgattcccgttgacaggcgccctggtgcacccaacctgtag

SEQ ID NO: 54735 - DNA, 813 bp, Artificial Sequence
  derived and/or modified sequence
atgtcttcttcctgtagcggacttagccgggttctggtggccgtggccacagcactggtctccgcttcatctccttgcccacaagcctgggggcctccaggcgtccagtatggtcagcctggacggtccgttaaattgtgttgccccggagtaaccgctggtgatccagtttcttggttccgggatggtgaaccaaagctgctgcagggacctgacagtggtctaggtcacgagctcgtcctggcccaggccgactcaaccgatgagggcacttacatctgtcagacgttggacggcgcactggggggaacagtcactctgcaactgggatacccccctgctaggcccgtagtaagttgtcaggccgctgactacgagaatttttcttgcacttggtctcctagccaaatctcaggtcttcccacaagatatctgactagctacagaaaaaaaacagtcctcggagctgacagtcaacgcaggtctccttccacagggccttggccatgtcctcaagatccgcttggtgcagctcggtgtgtagtccacggggcagaattctggtcacaatataggatcaatgtgacagaggtcaacccgctcggcgcttctaccaggctgctagatgtgtcacttcagagcattctgcgccctgatcctcctcaagggttaagggtagagtccgttccaggctatcctaggcggctgagagcttcctggacttaccccgcatcctggccatgtcaaccccactttctcctgaaattcaggctccaatacaggccagcccagcacccagcatggtcaacctag

SEQ ID NO: 54736 - DNA, 504 bp, Artificial Sequence
  derived and/or modified sequence
atgtccagctcatgctctggactgtctagggtcttggtcgccgtggcaaccgcgctggtgtccgcttctagtccatgcccccaagcttgggggccacccggtgtccaatacggccagccaggtcgctctgttaagctctgctgtcctggcgtgacagccggtgatcctgttagttggttcagagacggcgaacctaagctactgcaggggccagactcaggcttggggcatgagttggttttggcacaggcagacagcaccgacgaggggacctatatctgtcagaccttggacggagccctaggaggcacagtgacactgcagcttggctaccccccagcaagacctgtggtgtcgtgtcaggctgccgattacgagaatttttcatgtacctggagtccgtcccaaattagcggtcttcctacaaggtacctaacctcttacaggaagaagacggtgttgggcgcagactctcagagacgcagcccgtccaccggcccttag

SEQ ID NO: 54737 - DNA, 420 bp, Artificial Sequence
  derived and/or modified sequence
atgagttcctcctgtagcggactttcacgggtgttggtcgctgtggcaacggccctggtcagtgcaagtagcccttgccctcaagcttgggggccacctggagtgcaatacggccaaccagggcgaagcgtgaagttatgttgccctggcgtgacggccggagatccggtgtcttggttccgggacggcgagccaaagctcttgcagggaccagatagtggtctaggccacgagcttgtgcttgcccaggccgactccactgacgagggaacttacatctgccagaccttggatggcgcattgggaggaaccgtgactctccagctgggctatcctcccgctcgaccggtggtaagttgccaagcagcagactacgagaatttctcctgcacgtggagccctagccaaatatcagggtag

SEQ ID NO: 54738 - DNA, 1269 bp, Artificial Sequence
  derived and/or modified sequence
atgagcagcagctgcagcggcctgagcagagtgctggtggccgtggccaccgccctggtgagcgccagcagcccctgcccccaggcctggggcccccccggcgtgcagtacggccagcccggcagaagcgtgaagctgtgctgccccggcgtgaccgccggcgaccccgtgagctggttcagagacggcgagcccaagctgctgcagggccccgacagcggcctgggccacgagctggtgctggcccaggccgacagcaccgacgagggcacctacatctgccagaccctggacggcgccctgggcggcaccgtgaccctgcagctgggctacccccccgccagacccgtggtgagctgccaggccgccgactacgagaacttcagctgcacctggagccccagccagatcagcggcctgcccaccagatacctgaccagctacagaaagaagaccgtgctgggcgccgacagccagagaagaagccccagcaccggcccctggccctgcccccaggaccccctgggcgccgccagatgcgtggtgcacggcgccgagttctggagccagtacagaatcaacgtgaccgaggtgaaccccctgggcgccagcaccagactgctggacgtgagcctgcagagcatcctgagacccgaccccccccagggcctgagagtggagagcgtgcccggctaccccagaagactgagagccagctggacctaccccgccagctggccctgccagccccacttcctgctgaagttcagactgcagtacagacccgcccagcaccccgcctggagcaccgtggagcccgccggcctggaggaggtgatcaccgacgccgtggccggcctgccccacgccgtgagagtgagcgccagagacttcctggacgccggcacctggagcacctggagccccgaggcctggggcacccccagcaccggcaccatccccaaggagatccccgcctggggccagctgcacacccagcccgaggtggagccccaggtggacagccccgccccccccagacccagcctgcagccccaccccagactgctggaccacagagacagcgtggagcaggtggccgtgctggccagcctgggcatcctgagcttcctgggcctggtggccggcgccctggccctgggcctgtggctgagactgagaagaggcggcaaggacggcagccccaagcccggcttcctggccagcgtgatccccgtggacagaagacccggcgcccccaacctgtag

SEQ ID NO: 54739 - DNA, 1173 bp, Artificial Sequence
  derived and/or modified sequence
atgagcagcagctgcagcggcctgagcagagtgctggtggccgtggccaccgccctggtgagcgccagcagcccctgcccccaggcctggggcccccccggcgtgcagtacggccagcccggcagaagcgtgaagctgtgctgccccggcgtgaccgccggcgaccccgtgagctggttcagagacggcgagcccaagctgctgcagggccccgacagcggcctgggccacgagctggtgctggcccaggccgacagcaccgacgagggcacctacatctgccagaccctggacggcgccctgggcggcaccgtgaccctgcagctgggctacccccccgccagacccgtggtgagctgccaggccgccgactacgagaacttcagctgcacctggagccccagccagatcagcggcctgcccaccagatacctgaccagctacagaaagaagaccgtgctgggcgccgacagccagagaagaagccccagcaccggcccctggccctgcccccaggaccccctgggcgccgccagatgcgtggtgcacggcgccgagttctggagccagtacagaatcaacgtgaccgaggtgaaccccctgggcgccagcaccagactgctggacgtgagcctgcagagcatcctgagacccgaccccccccagggcctgagagtggagagcgtgcccggctaccccagaagactgagagccagctggacctaccccgccagctggccctgccagccccacttcctgctgaagttcagactgcagtacagacccgcccagcaccccgcctggagcaccgtggagcccgccggcctggaggaggtgatcaccgacgccgtggccggcctgccccacgccgtgagagtgagcgccagagacttcctggacgccggcacctggagcacctggagccccgaggcctggggcacccccagcaccggcaccatccccaaggagatccccgcctggggccagctgcacacccagcccgaggtggagccccaggtggacagccccgccccccccagacccagcctgcagccccaccccagactgctggaccacagagacagcgtggagcaggtggccgtgctggccagcctgggcatcctgagcttcctgggcctggtggccggcgccctggccctgggcctgtggtag

SEQ ID NO: 54740 - DNA, 813 bp, Artificial Sequence
  derived and/or modified sequence
atgagcagcagctgcagcggcctgagcagagtgctggtggccgtggccaccgccctggtgagcgccagcagcccctgcccccaggcctggggcccccccggcgtgcagtacggccagcccggcagaagcgtgaagctgtgctgccccggcgtgaccgccggcgaccccgtgagctggttcagagacggcgagcccaagctgctgcagggccccgacagcggcctgggccacgagctggtgctggcccaggccgacagcaccgacgagggcacctacatctgccagaccctggacggcgccctgggcggcaccgtgaccctgcagctgggctacccccccgccagacccgtggtgagctgccaggccgccgactacgagaacttcagctgcacctggagccccagccagatcagcggcctgcccaccagatacctgaccagctacagaaagaagaccgtgctgggcgccgacagccagagaagaagccccagcaccggcccctggccctgcccccaggaccccctgggcgccgccagatgcgtggtgcacggcgccgagttctggagccagtacagaatcaacgtgaccgaggtgaaccccctgggcgccagcaccagactgctggacgtgagcctgcagagcatcctgagacccgaccccccccagggcctgagagtggagagcgtgcccggctaccccagaagactgagagccagctggacctaccccgccagctggccctgccagccccacttcctgctgaagttcagactgcagtacagacccgcccagcaccccgcctggagcacctag

SEQ ID NO: 54741 - DNA, 504 bp, Artificial Sequence
  derived and/or modified sequence
atgagcagcagctgcagcggcctgagcagagtgctggtggccgtggccaccgccctggtgagcgccagcagcccctgcccccaggcctggggcccccccggcgtgcagtacggccagcccggcagaagcgtgaagctgtgctgccccggcgtgaccgccggcgaccccgtgagctggttcagagacggcgagcccaagctgctgcagggccccgacagcggcctgggccacgagctggtgctggcccaggccgacagcaccgacgagggcacctacatctgccagaccctggacggcgccctgggcggcaccgtgaccctgcagctgggctacccccccgccagacccgtggtgagctgccaggccgccgactacgagaacttcagctgcacctggagccccagccagatcagcggcctgcccaccagatacctgaccagctacagaaagaagaccgtgctgggcgccgacagccagagaagaagccccagcaccggcccctag

SEQ ID NO: 54742 - DNA, 420 bp, Artificial Sequence
  derived and/or modified sequence
atgagcagcagctgcagcggcctgagcagagtgctggtggccgtggccaccgccctggtgagcgccagcagcccctgcccccaggcctggggcccccccggcgtgcagtacggccagcccggcagaagcgtgaagctgtgctgccccggcgtgaccgccggcgaccccgtgagctggttcagagacggcgagcccaagctgctgcagggccccgacagcggcctgggccacgagctggtgctggcccaggccgacagcaccgacgagggcacctacatctgccagaccctggacggcgccctgggcggcaccgtgaccctgcagctgggctacccccccgccagacccgtggtgagctgccaggccgccgactacgagaacttcagctgcacctggagccccagccagatcagcggctag

SEQ ID NO: 54743 - protein, 415 aa, Artificial Sequence
  derived and/or modified sequence
MELRKYGPGRLAGTVIGGAAQSKSQTKSDSITKEFLPGLYTAPSSPFPPSQVSDHQVLNDAEVAALLENFSSSYDYGENESDSCCTSPPCPQDFSLNFDRAFLPALYSLLFLLGLLGNGAVAAVLLSRRTALSSTDTFLLHLAVADTLLVLTLPLWAVDAAVQWVFGSGLCKVAGALFNINFYAGALLLACISFDRYLNIVHATQLYRRGPPARVTLTCLAVWGLCLLFALPDFIFLSAHHDERLNATHCQYNFPQVGRTALRVLQLVAGFLLPLLVMAYCYAHILAVLLVSRGQRRLRAMRLVVVVVVAFALCWTPYHLVVLVDILMDLGALARNCGRESRVDVAKSVTSGLGYMHCCLNPLLYAFVGVKFRERMWMLLLRLGCPNQRGLQRQPSSSRRDSSWSETSEASYSGL

SEQ ID NO: 54744 - DNA, 1248 bp, Artificial Sequence
  derived and/or modified sequence
atggagctgcggaagtacggccctggcaggctggcaggtacagttattggaggagccgctcaaagcaagtctcagactaagtctgattcaatcaccaaggagtttcttcctggtctgtacactgcccccagctctccatttcctccgagccaggtcagtgaccaccaagtcctgaacgacgccgaagtcgctgccctgctggagaacttcagctcctcttacgattatggggaaaatgaatctgacagctgctgtacgagccccccgtgtccccaggacttttccctgaactttgaccgggcgtttttgcccgcgttatattctttgctttttttgttaggcctcttagggaatggcgcagtcgccgccgtgctgctttcgcggcggacggccctgagctcaactgataccttcctactgcacctcgccgtcgccgatacactgctcgttttgaccctgcccctctgggccgtagatgctgcagtgcagtgggtgtttgggtccggtctgtgcaaggtggctggagctctgtttaatatcaatttttacgctggggcacttcttctggcgtgcataagctttgatcggtacctgaatatcgtgcatgctacacagctctacaggcgtggccctccggcccgggttactctcacctgccttgcagtttgggggttgtgccttcttttcgccttgccagatttcattttcctgtcggcccatcacgacgaaaggctgaacgcgacccattgccagtacaacttccctcaggtaggccgaaccgccctccgcgttctgcagcttgttgccggttttctgttgcctctactggtaatggcgtactgttacgcccacatcctcgctgtgctcctggtttcacgcggtcagcgccggctgagggcgatgagattggtggtggtggtggtggttgcatttgccctctgctggacgccctaccacctggtggtgctggtagacatcctgatggacctgggcgcactggctcggaattgtggtcgcgagtcccgggtggacgttgccaagagtgttacatcagggcttgggtacatgcattgctgcctgaacccattactgtacgctttcgtcggcgtgaagttcagagaacgaatgtggatgttgctcttacgattaggatgccccaaccagagaggcctgcagcggcaaccgtcaagtagccggcgggacagcagttggtccgaaacatcagaggcctcatattctgggctgtag

SEQ ID NO: 54745 - DNA, 1248 bp, Artificial Sequence
  derived and/or modified sequence
atggagctgaggaaatatggccctggccgcctggccggcaccgtcatcggcggggccgcccagagcaagagccagaccaagagtgacagcatcaccaaggagttcctgcccggcctgtacacagcccccagcagccccttcccccccagccaggtgtctgaccaccaggtgctgaatgatgctgaggtggccgccctgctggagaacttcagcagcagctatgactatggagaaaatgaaagtgacagctgctgcaccagccccccctgcccccaggacttcagcctgaactttgaccgggccttcctgcctgccctgtacagcctgctcttcctgctgggcctgctgggcaatggagctgtggccgctgtgctgctgagcagaagaacagccctgagcagcacagacaccttcctgctgcacctggccgtggccgacaccctgctggtgctgaccctgcccctgtgggccgtggatgctgctgtgcagtgggtgtttggcagcggcctgtgcaaggtggccggggccctcttcaacatcaacttctacgccggggccctgctgctggcctgcatcagctttgaccgctacctgaacatcgtgcacgccacccagctgtaccgccggggccccccagcccgggtgaccctgacctgcctggccgtgtggggcctgtgcctgctgtttgccctgcctgacttcatcttcctgagcgcccaccatgatgagcggctgaatgccacccactgccagtacaacttcccccaggtgggccgcacagccctgcgggtgctgcagctggtggccggcttcctgctgcccctgctggtgatggcctactgctacgcccacatcctggccgtgctgctggtgtcccggggccagaggcggctgcgggccatgaggctggtggtggtggtggtggtggcctttgccctgtgctggaccccctaccacctggtggtgctggtggacatcctgatggacctgggcgccctggccaggaactgtggccgggagagccgggtggatgtggccaagtctgtgaccagcggcctgggctacatgcactgctgcctgaaccccctgctgtatgcctttgtgggcgtgaagttccgggagaggatgtggatgctgctgctgcggctgggctgccccaaccagaggggcctgcagaggcagcccagcagcagcagaagagacagctcctggagcgagaccagcgaggccagctacagcggcctgtag

SEQ ID NO: 54746 - DNA, 1248 bp, Artificial Sequence
  derived and/or modified sequence
atggagctgcggaagtacggccccggccggctggccggcaccgtgattgggggcgcagcccaatccaaaagccaaacaaagagcgactctataacaaaggaattcctcccgggactctacaccgctccatcatccccctttcccccctcccaagtgagtgaccaccaggtcctaaacgacgctgaggtggccgcgctgttggagaatttctcctccagctacgactatggcgaaaacgaatcggactcttgctgtacttcacctccatgcccccaggacttcagcctgaacttcgatagagcctttctcccggccctgtatagtcttctattcctcctcggcttgctcggcaatggcgcggttgcggctgtcctgctgtccagaaggacagctctgagtagcaccgataccttcctgttgcatctggccgtggctgataccttactcgtgctgacactccccctgtgggctgtggacgcggccgtacagtgggtattcggttcaggtctctgtaaggtcgcaggcgcgctttttaacattaacttttatgcaggggctcttctccttgcatgtattagctttgacagatatttgaacatagttcatgccacccagttataccgacgcggcccccctgcaagagtcacacttacttgccttgcagtctggggactgtgcctgctgtttgctctccccgacttcatctttttgtcagcccatcatgacgagaggctgaacgcaacccactgtcaatataactttccacaagtcggaagaaccgcactacgagttctacagctggtggccgggtttctgctacccctgctggtgatggcctattgttacgctcacatccttgcagtgctgctggtatcccgtgggcaaagaaggctaagagctatgagactggtggtggtagttgtagttgcattcgcgttgtgttggacaccttaccatttggttgtgctggtggacattctcatggacttgggggcccttgctagaaactgcggtcgcgaatccagggtcgacgtcgctaagagcgtgaccagcggcctgggctacatgcactgctgcctgaaccctttgctttatgcctttgtgggggtaaagtttagggagcgcatgtggatgctgctactgcgcttgggttgccctaaccaacggggcctccagcgccaaccaagctccagtcggcgagactctagttggagtgagacatctgaggcctcttatagcggattatag

SEQ ID NO: 54747 - DNA, 1248 bp, Artificial Sequence
  derived and/or modified sequence
atggaactgcgcaaatatggccctggaaggctggcagggacggtcatcggcggagctgcacagtccaaaagccaaactaaatcagattctatcactaaagagttcctccctggcttgtacacagccccttcaagcccttttcccccttcccaggtgagcgatcaccaggtcctcaatgatgcagaagttgccgctctactagagaacttcagctcgagctatgattatggcgagaacgagtccgacagctgctgcaccagtccaccttgtcctcaggatttttccctgaactttgatagagctttcttgcctgccctctacagtctcctcttcctgctgggcctgttaggaaatggtgccgttgctgccgtgctcttgtcccgcaggaccgctctgtcaagcactgacaccttcttgctacaccttgcagttgccgacactctccttgtactcactctccccctctgggctgtcgacgctgcggtgcagtgggtgttcggcagcgggctgtgcaaagtggcaggagcactgttcaacattaatttttacgcaggcgctctactgctggcctgcattagctttgatcgatacctgaatatcgtgcacgccacacagctttaccggagaggaccgccagcgagagttacactcacctgcttggccgtttggggattatgtctgctcttcgccttacccgatttcattttcctctcagctcatcacgatgaacgccttaacgcgacccattgccaatataacttcccacaggtcggaaggactgccctgcgcgtgttacaactagttgccggatttttgttgccattacttgtgatggcatattgctacgcccatatccttgctgtcctgcttgtgtcccggggacagcgaagactcagagcgatgcgtctggtggttgtggtggtggtcgcttttgcgctgtgctggactccatatcacctggtggtcctcgttgacatccttatggatctcggagccttggctagaaattgcgggagggaatctagagtcgatgtggccaaaagcgtgacttccggcctaggatatatgcactgctgccttaaccctttgctctacgcttttgtcggggtgaagtttagggagcgtatgtggatgctgctattgcggttggggtgtcccaatcagcggggtctgcagcgccagccttcatcctcaaggagggattccagctggagcgaaacctcagaagcttcttactccggcctatag

SEQ ID NO: 54748 - DNA, 1861 bp, Artificial Sequence
  derived and/or modified sequence
caagcaccaaagcagaggggcaggcagcacaccacccagcagccagagcaccagcccagccatggtccttgaggggtccctgggccgatgggatcacgcagaagaatgcgagagaagcagcctttgagaagggaagtcactatcccagagcccaggctgagcggatggagttgaggaagtacggccctggaagactggcggggacagttataggaggagctgctcagagtaaatcacagactaaatcagactcaatcacaaaagagttcctgccaggcctttacacagccccttcctccccgttcccgccctcacaggtgagtgaccaccaagtgctaaatgacgccgaggttgccgccctcctggagaacttcagctcttcctatgactatggagaaaacgagagtgactcgtgctgtacctccccgccctgcccacaggacttcagcctgaacttcgaccgggccttcctgccagccctctacagcctcctctttctgctggggctgctgggcaacggcgcggtggcagccgtgctgctgagccggcggacagccctgagcagcaccgacaccttcctgctccacctagctgtagcagacacgctgctggtgctgacactgccgctctgggcagtggacgctgccgtccagtgggtctttggctctggcctctgcaaagtggcaggtgccctcttcaacatcaacttctacgcaggagccctcctgctggcctgcatcagctttgaccgctacctgaacatagttcatgccacccagctctaccgccgggggcccccggcccgcgtgaccctcacctgcctggctgtctgggggctctgcctgcttttcgccctcccagacttcatcttcctgtcggcccaccacgacgagcgcctcaacgccacccactgccaatacaacttcccacaggtgggccgcacggctctgcgggtgctgcagctggtggctggctttctgctgcccctgctggtcatggcctactgctatgcccacatcctggccgtgctgctggtttccaggggccagcggcgcctgcgggccatgcggctggtggtggtggtcgtggtggcctttgccctctgctggaccccctatcacctggtggtgctggtggacatcctcatggacctgggcgctttggcccgcaactgtggccgagaaagcagggtagacgtggccaagtcggtcacctcaggcctgggctacatgcactgctgcctcaacccgctgctctatgcctttgtaggggtcaagttccgggagcggatgtggatgctgctcttgcgcctgggctgccccaaccagagagggctccagaggcagccatcgtcttcccgccgggattcatcctggtctgagacctcagaggcctcctactcgggcttgtgaggccggaatccgggctcccctttcgcccacagtctgacttccccgcattccaggctcctccctccctctgccggctctggctctccccaatatcctcgctcccgggactcactggcagccccagcaccaccaggtctcccgggaagccaccctcccagctctgaggactgcaccattgctgctccttagctgccaagccccatcctgccgcccgaggtggctgcctggagccccactgcccttctcatttggaaactaaaacttcatcttccccaagtgcggggagtacaaggcatggcgtagagggtgctgccccatgaagccacagcccaggcctccagctcagcagtgactgtggccatggtccccaagacctctatatttgctcttttatttttatgtctaaaatcctgcttaaaacttttcaataaacaagatcgtcaggacca

SEQ ID NO: 54749 - DNA, 1248 bp, Artificial Sequence
  derived and/or modified sequence
atggagctgagaaagtacggccccggcagactggccggcaccgtgatcggcggcgccgcccagagcaagagccagaccaagagcgacagcatcaccaaggagttcctgcccggcctgtacaccgcccccagcagccccttcccccccagccaggtgagcgaccaccaggtgctgaacgacgccgaggtggccgccctgctggagaacttcagcagcagctacgactacggcgagaacgagagcgacagctgctgcaccagccccccctgcccccaggacttcagcctgaacttcgacagagccttcctgcccgccctgtacagcctgctgttcctgctgggcctgctgggcaacggcgccgtggccgccgtgctgctgagcagaagaaccgccctgagcagcaccgacaccttcctgctgcacctggccgtggccgacaccctgctggtgctgaccctgcccctgtgggccgtggacgccgccgtgcagtgggtgttcggcagcggcctgtgcaaggtggccggcgccctgttcaacatcaacttctacgccggcgccctgctgctggcctgcatcagcttcgacagatacctgaacatcgtgcacgccacccagctgtacagaagaggcccccccgccagagtgaccctgacctgcctggccgtgtggggcctgtgcctgctgttcgccctgcccgacttcatcttcctgagcgcccaccacgacgagagactgaacgccacccactgccagtacaacttcccccaggtgggcagaaccgccctgagagtgctgcagctggtggccggcttcctgctgcccctgctggtgatggcctactgctacgcccacatcctggccgtgctgctggtgagcagaggccagagaagactgagagccatgagactggtggtggtggtggtggtggccttcgccctgtgctggaccccctaccacctggtggtgctggtggacatcctgatggacctgggcgccctggccagaaactgcggcagagagagcagagtggacgtggccaagagcgtgaccagcggcctgggctacatgcactgctgcctgaaccccctgctgtacgccttcgtgggcgtgaagttcagagagagaatgtggatgctgctgctgagactgggctgccccaaccagagaggcctgcagagacagcccagcagcagcagaagagacagcagctggagcgagaccagcgaggccagctacagcggcctgtag

SEQ ID NO: 54750 - protein, 3144 aa, Artificial Sequence
  derived and/or modified sequence
MTDKSIVILSLMVFHSSFINGKTCRRQLVEEWHPQPSSYVVNWTLTENICLDFYRDCWFLGVNTKIDTSGNQAVPQICPLQIQLGDILVISSEPSLQFPEINLMNVSETSFVGCVQNTTTEDQLLFGCRLKGMHTVNSKWLSVGTHYFITVMASGPSPCPLGLRLNVTVKQQFCQESLSSEFCSGHGKCLSEAWSKTYSCHCQPPFSGKYCQELDACSFKPCKNNGSCINKRENWDEQAYECVCHPPFTGKNCSEIIGQCQPHVCFHGNCSNITSNSFICECDEQFSGPFCEVSAKPCVSLLFWKRGICPNSSSAYTYECPKGSSSQNGETDVSEFSLVPCQNGTDCIKISNDVMCICSPIFTDLLCKSIQTSCESFPLRNNATCKKCEKDYPCSCISGFTEKNCEKAIDHCKLLSINCLNEEWCFNIIGRFKYVCIPGCTKNPCWFLKNVYLIHQHLCYCGVTFHGICQDKGPAQFEYVWQLGFAGSEGEKCQGVIDAYFFLAANCTEDATYVNDPEDNNSSCWFPHEGTKEICANGCSCLSEEDSQEYRYLCFLRWAGNMYLENTTDDQENECQHEAVCKDEINRPRCSCSLSYIGRLCVVNVDYCLGNHSISVHGLCLALSHNCNCSGLQRYERNICEIDTEDCKSASCKNGTTSTHLRGYFFRKCVPGFKGTQCEIDIDECASHPCKNGATCIDQPGNYFCQCVPPFKVVDGFSCLCNPGYVGIRCEQDIDDCILNACEHNSTCKDLHLSYQCVCLSDWEGNFCEQESNECKMNPCKNNSTCTDLYKSYRCECTSGWTGQNCSEEINECDSDPCMNGGLCHESTIPGQFVCLCPPLYTGQFCHQRYNLCDLLHNPCRNNSTCLALVDANQHCICREEFEGKNCEIDVKDCLFLSCQDYGDCEDMVNNFRCICRPGFSGSLCEIEINECSSEPCKNNGTCVDLTNRFFCNCEPEYHGPFCELDVNKCKISPCLDEENCVYRTDGYNCLCAPGYTGINCEINLDECLSEPCLHDGVCIDGINHYTCDCKSGFFGTHCETNANDCLSNPCLHGRCTELINEYPCSCDADGTSTQCKIKINDCTSIPCMNEGFCQKSAHGFTCICPRGYTGAYCEKSIDNCAEPELNSVICLNGGICVDGPGHTFDCRCLPGFSGQFCEININECSSSPCLHGADCEDHINGYVCKCQPGWSGHHCENELECIPNSCVHELCMENEPGSTCLCTPGFMTCSIGLLCGDEIRRITCLTPIFQRTDPISTQTYTIPPSETLVSSFPSIKATRIPAIMDTYPVDQGPKQTGIVKHDILPTTGLATLRISTPLESYLLQELIVTRELSAKHSLLSSADVSSSRFLNFGIRDPAQIVQDKTSVSHMPIRTSAATLGFFFPDRRARTPFIMSSLMSDFIFPTQSLLFENCQTVALSATPTTSVIRSIPGADIELNRQSLLSRGFLLIAASISATPVVSRGAQEDIEEYSADSLISRREHWRLLSPSMSPIFPAKVIISKQVTILNSSALHRFSTKAFNPSEYQAITEASSNQRLTNIKSQAADSLRELSQTCATCSMTEIKSSREFSDQVLHSKQSHFYETFWMNSAILASWYALMGAQTITSGHSFSSATEITPSVAFTEVPSLFPSKKSAKRTILSSSLEESITLSSNLDVNLCLDKTCLSIVPSQTISSDLMNSDLTSKMTTDELSVSENILKLLKIRQYGITMGPTEVLNQESLLDMEKSKGSHTLFKLHPSDSSLDFELNLQIYPDVTLKTYSEITHANDFKNNLPPLTGSVPDFSEVTTNVAFYTVSATPALSIQTSSSMSVIRPDWPYFTDYMTSLKKEVKTSSEWSKWELQPSVQYQEFPTASRHLPFTRSLTLSSLESILAPQRLMISDFSCVRYYGDSYLEFQNVALNPQNNISLEFQTFSSYGLLLYVKQDSNLVDGFFIQLFIENGTLKYHFYCPGEAKFKSINTTVRVDNGQKYTLLIRQELDPCNAELTILGRNTQICESINHVLGKPLPKSGSVFIGGFPDLHGKIQMPVPVKNFTGCIEVIEINNWRSFIPSKAVKNYHINNCRSQGFMLSPTASFVDASDVTQGVDTMWTSVSPSVAAPSVCQQDVCHNGGTCHAIFLSSGIVSFQCDCPLHFTGRFCEKDAGLFFPSFNGNSYLELPFLKFVLEKEHNRTVTIYLTIKTNSLNGTILYSNGNNCGKQFLHLFLVEGRPSVKYGCGNSQNILTVSANYSINTNAFTPITIRYTTPVGSPGVVCMIEMTADGKPPVQKKDTEISHASQAYFESMFLGHIPANVQIHKKAGPVYGFRGCILDLQVNNKEFFIIDEARHGKNIENCHVPWCAHHLCRNNGTCISDNENLFCECPRLYSGKLCQFASCENNPCGNGATCVPKSGTDIVCLCPYGRSGPLCTDAINITQPRFSGTDAFGYTSFLAYSRISDISFHYEFHLKFQLANNHSALQNNLIFFTGQKGHGLNGDDFLAVGLLNGSVVYSYNLGSGIASIRSEPLNLSLGVHTVHLGKFFQEGWLKVDDHKNKSIIAPGRLVGLNVFSQFYVGGYSEYTPDLLPNGADFKNGFQGCIFTLQVRTEKDGHFRGLGNPEGHPNAGRSVGQCHASPCSLMKCGNGGTCIESGTSVYCNCTTGWKGSFCTETVSTCDPEHDPPHHCSRGATCISLPHGYTCFCPLGTTGIYCEQALSISDPSFRSNELSWMSFASFHVRKKTHIQLQFQPLAADGILFYAAQHLKAQSGDFLCISLVNSSVQLRYNLGDRTIILETLQKVTINGSTWHIIKAGRVGAEGYLDLDGINVTEKASTKMSSLDTNTDFYIGGVSSLNLVNPMAIENEPVGFQGCIRQVIINNQELQLTEFGAKGGSNVGDCDGTACGYNTCRNGGECTVNGTTFSCRCLPDWAGNTCNQSVSCLNNLCLHQSLCIPDQSFSYSCLCTLGWVGRYCENKTSFSTAKFMGNSYIKYIDPNYRMRNLQFTTISLNFSTTKTEGLIVWMGIAQNEENDFLAIGLHNQTLKIAVNLGERISVPMSYNNGTFCCNKWHHVVVIQNQTLIKAYINNSLILSEDIDPHKNFVALNYDGICYLGGFEYGRKVNIVTQEIFKTNFVGKIKDVVFFQEPKNIELIKLEGYNVYDGDEQNEVT

SEQ ID NO: 54751 - DNA, 10589 bp, Artificial Sequence
  derived and/or modified sequence
agaaacaaagtgatacacgctaggcatgtccagacattaaccgtaatcagaagcctcctagggttgcaagcctccttggctaatggttgggctttgtgcctcactcttctcttacacctggggagtcaagtctggatcctctgctccatatttatttagcaaataaaacactgatctcaaacagcaacggaacctgtgtacttgaggtgttttttgaaaactaatcagaagaggaatgcttatctcccaagaaaattgaaaccatctgtaaaagaatcttggctgtgctgtgttttgattagattgaagcttggtgtaaagagaaaacacaaaagaccgcagaatatttacaacatttgaattcctgtttctccatcaaagcacattgtcatcaaagctactttgggtatagaaaaaaggtcaattccaattcccaggaatccttaaccacaactttacttggaaatttccggtaatacttaaaacaccattttgcagcaattctttatgataaactgtaaaatacagctacccgaaaatgactgacaaatcaatcgtcattctgagcctgatggtttttcacagctctttcataaatggaaaaacatgtagacggcaattggtggaagaatggcatccacaaccctcatcatatgtggtaaattggacactaacagaaaacatctgcttggacttctacagagattgctggtttttgggtgtaaacactaaaatagatacttcaggcaatcaagctgttccccagatttgccctttgcaaattcaattaggagatatccttgtaatttcttctgaaccatctcttcaatttccagaaataaatttgatgaatgtttctgaaacatctttcgttggctgtgtgcaaaataccacaacggaagatcagttactttttggctgcagactaaaaggaatgcacactgttaattctaagtggctgagtgttgggacacattattttatcacagttatggcaagtggtccatcaccttgtccactgggacttcgactaaatgtgacagtgaaacagcagttctgccaggaatctctgagttcagaattttgctctggtcatggtaaatgtcttagtgaagcttggagcaagacatatagctgccattgccagcctccattttctggaaaatactgccaggaacttgatgcatgttcttttaaaccatgtaaaaataatggcagttgcattaataaaagagaaaattgggatgagcaagcatatgaatgtgtctgtcacccaccatttacaggaaagaattgctcagaaataattggccagtgtcaaccacatgtctgtttccatggaaactgcagcaatattacttcaaatagtttcatttgtgaatgtgatgagcaattttcaggtccattctgtgaggtgtcagcaaaaccttgtgtttctctgcttttttggaaaagaggaatttgcccaaatagcagttctgcttatacttatgaatgcccaaaaggatcttccagccaaaatggtgaaactgatgtcagtgagttttcattagtaccatgtcagaatggtactgactgcatcaaaatatcaaatgatgttatgtgcatctgttcaccaatatttacagatttgctttgtaagagcattcaaacatcatgtgagtcatttcctttgaggaataatgctacatgtaagaaatgtgagaaagattatccttgcagctgtatatcaggatttactgaaaaaaactgtgagaaagcaattgaccactgtaaactgctcagcatcaactgtctgaatgaagaatggtgtttcaatataattggaagattcaaatatgtatgcattccagggtgcacaaaaaatccatgttggtttttgaagaatgtttacctaattcatcaacacctctgctactgtggagtcaccttccatggtatttgccaagataaaggtcctgctcaatttgaatatgtgtggcaattgggatttgcaggatctgaaggcgaaaagtgccaaggggttattgatgcctatttctttctggctgcaaactgcactgaagatgcaacctatgtgaacgatcctgaagataataattcttcatgttggttcccacatgaaggcacaaaagagatttgtgcaaatggatgcagttgtttgagtgaagaagacagtcaggaatatcggtatctatgttttctcagatgggctggcaacatgtatctggaaaatacaactgatgatcaagaaaatgagtgtcaacatgaagctgtttgtaaagatgaaattaatagacccagatgcagctgttctcttagttacattggcagattgtgtgttgtcaatgttgactattgcttagggaaccacagtatatcagtgcatggcctctgcctggccctttcgcacaattgtaactgtagcggtctgcaaagatatgaaaggaacatctgtgagatagatactgaagactgcaaatctgcgtcctgcaaaaatggaacaactagtacacatttaaggggatatttcttccgcaagtgtgtcccaggatttaaaggtacgcaatgtgaaattgatatagatgagtgtgcttcacatccctgcaaaaatggagccacctgcattgaccaacctggtaattacttctgccagtgtgtgcctccatttaaagtggttgatggcttttcctgcttatgcaatccaggctatgttgggataagatgtgaacaggacattgatgactgcatcctgaatgcctgtgagcacaattctacctgcaaagacctgcatctcagctaccagtgtgtgtgcctatctgattgggaaggaaatttttgtgaacaagaatccaatgagtgtaaaatgaatccttgcaagaacaattccacctgtactgacctttacaaaagctatcgatgtgagtgtacatctggatggactggacagaactgtagtgaagaaataaatgaatgcgactctgatccatgcatgaatggaggtctttgtcatgaatctaccatccctggacaatttgtatgtctgtgcccacccctttatactggacaattttgccaccaacgctataacctttgtgacctacttcataacccttgcagaaacaactcaacatgcttagctttggtagacgcaaatcagcattgtatttgtagagaagaatttgaaggtaaaaactgtgaaattgatgtgaaagactgcctcttcctttcctgccaggattatggtgactgtgaagatatggtcaacaatttcaggtgtatttgcagacctgggttttctggatctctgtgtgaaattgaaattaatgaatgttcctctgaaccttgcaaaaataatggaacatgtgtggatctgacaaacagatttttttgtaattgtgaacctgagtaccatgggcccttctgtgaacttgatgtaaataaatgtaaaatctcaccttgtctagatgaagaaaattgtgtctacaggactgatggatacaactgcctctgtgcccctggttatacaggcatcaactgtgaaataaatctagatgaatgcctatcagagccctgtctccatgatggagtttgtatcgatggcatcaatcattatacctgtgactgcaagagtgggttttttggaacacactgtgaaacaaacgccaatgattgcctttcaaatccttgtctacatggaaggtgcacagaacttattaatgaatatccatgttcatgtgatgcagatgggactagcacacaatgtaagatcaaaattaatgactgcacatcaatcccttgtatgaatgaaggcttctgtcagaagtcagcacatggatttacttgcatttgcccacgtggatacactggtgcatactgtgaaaaaagcattgataattgtgctgagcctgaacttaattcagtcatctgtcttaatggagggatctgtgttgatgggcctggacatacttttgactgcagatgtcttcctggattttctggtcaattttgtgaaattaatataaatgaatgctcttcatcaccatgtctacatggtgcagactgtgaagatcacatcaatggatatgtttgcaaatgccaaccaggatggtctggacaccactgtgagaatgagcttgagtgcattcccaactcatgtgttcatgaactctgcatggagaatgaacctggctcgacatgtttatgcacacctggatttatgacctgctccattgggcttctttgtggtgatgaaataaggagaattacctgtttaactcccatctttcaaagaacagatcccatttccacacagacatatacaattcccccttctgagactttggtcagcagctttccatctataaaggctactagaataccagccataatggacacttacccagttgatcaaggtccaaaacagacaggcattgtcaagcacgacattctcccaaccactggtttggcaacattaagaattagcacacccttggaaagctacttactccaagaactgattgtcactagagagctttcagcaaaacacagtcttctttcttccgcagatgtttcctcttctcgattcctgaattttggtattcgtgacccagcacaaattgtccaggacaaaacatcggtatcacatatgcctattcgaacttcagcagccacactaggtttcttttttcctgataggagagcaaggaccccatttatcatgtcttccttaatgtcagattttatttttcctacacaatctttattatttgagaactgtcagactgttgctttatctgctaccccaacgacttcagtaattagaagcattccaggggctgatattgagctaaacaggcagtcattactctcccgtggattcctgcttatagctgcctccataagtgcaactccagttgtctctaggggggctcaagaggatattgaagaatattcagctgattctttaatttcaagaagagagcactggagattgctcagcccctcgatgtctcccatttttcctgctaaggtaattatatctaaacaggtaaccatcttaaactcatcagctctgcaccggttcagtacaaaagccttcaatcccagtgaatatcaggctattactgaggcttcaagcaaccagagactcacaaacatcaaatcacaggctgctgattctttaagagaattaagccaaacatgtgcaacatgttctatgactgaaataaaatcctctcgtgaattctcagatcaagttttgcatagcaaacagtcccacttttatgagacattctggatgaactcagcgatattagccagctggtatgcactaatgggagctcaaactatcacttctgggcattcattttcttctgctactgaaataacaccatcagtggcattcacagaagtgccatctttatttccttctaaaaagagtgcaaaaagaacaattttatcctcatccttggaagaatccattaccctatcaagtaatttggatgttaatttatgtttggataagacttgtttatccattgtcccttcacaaactatctcttcagacttgatgaattctgatttgacttcaaaaatgactactgatgaactgtcagtatcagaaaacattttaaaactattgaaaataagacaatatggcataactatgggacccactgaggtactaaatcaagagagcttattggacatggaaaaaagtaaaggatctcatacactgttcaaacttcacccaagtgatagttctctggattttgagttaaacttacaaatttatccggatgttactttaaagacatattcagaaattacacatgcaaatgacttcaaaaataatctgccaccattgacaggctcagtgcctgatttttcagaagtcaccaccaatgttgcattttatacagtttcagcaactccagcactttcaatacagacgtcttcctccatgtctgtaattaggccagattggccatattttacagattatatgacctctcttaaaaaagaggtcaagacttcttcagaatggtccaaatgggaacttcagcctagtgtgcaatatcaggaatttcccactgcaagccggcatcttcccttcactagatctcttactttgtcttcactggaatccattctggcacctcaacggctgatgatttctgatttcagttgtgttcgttattatggagattcttatctagaatttcagaatgtggctttaaatccacaaaataacatctccctagaatttcagaccttcagctcctatggacttctgctgtatgtcaagcaagactcaaatttagtagatggattttttattcaattgtttattgaaaatggtactttaaagtaccacttttactgtcctggtgaagcaaaatttaaaagcattaatactactgttagagtggacaacgggcaaaagtatacactgcttatcaggcaagaattggatccatgtaacgctgagctgactattttagggaggaatacacaaatatgcgaatctatcaatcatgtactcggaaaacccctgccaaaatcaggatctgtcttcattggtggatttccagaccttcatgggaaaatccagatgcctgtaccagtcaagaattttactggctgcatagaagttatagaaataaataactggagatctttcattccatccaaggcagtgaaaaactatcacattaacaattgcagatcccagggatttatgctgtctccaacagcctcctttgttgatgcttctgatgtgacacaaggggttgataccatgtggacttctgtcagcccctctgttgcagcaccctctgtgtgccagcaggatgtatgccacaatggaggcacatgccatgccatcttcctctccagtggcatagtgtcattccaatgtgactgtccactacatttcactggccgcttctgtgaaaaagatgcaggtttattctttccatctttcaatgggaattcctatttagaactgccctttttgaagtttgtcctggagaaggaacataacagaactgttaccatctacttgactataaaaacaaacagtttaaatggaactattctttacagtaatgggaataattgtggaaagcagtttcttcatttatttcttgtggaaggaaggccatcagttaaatatgggtgtggaaattctcaaaatattttgactgtttctgctaattacagcattaacacaaatgcattcacccctatcacaatacgctacacaacgcctgttggcagccctggagttgtttgtatgattgaaatgactgcagatggaaaacctccagtacagaagaaagacacagagatttcccatgcctctcaggcatattttgaatcaatgttccttggccatattcctgcaaatgttcaaattcataagaaagcaggtcctgtttatgggttcaggggctgcattctagaccttcaagtaaacaacaaagaattcttcatcatcgatgaagcacgacatggaaagaatattgagaactgccacgtcccttggtgtgctcatcatctgtgccgcaacaatggcacctgcatcagtgataatgaaaatctgttttgtgagtgtccaaggctgtattcaggcaagctgtgccagtttgcaagttgtgaaaacaacccatgtggaaatggtgccacctgtgttccaaaatccggaacagatattgtctgcctctgcccatatgggaggtctggacccctctgcactgatgctattaatattactcagccaaggttcagtggcacagatgcctttggatacacctcattcctggcttattcacggatctcagacatcagcttccattatgaattccacctgaagtttcagctggcaaacaaccactcagcactgcaaaataacttgatattttttactggacagaaaggccatgggttgaatggcgatgacttcctggctgtgggcctgctcaatggcagtgtggtttatagttataacctggggtctggcatagcaagcatcaggagcgagcccctcaatctgagccttggagtccacactgttcatctgggcaagttcttccaagagggctggctgaaggtagatgatcataaaaataaatccattatcgccccaggaagactggttggtctcaatgtcttcagtcagttttatgtaggtggctacagtgaatacactccagatctcttaccaaatggagcagattttaaaaatggttttcaaggctgtattttcactcttcaagttcgcactgagaaggatggccatttcagaggactgggaaatcctgagggccacccaaatgctggacgcagtgttggccagtgtcatgcttctccctgcagtttaatgaaatgtggcaatggtgggacatgcatagagagtggaactagtgtttactgcaattgtaccactgggtggaaaggatcattctgcacagagacagtttctacctgtgatcctgaacatgaccctccacaccactgtagcagaggagcaacctgcatttcattacctcatggatacacctgtttctgtcctctaggaaccactggaatctactgtgaacaagctttatccataagtgatccatctttcagaagcaatgagttatcctggatgtcttttgcttcctttcatgttcgaaaaaagacacatattcaattgcagtttcagcctctcgctgcagatggtatcctattttatgctgcacaacacttaaaagcccaatcaggtgattttttatgcatctctttagtaaatagttccgttcaacttcgctacaaccttggcgacagaactatcattctagaaactctccaaaaagtaactataaacggaagtacttggcatataataaaagcaggaagagttggtgcagaaggctacctggatctagatgggataaatgtaacagaaaaggcctccactaaaatgagttctctggacacaaatacagacttctatattggaggagtatcttctttaaatcttgtaaatcccatggcaatagaaaatgaacctgtaggttttcaaggctgtatccgacaagttatcataaataatcaagaattacaattaactgaatttggagcaaaaggtggctcaaatgtaggtgactgtgatgggacagcctgtgggtacaacacatgcagaaatggaggtgaatgtacagtaaatggcacaactttttcttgcagatgtttgccagattgggctggaaatacatgtaaccagtctgtgtcctgtttgaataatctttgcctccaccaatctttatgtatacctgaccaatcattttcttacagttgcctgtgtactttgggttgggtgggaaggtattgtgaaaacaaaacttcattttcaactgcaaaatttatgggtaattcttacattaaatacattgatccaaattatagaatgagaaacctccagttcactactatatccttaaatttcagtaccactaaaacagaaggtctaattgtatggatgggaatagctcaaaatgaagaaaatgattttctggcaattggtctccataatcagaccttgaaaatagcagttaacttgggagaaagaatctctgtgcctatgagctataacaatggcacattctgttgtaataaatggcaccatgtagttgtaattcaaaatcagactcttatcaaggcctacataaataacagtctaattctttccgaggatattgatccacataaaaactttgtggctctaaactatgatggcatttgttatctagggggctttgaatatggtagaaaggtaaatatcgttactcaagagatttttaaaaccaattttgttggcaaaattaaagatgttgtattttttcaggaaccaaaaaacattgaactaattaaattagaaggatacaatgtttatgatggagatgaacaaaatgaggttacataagttaacactagagattttagtacacactatacataaatgcagttattttgatagttatttctttgatacattgcttacggggaatcaactgtttactatattacctgaaatagtctaaatgctaacatatctttttgataagattgtaaaatgtcactgaaggttctgattgtttttcctacatctaatttatctgtatatattttgattcatgttttaactccattagttcagtgcttattcacagaatgtgcttattcactttgcttattcactttttacctatccctaatgcttacattttaaaatcaacgtgtaaacacaattttaaaaatcaatgtgtaagctgaactttaaaatgtttaaaattcagttgggaatgaattagggataggtacaaataagaaaaaaatcaagttattaatcaaaggaaaaataaaaattatacaaagcaatgtaaccatattgtattacatggcttagctacaacttatttatatgattcaacaatgtaaaacttgaacatagatttaaaccaaaaattattgcatgaatgtagaaagagaaggtgagaggagaggagaacaggctggtaagagctaaatccttatctttt

SEQ ID NO: 54752 - DNA, 9435 bp, Artificial Sequence
  derived and/or modified sequence
atgaccgataagtccattgttattctttctctaatggtgtttcattcatcctttataaacgggaaaacatgtaggcggcagctggtggaggagtggcatccacagcccagctcctacgtagtgaattggacgctgaccgagaatatctgccttgatttttatcgcgactgctggttcttaggtgttaacaccaagattgacaccagcggaaaccaggccgtgccccagatatgtccgctgcagattcaattaggagatatcctcgtgatcagcagcgaaccaagtctgcagttccccgagatcaatttgatgaacgtgtccgaaacaagcttcgttggctgcgtgcaaaacactaccaccgaagaccagcttcttttcggttgtagattaaaaggcatgcacacagtgaactctaagtggctgagtgtcggtacacactactttataaccgtgatggcttcaggaccatccccttgtccattgggcctccgcctgaacgttaccgtaaaacaacaattttgccaggaatccctgtcatctgaattttgcagcggacatggcaagtgcctgagtgaggcttggtcaaagacctacagttgccactgtcagccccccttttccgggaaatactgtcaggagctcgatgcgtgctcatttaagccttgcaagaacaatgggtcatgcattaacaaacgtgagaactgggacgaacaggcctacgaatgtgtgtgccacccgccttttactggaaagaattgtagcgagattatcgggcaatgccagccacacgtatgcttccatggtaattgttctaatatcacctcaaatagcttcatctgcgagtgcgacgagcagttctcaggaccattctgtgaggtctctgctaaaccctgtgtgtcactgctattctggaaaagggggatctgccccaactcgtctagcgcctatacctatgaatgcccaaaaggatcaagttcacaaaatggcgagactgacgtatctgagttcagcctcgtgccatgccagaatggcacggattgcattaaaatttcaaacgacgtgatgtgcatctgcagtcccatttttaccgacctgctgtgcaagtctatccaaacttcttgcgaatcctttcccctccggaacaacgctacctgcaagaagtgcgaaaaagactatccatgttcttgcatctctgggtttaccgagaaaaattgcgaaaaggccatagaccattgcaagctactttcgattaactgcctcaatgaagagtggtgtttcaacattattggtagattcaagtacgtatgtattccagggtgtactaaaaacccatgttggttcctgaagaatgtgtacctgatccaccagcatctctgttattgtggtgttacctttcacggtatatgtcaggataaggggcccgcacaatttgagtacgtttggcaactaggcttcgcgggtagtgagggtgagaagtgccagggggtcattgacgcttatttctttctagcagctaactgcacagaggacgccacgtacgtgaatgaccctgaggataacaatagttcttgttggttcccccatgaggggactaaagagatttgcgcaaatggttgctcctgccttagtgaagaagactcccaagagtacagatatctctgcttccttcggtgggctggcaatatgtacttggaaaatactactgatgaccaggagaatgagtgccagcacgaggccgtgtgcaaggacgagatcaatagacccaggtgtagttgctctctctcttacataggacgtctctgcgtcgtgaatgtagactactgcctgggcaatcatagtatatccgtgcatggcttatgcctggctttgtcacataactgtaattgtagtggcctccagcggtacgagcggaacatctgcgagatcgatacagaggattgtaagagcgctagctgcaaaaatggcacgacctcaacccatctccgcggctatttctttcggaagtgtgtccctggattcaaaggcactcagtgtgaaattgatatcgatgaatgcgcaagccatccatgcaaaaatggcgccacctgtatcgaccagcccggcaattatttttgccagtgtgttcccccattcaaagtggtggacggatttagctgcctctgcaacccaggatacgtcggcatcaggtgtgagcaggacattgatgactgtatcctgaacgcctgcgagcacaattccacctgcaaagacttgcatttgtcttaccagtgcgtgtgcctgtctgactgggaaggcaacttttgcgagcaagaatccaatgaatgcaaaatgaatccctgtaagaacaactcgacttgcaccgatctgtataagtcatacagatgtgaatgcaccagcggatggacgggccaaaattgctcagaagagatcaacgaatgcgatagcgacccttgtatgaacgggggcctctgccatgaatcaaccatccccggacagttcgtttgtctttgcccacccctgtatacaggacaattttgccatcaaaggtataacctctgtgatttattacataacccttgccggaataactccacgtgcctggctctcgtggacgccaaccagcactgcatctgcagagaagaatttgaggggaagaattgcgaaattgatgtgaaggattgcctctttcttagttgccaggattacggcgattgcgaggatatggtgaataatttccggtgcatttgccgcccaggcttctccgggagcctttgcgaaatcgagatcaacgaatgtagcagcgaaccatgcaagaataacgggacttgcgtcgatctgacaaatcgcttcttctgtaactgcgaacccgaataccacggaccgttctgtgagctagacgtgaataaatgtaagatatccccatgcctcgatgaagaaaattgtgtctatcgaacagacggttataattgtctttgtgccccagggtatacgggcatcaactgtgagatcaacttagacgagtgcttgtcagaaccatgtttacacgatggcgtctgcattgacggtataaaccactacacttgtgactgtaagtccggtttctttggtacccattgcgaaaccaatgccaatgattgcctaagcaacccctgcttacatgggcgctgcacagagcttatcaacgaatacccttgcagctgtgacgctgacggcacctcaactcagtgtaagattaagatcaacgattgtactagtataccttgtatgaacgagggtttttgtcagaaatctgctcatggcttcacttgcatatgcccacggggctacacaggggcctactgcgaaaagtctattgacaactgcgctgaacccgaactgaacagtgtcatctgtttaaacgggggcatttgtgtggatggccccggtcatactttcgattgtagatgcctgcccggattttccggccagttttgtgaaatcaatattaacgaatgcagttcatcgccatgcctgcatggggcagactgcgaggatcacatcaatggttatgtgtgtaagtgtcaaccaggttggagcggccatcattgtgagaatgagctggagtgcattcctaattcttgtgtccatgaactttgcatggagaacgagcccggatccacctgcctgtgtaccccggggttcatgacttgctcaatcggcctcctctgtggagatgagatccggaggattacatgtcttacgcccatttttcagcgaacagatcctatctccactcaaacctacactattccccctagcgaaacacttgtcagctcattccccagtatcaaagcaacgaggatcccagctattatggacacctatcctgttgaccagggtccgaagcagactggtatcgtaaagcacgatattctacccacaaccggcctggccacccttagaatttccacaccgctcgaaagctacttactccaagagctgatagtgacaagagaactttctgcaaaacacagcctcctctcttccgccgatgtctcaagctcaaggttcctgaactttggtatacgtgacccagcccaaatagtacaggacaaaacaagcgtgtcccatatgccgatccgaacctcagcagccacactgggttttttcttccctgacagaagagccaggaccccttttataatgagtagcctcatgtcggactttatttttcctacgcagagcctgctattcgagaactgccagaccgtggcgctgtctgctacccctaccacaagcgttattaggtccataccaggcgccgatatcgaactgaatcgacagtccctgctcagtcgaggctttctcctcatcgctgcatctatcagcgcgactcctgtggtgagcagaggcgcccaggaagacatcgaggagtactcagcagatagcttgattagcaggagagaacattggagattactgtccccttctatgtcccccatcttccctgctaaggtcattatatctaagcaggtgactatacttaattcttccgctctgcacaggttttcaactaaggcatttaacccgagtgagtatcaagctattaccgaagcttcgtctaaccagagactgaccaacatcaagtcacaagccgccgattcccttagggaactatctcagacgtgcgcaacctgctcgatgactgagatcaaatcatcccgagagtttagtgaccaagtgctgcactcaaagcagtcccacttctacgaaaccttctggatgaactctgccattcttgcctcctggtatgccttgatgggggctcagaccattacttcaggccattccttctcctccgctaccgaaataaccccaagcgtggctttcaccgaagtgcctagcctgtttccttctaagaagtccgctaagcggaccatccttagctcctccctagaggagagcataacactgtcttcgaatcttgatgtgaacttgtgtctcgacaaaacctgcctctccattgtgcccagtcagactatctctagtgatcttatgaactcagacctgacatcgaaaatgaccaccgacgagctctcggtgagcgaaaacatactcaaactcctgaagatccgccagtacggtattacaatgggccccacagaggtgcttaaccaagaaagcctccttgatatggagaagtcaaagggctcccacacgctgtttaagcttcaccctagcgactccagcctggactttgagctcaatctgcagatctaccccgacgtaactctcaaaacttactctgaaatcacacacgccaacgacttcaaaaataacctgcctcctttgaccggatctgtgcccgacttcagcgaagttactacaaatgtcgcgttctacactgttagcgcaacgcctgccctatccattcaaaccagcagcagcatgagcgtcattagacccgattggccatattttaccgactatatgacgtccctcaagaaggaggtgaagacctcctcagaatggagcaaatgggagctgcagccttctgtacagtaccaggagtttccgacggcgagcagacatctcccatttacacggtccttaaccttatcgagcctggaatcaatcctcgctccacagcgtctcatgattagcgattttagctgtgtccgctactatggcgacagctatctcgagttccagaacgttgccctgaaccctcagaacaacatttccctggagtttcagacattttcctcatacggattgctgttgtatgttaagcaggatagcaatctggtggatggattttttatacagctgtttatcgagaacggaactcttaagtaccacttttattgccccggggaggctaaatttaaatccattaacaccaccgtgcgagtggataatggccagaagtacaccctgctgattagacaagagctggatccctgtaatgccgagttgacaatcctgggacggaacacacagatctgcgaatcaatcaatcacgtgctggggaagccacttcccaagagcggatcagttttcattgggggtttccctgacctgcacggcaaaattcaaatgcccgtgcccgtcaagaactttacaggatgcattgaggttatcgagattaacaactggcggagcttcattccttctaaggctgtcaaaaactatcatatcaataattgtaggtcacaggggttcatgctcagtccaacagcaagtttcgtcgacgctagtgatgtgacccagggcgtagacacaatgtggacatccgtgagccccagtgttgctgcaccctccgtgtgccaacaagatgtctgccataacggaggcacctgccatgcgatctttctgtcaagcggcatcgtgtcattccagtgcgattgtccactccactttaccggtcgattttgtgaaaaggacgccggtctgttctttcccagctttaatgggaactcatatctggagctccctttcctgaagtttgtgctcgaaaaggaacataaccgaactgtcacgatctacttaaccataaagaccaacagcctcaacggaacaatcctgtacagcaacggcaataattgcggcaagcaattccttcacctgttcctagtggaaggtagaccctctgtcaagtacggatgcggaaatagtcagaatatcttaaccgtgagtgcaaattactccataaataccaatgctttcacccccatcactatccggtacaccacccctgtcggcagcccaggcgtcgtatgtatgattgaaatgacggctgacggcaaacccccagtgcaaaagaaagacactgagatttcccacgcgagccaggcgtatttcgaatctatgttcctggggcatatcccagcaaacgtgcaaatccataagaaagcagggcccgtgtatggattccgaggttgcatccttgatctgcaggtgaataataaagagttctttatcatcgacgaagcacgccatggtaaaaatattgagaattgccatgtcccttggtgtgctcaccatctgtgtcggaataacggtacctgtatcagcgacaatgagaacctgttctgcgaatgtcccagactgtactcaggcaaactgtgtcagttcgcctcctgcgaaaacaatccgtgtggcaatggagctacgtgcgtgcctaagagcggcaccgatattgtctgtctgtgtccctacggccggagcggtcccctctgcactgacgctataaatataacgcagcccagattctccggtacagatgctttcggctatactagcttccttgcttattccaggatttcggatatctcctttcactacgagttccacttaaaattccaactagcaaacaaccattcagccttgcagaataatctgatctttttcaccggacagaaagggcacggcctgaacggtgacgactttttggccgttggattactcaacggctccgtggtgtactcatacaatcttggaagcggtattgccagcatccgcagtgaaccactgaacctgagtctcggcgtccacactgttcatctgggaaagtttttccaggaaggctggttgaaggtcgatgatcataaaaataaatccattatagcaccgggcagactcgtggggttgaacgttttttcccaattctacgtcggcggctactcggagtatacgcccgatttgctgccaaacggggcagactttaagaatgggttccagggttgcatctttacattacaggtgagaaccgagaaagacggacatttccggggtctgggaaaccccgaaggacatccaaatgctgggcgtagcgtcggtcagtgtcatgcctccccctgttctctgatgaagtgcgggaatgggggcacctgtatagaaagcggaactagcgtgtattgtaactgcacgactggatggaaaggttccttttgtacagaaacggtatccacctgcgaccccgaacatgaccctccacaccactgctctagaggcgcgacatgcatctctctcccccatggttatacctgtttctgtccgctggggacgactggcatatattgtgaacaggccctcagcatcagcgacccctctttcagatccaacgaactcagttggatgagtttcgcctcctttcacgtccgtaaaaagacccacatccaattacagttccaacccctagcagccgatgggatcctgttttacgccgcccagcatctaaaggcgcagagcggggacttcctctgtattagcctcgttaactcgtccgtgcaattgcggtacaatttaggcgaccggactatcattctcgaaacccttcagaaagttaccattaacggctctacctggcacattattaaagcaggaagagttggcgcagagggctacctggatctggatggtatcaacgtgactgaaaaagcgtctaccaaaatgtcctccctggacaccaatacggacttttacattggcggagtgagtagtctcaacctagtcaatccaatggccatcgaaaacgagccggtgggctttcaaggttgcatcaggcaggtcatcataaataatcaagaactgcagttgacggaatttggggctaagggaggctccaatgtgggtgattgcgacggcacagcgtgtgggtataacacgtgccgcaacggaggagaatgtactgttaacgggactacattctcttgcagatgcctgcccgactgggctggaaacacctgcaatcagtctgtttcttgtctgaacaatctgtgcttgcaccagtctctttgtatccctgatcagtctttcagctattcgtgtctgtgcactcttgggtgggtgggccgctattgtgagaacaagacctcatttagcacagccaaatttatgggcaacagctacatcaaatacattgaccctaattatcgcatgaggaacttacagtttaccactatctcgcttaattttagcaccaccaaaactgagggtctaatcgtctggatgggcatcgcccagaacgaggaaaatgattttctcgctattggactgcataatcaaacgctgaagatcgcggtgaaccttggagagaggatctcagtgcctatgtcatataataacggaacattctgttgcaataaatggcaccacgtggtagtgattcaaaaccagacactcatcaaagcttatataaataattcgctgattctgtctgaggacattgatccccacaaaaattttgtcgcccttaactacgatgggatctgctatctggggggattcgagtatgggcggaaagtgaacattgttacacaggagatttttaaaactaattttgtcggtaaaattaaagatgtggtgttctttcaggagccaaagaatatcgaactgataaagctagaaggctataatgtatacgacggggatgaacagaatgaggtgacctag

SEQ ID NO: 54753 - DNA, 9435 bp, Artificial Sequence
  derived and/or modified sequence
atgacagacaagagcatcgtcatcctgagcctgatggtgttccacagcagcttcatcaacgggaagacctgccggcggcagctggtggaggagtggcacccccagcccagcagctatgtggtgaactggaccctgacagagaacatctgcctggacttctacagagactgctggttcctgggcgtgaacaccaagattgacaccagcggcaaccaggccgtgccccagatctgccccctgcagatccagctgggggacatcctggtgatcagcagcgagcccagcctgcagtttcctgagatcaacctgatgaatgtgtctgagaccagctttgtgggctgtgtgcagaacaccaccacagaggaccagctgctgtttggctgccgcctgaagggcatgcacacagtgaacagcaagtggctgtctgtgggcacccactacttcatcaccgtgatggccagcggccccagcccctgccccctgggcctgcggctgaatgtgacagtgaagcagcagttctgccaggagagcctgagcagcgagttctgcagcggccacggcaagtgcctgtctgaggcctggagcaagacctacagctgccactgccagccccccttcagcggcaagtactgccaggagctggatgcctgcagcttcaagccctgcaagaacaacggcagctgcatcaacaagcgggagaactgggatgagcaggcctatgaatgtgtgtgccacccccccttcaccgggaagaactgcagcgagatcatcggccagtgccagccccacgtgtgcttccacggcaactgcagcaacatcaccagcaacagcttcatctgtgaatgtgatgagcagttcagcggccccttctgtgaggtgtctgccaagccctgtgtgtccctgctcttctggaagaggggcatctgccccaacagcagcagcgcctacacctatgaatgtcccaagggcagcagcagccagaatggagaaacagatgtgtctgagttcagcctggtgccctgccagaatggaacagactgcatcaagatcagcaatgatgtgatgtgcatctgcagccccatcttcacagacctgctgtgcaagagcatccagaccagctgtgagagcttccccctgaggaacaatgccacctgcaagaagtgtgagaaggactacccctgcagctgcatcagcggcttcacagagaagaactgtgagaaggccatcgaccactgcaagctgctgagcatcaactgcctgaatgaggagtggtgcttcaacatcatcggccgcttcaagtatgtgtgcatccctggctgcaccaagaacccctgctggttcctgaagaatgtgtacctgatccaccagcacctgtgctactgtggggtgaccttccacggcatctgccaggacaagggccctgcccagtttgaatatgtgtggcagctgggctttgctggcagcgagggggagaagtgccagggcgtgattgatgcctacttcttcctggccgccaactgcacagaagatgccacctacgtgaatgaccctgaggacaacaacagcagctgctggttcccccatgagggcaccaaggagatctgtgccaacggctgcagctgcctgtctgaggaggacagccaggagtaccgctacctgtgcttcctgcgctgggccggcaacatgtacctggagaacaccacagatgaccaggagaatgaatgccagcatgaagctgtgtgcaaggatgagatcaaccggccccgctgcagctgcagcctgagctacatcggccgcctgtgtgtggtgaatgtggactactgcctgggcaaccacagcatctctgtgcacggcctgtgcctggccctgagccacaactgcaactgcagcggcctgcagagatatgaaagaaacatctgtgaaattgacacagaggactgcaagagcgccagctgcaagaatggcaccaccagcacccacctgcggggctacttcttcagaaaatgtgtgcccggcttcaagggcacccagtgtgaaattgatattgatgaatgtgccagccacccctgcaagaatggagccacctgcatcgaccagcccggcaactacttctgccagtgtgtgccccccttcaaggtggtggatggcttcagctgcctgtgcaaccctggctacgtgggcatccgctgtgagcaggacattgatgactgcatcctgaatgcctgtgagcacaacagcacctgcaaggacctgcacctgagctaccagtgtgtgtgcctgagtgactgggagggcaacttctgtgagcaggagagcaatgaatgcaagatgaacccctgcaagaacaacagcacctgcacagacctgtacaagagctaccgctgtgagtgcaccagcggctggacaggccagaactgcagcgaggagatcaatgaatgtgacagcgacccctgcatgaatggaggcctgtgccacgagagcaccatccctggccagtttgtgtgcctgtgcccccccctgtacacaggccagttctgccaccagcgctacaacctgtgtgacctgctgcacaacccctgcaggaacaacagcacctgcctggccctggtggatgccaaccagcactgcatctgccgggaggagtttgagggcaagaactgtgaaattgatgtgaaggactgcctcttcctgagctgccaggactatggagactgtgaggacatggtgaacaacttccgctgcatctgccggcccggcttcagcggcagcctgtgtgaaattgagatcaatgaatgtagcagcgagccctgcaagaacaacggcacctgtgtggacctgaccaaccgcttcttctgcaactgtgagcctgagtaccacggccccttctgtgagctggatgtgaacaagtgcaagatcagcccctgcctggatgaggagaactgtgtgtacagaacagatggctacaactgcctgtgtgcccctggctacacaggcatcaactgtgagatcaacctggatgaatgtctgtctgagccctgcctgcatgatggagtgtgcattgatggcatcaaccactacacctgtgactgcaagagcggcttcttcggcacccactgtgagaccaatgccaatgactgcctgagcaacccctgcctgcacggccgctgcacagagctgatcaatgagtacccctgcagctgtgatgctgatggcaccagcacccagtgcaagatcaagatcaatgactgcaccagcatcccctgcatgaatgaaggcttctgccagaagagcgcccacggcttcacctgcatctgcccccggggctacaccggggcctactgtgagaagagcattgacaactgtgccgagcctgagctgaacagcgtcatctgcctgaatggaggcatctgtgtggatggccctggccacacctttgactgccgctgcctgcccggcttcagcggccagttctgtgagatcaacatcaatgaatgtagcagcagcccctgcctgcacggggctgactgtgaggaccacatcaatggctacgtgtgcaagtgccagcccggctggagcggccaccactgtgaaaatgagctggagtgcatccccaacagctgtgtgcatgagctgtgcatggagaatgaacctggcagcacctgcctgtgcaccccaggcttcatgacctgcagcatcggcctgctgtgtggagatgagatccgccgcatcacctgcctgacccccatcttccagaggacagaccccatcagcacccagacctacaccatcccccccagcgagaccctggtgagcagcttccccagcatcaaggccacccgcatcccagccatcatggacacctaccctgtggaccagggccccaagcagacaggaattgtgaagcatgacatcctgcccaccaccggcctggccaccctgcgcatcagcacccccctggagagctacctgctgcaggagctgattgtgacccgggagctgagcgccaagcacagcctgctgagcagcgcagatgtgagcagcagccgcttcctgaactttggcatccgggaccctgcccagatcgtgcaggacaagacctctgtgagccacatgcccatccgcaccagcgctgccaccctgggcttcttcttcccagacagaagagcccggacccccttcatcatgagcagcctgatgtctgacttcatcttccccacccagagcctgctgtttgagaactgccagacagtggccctgagcgccacccccaccaccagcgtcatccgcagcatccctggagctgacatcgagctgaaccggcagagcctgctgagccggggcttcctgctgattgctgccagcatcagcgccacccctgtggtgtccagaggagcccaggaggacatcgaggagtacagcgctgacagcctcatcagccggcgggagcactggaggctgctgagccccagcatgagccccatcttccctgccaaggtgatcatcagcaagcaggtgaccatcctgaacagcagcgccctgcaccgcttcagcaccaaggccttcaaccccagcgagtaccaggccatcacagaggccagcagcaaccagaggctgaccaacatcaagagccaggccgctgacagcctgcgggagctgagccagacctgtgccacctgcagcatgacagagatcaagagcagccgggagttcagtgaccaggtgctgcacagcaagcagagccacttctatgagaccttctggatgaacagcgccatcctggcctcctggtacgccctgatgggcgcccagaccatcaccagcggccacagcttcagcagcgccacagagatcacccccagcgtggccttcacagaggtgcccagcctcttccccagcaagaagagcgccaagaggaccatcctgagcagcagcctggaggagagcatcaccctgagcagcaacctggatgtgaacctgtgcctggacaagacctgcctgagcatcgtgcccagccagaccatcagcagtgacctgatgaacagcgacctgaccagcaagatgaccacagatgagctgtctgtgtctgagaacatcctgaagctgctgaagatccggcagtatggcatcaccatgggccccacagaggtgctgaaccaggagagcctgctggacatggagaagagcaagggcagccacaccctcttcaagctgcaccccagcgacagcagcctggactttgagctgaacctgcagatctacccagatgtgaccctgaagacctacagcgagatcacccacgccaatgacttcaagaacaacctgccccccctgaccggctctgtgcctgacttcagcgaggtgaccaccaacgtggccttctacacagtgtctgccaccccagccctgagcatccagaccagcagctccatgtctgtcatccggccagactggccctacttcacagactacatgaccagcctgaagaaggaggtgaagaccagcagcgagtggagcaagtgggagctgcagcccagcgtgcagtaccaggagttccccacagccagccgccacctgcccttcaccaggagcctgaccctgagcagcctggagagcatcctggccccccagaggctgatgatcagtgacttcagctgtgtgcgctactatggagacagctacctggagttccagaatgtggccctgaacccccagaacaacatcagcctggagttccagaccttcagcagctatggcctgctgctgtatgtgaagcaggacagcaacctggtggatggcttcttcatccagctgttcattgaaaatggcaccctgaagtaccacttctactgccctggagaggccaagttcaagagcatcaacaccaccgtgcgggtggacaatggccagaagtacaccctgctgatccggcaggagctggacccctgcaatgctgagctgaccatcctgggcaggaacacccagatctgtgagagcatcaaccacgtgctgggcaagcccctgcccaagagcggcagcgtcttcatcggcggcttcccagacctgcacggcaagatccagatgcctgtgcctgtgaagaacttcaccggctgcatcgaggtgattgagatcaacaactggaggagcttcatccccagcaaggctgtgaagaactaccacatcaacaactgccgcagccagggcttcatgctgagccccacagccagctttgtggatgccagtgatgtgacccagggcgtggacaccatgtggacctctgtgagccccagcgtggccgcccccagcgtgtgccagcaggatgtgtgccacaacggcggcacctgccacgccatcttcctgagcagcggcatcgtgtccttccagtgtgactgccccctgcacttcaccggccgcttctgtgagaaggatgctggcctcttcttccccagcttcaatggaaacagctacctggagctgcccttcctgaagtttgtgctggagaaggagcacaacagaacagtgaccatctacctgaccatcaagaccaacagcctgaatggcaccatcctgtacagcaatggaaacaactgtgggaagcagttcctgcacctgttcctggtggagggccggcccagcgtgaagtatggctgcggcaacagccagaacatcctgactgtgtctgccaactacagcatcaacaccaatgccttcacccccatcaccatccgctacaccacccctgtgggcagccctggggtggtgtgcatgattgagatgacagcagatggcaagccccctgtgcagaagaaggacacagagatcagccacgccagccaggcctactttgagagcatgttcctgggccacatcccagccaacgtgcagatccacaagaaggccggccctgtgtatggcttccggggctgcatcctggacctgcaggtgaacaacaaggagttcttcatcattgatgaggcccggcacggcaagaacatcgagaactgccacgtgccctggtgtgcccaccacctgtgcagaaataatggcacctgcatcagtgacaatgaaaatctcttctgtgagtgcccccggctgtacagcggcaagctgtgccagtttgccagctgtgagaacaacccctgtggaaatggagccacctgtgtgcccaagagcggcacagacatcgtgtgcctgtgcccctacggccgcagcggccccctgtgcacagatgccatcaacatcacccagccccgcttctctggaacagatgccttcggctacaccagcttcctggcctacagccgcatcagtgacatctccttccactatgagttccacctgaagttccagctggccaacaaccacagcgccctgcagaacaacctgatcttcttcaccggccagaagggccacggcctgaatggagatgacttcctggccgtgggcctgctgaatggatctgtggtgtacagctacaacctgggcagcggcatcgccagcatccgctctgagcccctgaacctgagcctgggcgtgcacacagtgcacctgggcaagttcttccaggagggctggctgaaggtggatgaccacaagaacaagagcatcatcgcccctggccgcctggtgggcctgaatgtgttcagccagttctacgtgggcggctacagcgagtacaccccagacctgctgcccaatggagctgacttcaagaatggcttccagggctgcatcttcaccctgcaggtgaggacagagaaggatggccacttccggggcctgggcaaccctgagggccaccccaatgccggccgctctgtgggccagtgccacgccagcccctgcagcctgatgaagtgtggaaatggaggcacctgcatcgagagcggcacctctgtgtactgcaactgcaccaccggctggaagggcagcttctgcacagagaccgtgtccacctgtgaccctgagcatgaccccccccaccactgcagcagaggagccacctgcatcagcctgccccacggctacacctgcttctgccccctgggcaccaccggcatctactgtgagcaggccctgagcatcagtgaccccagcttccgcagcaatgagctgtcctggatgagctttgccagcttccacgtgaggaagaagacccacatccagctgcagttccagcccctggccgcagatggcatcctcttctacgccgcccagcacctgaaggcccagagcggggacttcctgtgcatcagcctggtgaacagctctgtgcagctgcgctacaacctgggggacaggaccatcatcctggagaccctgcagaaggtgaccatcaatggcagcacctggcacatcatcaaggccggccgggtgggcgctgagggctacctggacctggatggcatcaacgtgacagagaaggccagcaccaagatgagcagcctggacaccaacacagacttctacatcggcggcgtgagcagcctgaacctggtgaaccccatggccattgaaaatgaacctgtgggcttccagggctgcatccggcaggtgatcatcaacaaccaggagctgcagctgacagaatttggagccaagggcggcagcaatgtgggggactgtgatggaacagcctgtggctacaacacctgcagaaatggaggagaatgtactgtgaatggcaccaccttcagctgccgctgcctgcctgactgggccggcaacacctgcaaccagagcgtgtcctgcctgaacaacctgtgcctgcaccagagcctgtgcatcccagaccagagcttctcctacagctgcctgtgcaccctgggctgggtgggccgctactgtgagaacaagaccagcttcagcacagccaagttcatgggcaacagctacatcaagtacatcgaccccaactacaggatgaggaacctgcagttcaccaccatcagcctgaacttcagcaccaccaagacagagggcctgattgtgtggatgggcatcgcccagaatgaagaaaatgacttcctggccatcggcctgcacaaccagaccctgaagattgctgtgaacctgggggagcgcatctctgtgcccatgagctacaacaacggcaccttctgctgcaacaagtggcaccacgtggtggtgatccagaaccagaccctcatcaaggcctacatcaacaacagcctcatcctgtctgaggacatcgacccccacaagaactttgtggccctgaactatgatggcatctgctacctgggcggctttgaatatggcaggaaggtgaacatcgtgacccaggagatcttcaagaccaactttgtgggcaagatcaaggatgtggtgttcttccaggagcccaagaacatcgagctgatcaagctggagggctacaacgtgtatgatggagatgagcagaatgaggtgacctag

SEQ ID NO: 54754 - DNA, 9435 bp, Artificial Sequence
  derived and/or modified sequence
atgaccgacaagagcatcgtgatcctgagcctgatggtgttccactcatctttcattaatggcaaaacatgtcggagacagttagtcgaggaatggcacccccagccgtctagttacgtcgtaaattggaccctgacggaaaatatctgccttgacttttatcgggattgctggtttctaggagtgaataccaagattgatacgtctggaaaccaggccgttccacaaatctgtccactgcagatccagctgggcgacatcctggtcatctccagcgaaccaagcctgcagtttcctgagattaacctgatgaatgtgtcagagacaagttttgtcgggtgtgtgcagaacaccacaacagaggaccagttgttattcggttgccggctcaagggtatgcacaccgtcaattccaaatggctgtctgttggtacgcactactttattactgtgatggcctccggacctagcccatgtccactgggcctgcggttgaatgtgaccgtcaagcagcagttttgccaggaatccctttcttcagaattttgtagcggacacggaaagtgccttagcgaggcttggtctaaaacctactcctgccattgccagcccccattctcgggaaaatattgccaggaactggatgcttgcagttttaagccatgcaagaataacggctcttgtatcaacaagcgggagaattgggacgagcaggcttacgagtgcgtttgccatccgccttttactggcaagaactgctcagaaatcatcggtcagtgtcagccccatgtgtgttttcatgggaactgttctaacatcaccagtaactcatttatttgtgaatgtgacgaacaatttagcgggcccttctgcgaggtgtccgctaaaccgtgtgtgtctttactgttctggaaacggggcatttgtcccaactccagttctgcgtacacatacgaatgccctaaaggttcatcttcccagaacggcgagacggacgtgagcgaattttcccttgtgccgtgccagaacggtacggactgcatcaaaattagtaatgacgtcatgtgcatttgctcgccaatttttaccgatcttttgtgcaagagcattcagacctcatgcgagtctttccccctccgcaataacgcaacctgtaaaaagtgtgagaaagattatccttgttcctgcatttcggggttcaccgaaaaaaattgcgaaaaggctatcgaccattgcaaattgctatctattaattgcctgaacgaagagtggtgtttcaacatcataggcaggttcaaatatgtctgcattcccggctgtactaaaaacccatgctggttcctcaagaatgtctatctcattcaccagcacctttgctattgcggggttacgttccatgggatctgtcaggataaaggtcccgcgcaattcgaatatgtatggcaactcggctttgctgggtcagagggtgaaaagtgtcagggagttattgacgcctacttttttctggccgccaactgtacagaggatgccacctacgtgaacgacccagaggacaacaatagctcctgttggttcccgcatgaaggtactaaggagatttgcgctaacggctgctcctgtctctcagaagaagattctcaggaatatagatacctgtgctttctccgttgggccggcaacatgtatctcgaaaatactaccgacgaccaggaaaacgagtgtcagcacgaggccgtttgtaaggatgagatcaaccggcctcgttgttcatgctccctgtcttatataggccgcctctgcgttgttaatgtggactactgcttgggcaaccactctatctccgtccacggtctgtgtttagccttaagccataattgcaactgttcaggtttacagcgttatgaacgtaacatatgcgaaattgataccgaagactgcaaatccgcgagttgcaagaatggcaccactagcacccatctgcgcggttatttcttccgaaaatgtgtccctggatttaaggggactcagtgtgaaattgacatagacgagtgcgcctcacacccttgcaagaacggcgctacgtgtattgaccagccaggcaactatttttgccagtgcgttcccccctttaaggtggtggacggtttttcctgcttgtgcaatcccggttacgtagggattcgttgcgaacaggacatcgacgactgtatactgaacgcttgcgagcacaactcaacttgcaaggatctgcacctctcttaccagtgcgtttgccttagtgattgggaaggcaatttctgcgagcaagagagtaatgagtgtaagatgaacccttgtaagaacaacagcacttgcactgatttgtacaagtcttacaggtgcgagtgtacttcagggtggacagggcagaattgctcagaagaaatcaacgaatgtgatagtgacccatgtatgaatggtggtttgtgccacgagtctaccatccccgggcagtttgtttgtctttgtcccccgctgtatacagggcagttctgtcaccaacgctataatctttgcgatctgctccacaacccgtgtcgaaacaactccacttgcttggctctggtggacgcgaaccaacattgcatctgcagagaggaattcgaaggcaagaactgtgagattgacgtcaaagattgtcttttcctttcttgtcaggattacggcgactgcgaggacatggtcaataatttcaggtgtatatgtcgtccgggttttagtgggtccctttgcgagatcgaaattaatgagtgttcgtctgagccctgtaagaacaatggtacgtgtgtggatttaaccaacaggtttttttgcaattgtgagcctgagtatcacggccctttctgcgagctcgacgttaataaatgtaagatctctccttgtctcgatgaagaaaactgcgtgtaccggaccgatggctataactgtctctgcgcgccgggctacacaggtatcaattgcgaaatcaatctggacgagtgcctgagtgaaccttgtttacatgacggcgtctgtattgacggtatcaatcattatacatgcgattgcaagagcggcttttttggaacccattgcgagaccaatgccaacgactgcctgtccaacccatgtctgcacgggcggtgcaccgagttgataaacgagtatccctgctcatgcgatgctgacgggactagtacacagtgcaaaatcaagattaatgattgcacctcaattccctgcatgaacgagggtttttgccagaaatctgcgcacgggttcacatgtatttgccctagagggtataccggcgcttactgtgagaagagcatcgacaattgcgcagagccagagctaaactccgttatctgcctaaacggcggtatttgcgtggacggacctggacatacctttgactgccggtgcttacccggtttcagcgggcaattctgcgagatcaacatcaatgaatgtagctcatcgccctgtttgcatggagccgactgcgaggaccatatcaacggatacgtttgtaagtgccagccaggatggtccggccatcactgcgaaaacgagcttgaatgcattccaaactcctgtgtgcacgagctctgtatggaaaacgaacccggcagcacatgcctgtgtacacccggattcatgacatgttcaatcggtctgctttgtggagatgagatcagaaggatcacctgccttacgcctattttccagcgcacggaccctatctctacacagacatacaccatccccccatccgagaccctcgtgtcctcattcccaagtattaaggctacaaggatccccgctataatggacacctatcccgtcgaccagggcccaaaacagactggaattgtcaaacacgatatactgccgacaacaggactggccaccctgagaatcagtacaccgttggaaagctaccttctgcaggaactcatcgtgacaagggagctaagtgcgaaacactccctgttaagttcggccgacgtttcttcatctcgtttcttgaacttcggcataagagatcccgcccagattgtccaggacaagacatcagtgagccatatgcctataagaacatctgccgccaccttgggcttctttttccctgacagacgcgcccgcactcccttcatcatgtcctcactgatgagcgattttattttcccaacacaatctctgttgtttgagaactgtcaaacggtcgccctgtcggccacacccacaacaagtgtgatacgtagcatcccaggggctgatatcgagcttaaccgccagtccctcctatcccgcgggttcctgcttatcgctgccagcattagcgccacaccagtggtttccaggggagctcaagaggatattgaggagtattcagccgactccctgatctcacgtagggaacactggagactccttagcccctcaatgagcccgatattcccagcaaaggtgatcatatctaaacaggtaaccatcctgaattcttctgccctgcatcggtttagtactaaggctttcaacccttccgagtatcaggcaatcacggaagccagctccaaccagcggctgacaaacatcaagagccaagccgccgatagccttagagaactatctcaaacatgcgcgacttgctcgatgactgaaattaaatctagtcgcgagttctccgaccaggtgctgcacagcaaacagagccacttctacgagacgttttggatgaacagtgccattttggcttcatggtatgctttaatgggcgcccaaaccattacaagcgggcatagtttttctagcgctacagagattacaccaagtgtggcttttactgaggttcctagcctcttcccctcgaagaagtcagctaagagaacaattctgagcagttccttggaagagtctattactttatcctccaatctggacgtgaatttgtgtttggacaagacctgcctttcgattgtaccctctcagacgatttcgtcagacctaatgaattcagatctgacgtctaagatgacgacggacgagctgtcagttagtgaaaacatcttaaaattgttgaaaattcgacagtacggaataacgatgggacccacagaggttttgaatcaggaatcactgctggacatggaaaagtccaagggatcacacacactttttaagctccatcccagcgatagcagcctggatttcgaactgaacctgcaaatataccctgacgtgacgctgaaaacatacagcgagataacccatgccaacgattttaaaaacaatcttcctcctttgaccggatcagtgccggacttttccgaggttacaacaaatgtggccttctacacagtgtcagctactcccgcattatcgatccagacatcttcctccatgtccgtgatccgacccgactggccctatttcactgactacatgaccagtctgaagaaggaggtaaaaacgtcgagcgagtggagtaaatgggagctacagcccagcgtgcagtatcaggaattcccaacagccagtagacacctgccgttcaccaggtctctgaccttgagctctctcgagtccatcctagctccgcagaggttaatgattagcgacttttcctgcgtccggtattatggcgactcttacctcgaatttcagaacgtcgcacttaatccacaaaacaatatctctctggaattccagaccttctcatcgtacgggttgctgctgtacgttaagcaggacagtaatctcgttgacggattcttcatccagctcttcatcgaaaacgggaccctcaagtaccatttctactgtccaggagaggccaagtttaaaagtattaacaccacagtgcgagtagacaatggtcagaagtatactctccttatcagacaggaattagacccttgcaacgcagaactcacgatcctgggacgcaatacccagatttgtgaaagcataaaccatgtgctcggaaaaccactgcctaaatccgggagtgtgttcatcgggggatttcccgatctgcacggcaagatacagatgcccgtgcccgttaagaattttacagggtgcatcgaagtgattgagataaacaactggagatccttcatcccctcaaaggcagtgaagaattaccacataaacaactgtagaagccagggctttatgctgtccccaaccgcgtcattcgttgatgcctctgatgttactcagggcgtggataccatgtggaccagcgttagcccaagtgtggcagctccaagtgtgtgtcagcaggacgtctgccataatggcggcacatgccatgcaatcttcttaagtagcgggattgtgagcttccagtgtgactgccctctgcatttcaccggcagattctgtgagaaagacgccggcttattttttccctcattcaatggaaactcgtatttggaactgccatttcttaaattcgtgctggagaaagagcacaaccgcaccgtgacgatctacttaaccattaagactaacagcttgaatggaacgatcctgtactcaaatggcaacaactgcgggaaacagtttttgcatctgttcctcgtcgagggaaggcctagcgtcaaatatggctgtggaaatagtcagaacattttgactgtgagtgcaaattacagcatcaatacaaacgccttcacacccattaccatccgctacaccacgcctgtcggttctcccggcgtggtgtgtatgatcgagatgactgccgacggcaagccgcccgtgcagaaaaaggatacagaaattagccacgcttcccaagcctacttcgagagtatgtttctgggtcatattcctgccaatgtgcagattcataaaaaagcaggccctgtgtacgggttccggggctgcattctagatctccaggtcaacaataaagaattcttcattatcgatgaggctcggcatggaaagaacatcgaaaactgccatgtgccctggtgtgcccaccacctgtgcaggaataatggcacttgtatctcagataacgagaatttgttctgcgaatgtccccgattgtattctggtaagttgtgccagttcgcaagttgtgagaacaatccttgtggcaatggcgcaacctgtgtcccaaaatctgggactgacatcgtgtgtctgtgcccctatggaagatccggacctctgtgtactgacgctataaacatcacgcagcctcggttctctggcacagatgcgtttgggtatacttcctttcttgcatactctcgaatctccgacataagcttccactacgaatttcaccttaagtttcagctcgctaataaccacagtgctttgcagaataacctgattttctttaccggacagaaaggacacggactcaacggtgacgatttcctggcagtagggcttctcaatggaagtgttgtatattcttacaatcttggaagcggaattgccagcattcggtcagaacccctgaatctgagcctgggggtccacactgtgcaccttgggaaattcttccaggaaggttggttgaaagtcgacgaccacaagaataagtctatcatcgcccccggcagacttgtaggcctcaatgtcttttctcaattttacgtgggcgggtactctgagtacacacccgaccttctgcctaacggcgccgactttaagaacgggtttcagggatgcattttcaccctacaggtgcgaactgaaaaggatggtcactttagagggttaggaaaccctgagggccatccaaacgccggacgctctgttggacagtgtcatgccagtccctgtagcctaatgaagtgcggcaatggcggcacctgtatcgagagtgggactagtgtatactgcaattgcaccacagggtggaagggtagcttttgcacggagaccgtgagcacatgtgatcctgaacacgaccctccccatcattgcagtcggggcgcaacctgcatcagccttccacatggctacacctgtttttgccccctggggacgaccggcatctactgcgagcaagcgctttctatctctgacccttccttccggtcaaatgagttgtcatggatgagcttcgcatcgtttcacgtgagaaaaaaaacccacatacagctgcaatttcaaccactggccgcggatggcatactattttacgctgctcagcatttaaaggcacagagcggcgatttcctctgtattagcttagttaattcctccgtccagcttcgttacaatcttggcgatcgcacaataatcctagagaccctgcagaaggtaacgataaatggctccacttggcatataataaaagcagggcgtgtgggtgccgagggatacttggaccttgatggcatcaatgtcaccgaaaaggcctcaacaaagatgtcttctttagatacaaatacagacttctatatcggaggtgtatcatctcttaaccttgtgaaccccatggctatcgagaacgagccagtgggcttccagggttgtattaggcaggtaattattaacaatcaagagttacagctcactgaatttggcgccaaaggcggatctaatgttggcgactgtgatgggactgcttgcggctacaatacttgcaggaacggaggcgaatgtacggtgaacggaactacattttcctgtcgttgtctgccagattgggcaggtaatacatgtaatcaaagcgtctcatgcctcaacaatctgtgtctccaccagagtctgtgcataccagaccagtcctttagctattcttgtttgtgcacccttggatgggttggcagatattgtgagaataagacctctttctcaacagctaagttcatgggaaacagttacattaaatatatcgaccccaactaccgaatgcggaacttacagttcacgacaatctcattgaatttttccactaccaaaacagaagggctaatagtttggatggggattgctcaaaatgaggaaaatgactttctagccatcggccttcataaccaaactttgaagatcgccgttaacctcggggaaaggatttcagtccccatgagctacaacaatggaaccttttgttgtaataaatggcatcatgtggttgtgatccagaaccaaacacttattaaagcctacattaacaattccctgatcctttcagaggacatcgaccctcacaagaactttgtggctctgaactacgacggtatttgctatttaggtggatttgagtacgggaggaaggtcaatatcgttactcaggaaatctttaagacaaactttgtcggtaagataaaagatgttgtattttttcaagaacctaagaatatcgagttaatcaaattagagggttacaatgtgtacgacggagatgagcaaaatgaagtcacatag

SEQ ID NO: 54755 - DNA, 9434 bp, Artificial Sequence
  derived and/or modified sequence
atgaccgataagtcaatcgtgatcttgtctctaatggtctttcacagtagttttatcaatggaaaaacatgccggcgtcaactcgtggaggagtggcacccccagccaagttcatatgtcgttaactggacattaaccgagaacatctgcctggacttttatagggattgttggtttctgggtgtgaacactaagatcgatactagcggtaaccaagctgtcccacaaatctgccccctccagatccaactgggagacattctggtgatctcctcagaaccctcactgcagtttcctgagattaacctgatgaacgttagtgagactagcttcgttggctgcgtgcagaatacgacaactgaagatcagctactgttcggctgtagactgaagggaatgcacaccgtaaacagcaagtggttgtccgttgggactcattacttcattacagttatggcctccggcccaagcccatgcccactcggattaaggttgaacgtgaccgttaaacaacagttctgtcaggagagcttgagctccgagttctgctctggacatggaaagtgtctatccgaagcttggtccaagacctattcttgccactgccagcctcctttctctggaaaatactgtcaggagttggatgcttgttcatttaaaccctgtaaaaataatggcagctgcataaataagcgggagaactgggatgagcaggcgtacgagtgcgtgtgccaccccccatttacaggcaaaaactgcagcgagatcatcggccagtgccagccacacgtgtgttttcacggaaactgctccaatattacttcgaattccttcatctgtgagtgtgacgagcagtttagcggacccttctgcgaggtcagcgctaaaccatgcgttagcctgctcttttggaaacggggtatttgccctaatagtagcagcgcttatacttatgaatgccctaaagggtcctcctcacagaacggggagaccgacgtaagtgagtttagtttggtgccctgccagaatggcaccgactgcattaagattagcaacgatgtgatgtgtatctgttctcccatatttacagatctgttgtgcaagagcattcagaccagttgcgagtcgttccctctgcgtaacaacgccacatgcaagaaatgtgagaaagattacccctgcagttgcatcagcggattcacagaaaagaactgcgagaaggcgatcgatcattgtaagctgctcagtataaattgtttgaacgaggagtggtgcttcaatataattggccgtttcaaatacgtctgtatcccgggatgcacaaaaaacccttgctggtttctcaagaatgtttatctaatccaccagcatctgtgctattgtggggtgacatttcacggcatctgccaagacaaaggacctgcccagtttgaatatgtgtggcagctgggctttgccggtagtgagggtgagaagtgtcagggcgtcatcgatgcatactttttcctggccgctaactgcacagaggacgctacatatgtgaacgatcctgaggataataacagttcgtgctggttcccccatgaagggaccaaggaaatctgtgcaaatgggtgcagctgtctctctgaggaagactcacaggagtaccggtatctgtgcttcctgaggtgggccggtaatatgtatctggagaacaccacagacgatcaagaaaatgagtgccagcacgaagccgtgtgcaaggacgagataaatcgccctcggtgctcatgttcgctgagctatataggacgattgtgtgtggtgaatgtcgattactgcttaggaaatcactcgatttccgtgcacggcctctgtctggccctctcccacaattgcaactgttcaggcctccagagatacgagcgcaacatctgtgagattgatacagaagactgcaagagcgctagctgcaagaacgggacaaccagcacacatctcaggggctacttcttccggaagtgcgtcccaggatttaaggggacacagtgcgaaatcgatatagatgagtgtgcctcgcatccctgcaaaaatggagccacatgcatcgaccagccaggaaactatttttgccaatgcgtgcccccatttaaggtcgtcgacggcttcagttgcctgtgtaacccgggatacgtcgggatccgatgtgagcaggatatcgacgactgtatactcaacgcatgcgagcacaactctacctgtaaagacctgcacctgagttatcagtgcgtctgtctcagcgattgggaggggaacttctgcgagcaggagtcaaacgaatgcaagatgaacccctgtaaaaataacagcacttgtaccgacctttacaaaagctaccgatgcgagtgtacctctggatggaccggccaaaactgtagtgaagaaatcaacgaatgcgatagtgatccctgcatgaatggaggcctgtgccacgagagcacaatcccgggtcagtttgtatgtttgtgcccacccctgtacactggacagttttgccaccagcgatataacctatgcgatttgctgcacaacccttgtcgtaacaattccacgtgcttggcattggtggatgctaaccagcattgtatctgcagggaggagtttgaagggaaaaactgcgagattgacgtcaaggattgtttattcctcagctgtcaggattacggcgactgcgaggacatggtaaacaacttccggtgtatctgtaggccaggcttctccggcagtttatgcgagattgaaatcaacgagtgctctagcgagccgtgcaagaacaatgggacttgcgtcgatctgacaaatcggtttttctgcaactgcgaacccgaatatcatggaccattctgcgaactcgacgtgaataaatgtaaaataagtccttgtttggacgaggaaaactgtgtataccggacggatggctacaattgtctttgtgcccctggttatactggaatcaactgcgagatcaacttggacgaatgtctgtctgagccgtgcttgcacgatggggtgtgcatagatggcatcaaccactatacatgtgattgcaagtctggcttcttcggaacccattgcgagacaaatgcgaatgactgcctttctaacccatgtctgcacggtaggtgcactgagcttatcaatgagtacccttgttcttgcgacgccgacggtacctccacacagtgcaaaattaaaattaacgactgcacttccataccgtgcatgaacgaaggcttttgtcagaagagcgctcatggtttcacctgcatctgccccagaggctacacaggagcttattgtgaaaaaagcatcgacaattgcgccgagcctgagctgaattctgtcatttgccttaatggagggatttgcgtcgatggaccagggcacacttttgactgtcggtgcctcccaggattcagcggccagttctgcgagattaatatcaatgaatgctccagctccccttgtcttcatggcgctgactgcgaagatcacatcaacggctatgtctgcaaatgtcaacctggttggagcggccatcattgtgagaatgaacttgagtgcatcccaaacagctgtgtccatgagctctgcatggagaatgagcccggatccacatgcctatgtacgcctgggttcatgacttgcagcattggactgctatgtggagatgaaatccggaggatcacatgtttaacaccaatctttcagaggacagacccaattagtacccagacctacaccatccctccatcggaaactctcgtttcttcattcccgagcataaaggcaactagaattcctgctataatggacacgtaccctgtggaccagggcccaaagcaaaccggaattgtcaaacacgatattctgcccacaacaggcttggctacccttagaatatctactcccctggagtcctacctcttgcaggagctgatcgtgactagggagctatcagcaaaacactctctgctctcctcagctgacgtgagctcatcacggttcctgaactttggaatcagggacccggcacaaattgtccaggataaaacaagtgtcagtcacatgccaattcgcacctcagccgcaaccttgggttttttcttcccagaccgcagagcaagaaccccctttattatgagctccctgatgtccgattttatatttccgacacagagcctcttgttcgagaactgccaaacagtcgccctgtctgcaaccccaactacaagtgtcataaggagcataccgggtgccgacattgagttaaatcggcaaagcttactcagtcggggattcctgttgatcgccgcttcaatctctgctacacctgtggttagcagaggggcacaggaggatatcgaggaatactctgccgatagtttaataagcaggcgagagcattggagactattgtccccctccatgtcccccatattcccagcgaaagtgataatcagcaagcaggtcaccatacttaacagtagtgctctgcatagattttccaccaaggcgttcaacccatccgagtatcaggcaatcacggaggccagtagcaatcagagattaacaaacataaagtcacaggccgctgatagcttgagagaattgtctcagacatgtgccacttgcagcatgacagagattaagtccagcagagaatttagcgaccaggtgttgcattccaaacaaagtcatttctacgagacattttggatgaactccgctattttggcgtcatggtacgccctgatgggagcacaaacgataacatccgggcattccttttcatccgcaacagaaataacgccctccgtggcctttacagaagtgccatcactgtttcctagcaagaagtccgcaaaacggactattctgtcgagctcattggaggagtcaattactctttctagtaatctggatgtcaacctttgcctggataaaacctgtctctcgatcgttcccagtcagacaatcagttcagatctcatgaattcagacttaactagcaaaatgaccactgatgagctgtctgtgtcagaaaatatccttaagttgcttaagatcaggcagtacggaattactatggggcctactgaggtgttgaatcaggagagcttactggacatggagaagtcaaagggttctcacacactgttcaaacttcacccatcggacagctcccttgactttgagctgaatctccagatttacccagatgtgacccttaagacatactctgaaattactcatgccaatgactttaaaaacaaccttccccctctcaccggatcagtacccgattttagcgaggttaccacaaacgtggccttctacacagtaagcgccacccccgctttatcaatccagacttctagtagcatgtcagtgattagaccggactggccgtactttacagattatatgacctccctaaaaaaagaggttaagactagttccgaatggtccaagtgggaactgcagcccagcgttcagtatcaggagttccctaccgcaagtaggcatctcccctttacacgaagtttgaccctgtcctctctcgagtccatcctcgccccacaacggctaatgatcagtgatttctcttgtgtccggtactacggggacagctacctggagtttcaaaatgtagctctgaatccacaaaacaatatttcactggagtttcagaccttctcctcctacgggctccttctttatgtcaaacaggactctaacctggtggacggtttttttattcagctgtttattgagaacggcactctcaagtatcatttttattgcccgggagaggctaagtttaaatccattaacacgacagtgagagtggacaatgggcaaaaatacacacttttaattcggcaagagcttgatccatgcaatgccgagctgaccatcctggggagaaatactcagatttgtgaatccattaaccatgtgctgggtaaacccttgcctaagtccgggagcgtattcatcggagggttcccagatctccatgggaagatacagatgccagtccctgtcaagaatttcactggctgcatcgaggttatcgagattaataattggagatctttcatcccatcaaaagctgtgaagaattaccacatcaacaactgccgttctcagggttttatgttgtccccaaccgctagctttgtggatgcgagcgacgtgacccagggagtcgacactatgtggacctccgtgagcccctccgtcgccgctccgtcggtatgccagcaggacgtatgccataacgggggtacatgccatgcaatctttctatcaagcgggatagtctcattccaatgcgattgtcccctgcactttactgggaggttctgtgaaaaggatgcagggctcttttttcctagtttcaacggaaattcatacctggaattacctttcttaaagtttgtgctcgaaaaggaacacaacaggactgtcactatctaccttaccatcaaaacaaattctttgaacggtacaatcctatatagtaacggcaacaattgcggcaagcagtttctgcacttgttcttggtggagggcagaccctcagtgaaatatgggtgcggcaactcccaaaacatactgacagtgagcgccaattactccatcaacacaaatgcttttacacctatcacgatccgttataccaccccggtggggtcgccaggggttgtttgcatgattgagatgaccgccgatgggaagccccctgtacagaagaaggatactgaaatttcacacgcctcccaggcctatttcgaatctatgttcctgggacacatccctgcaaatgtgcagattcataagaaagcaggtcctgtgtatgggtttcgtggttgtatcctcgatttgcaggtgaacaataaggagtttttcattattgacgaggctcggcatggaaaaaatatcgagaactgtcacgttccatggtgcgcccaccacttgtgcagaaacaatggcacatgcataagtgataacgagaacctgttttgcgagtgcccaagactgtatagcggcaaactgtgtcaattcgcttcctgcgaaaacaacccatgcggaaacggagcaacctgtgtgccaaagtctgggacagacatcgtgtgcttatgtccctacggccgaagtggcccactgtgtaccgacgctatcaatatcacccagccaagattctccggaaccgatgcttttggatatacttcctttctcgcctatagccggatcagcgatatctcttttcattatgagtttcaccttaagttccagttggctaataatcactcagcattacagaacaacctcatcttttttaccgggcagaagggccacggcttaaatggggatgattttctggcagttggacttctgaacggcagcgtggtgtactcttacaacctcggcagtggtatagcgtccattagatcagagccactgaatttgtccttgggcgtgcacacagtgcatctgggaaagttctttcaggagggctggctcaaggtggatgatcataagaataagtctatcattgcacccggtaggctggtgggtttgaatgtgttttctcagttttatgtgggagggtactccgaatatacaccagatttactgccgaatggagccgattttaagaatggattccagggttgcatctttacgcttcaagtgagaaccgagaaggatggtcactttcgcggactgggcaaccctgagggccatcctaatgcaggtaggagcgtcgggcagtgtcacgcatccccatgcagccttatgaagtgtggaaacgggggaacgtgcatcgagagcgggacaagtgtctactgcaactgcacaacgggttggaaaggatctttttgcacagagactgtgagcacatgtgatccagaacacgatccccctcatcactgtagccgaggcgcaacatgcatcagcctgccccatgggtacacatgtttctgcccgctgggcacgaccgggatttactgcgaacaggccctcagcattagcgacccttcttttaggtcaaacgagctcagctggatgtcttttgcaagtttccatgtccgaaagaaaacgcatatccagcttcagtttcaaccgctcgcagctgacggtatcttgttctatgcagcccagcatctgaaagctcaaagtggcgattttctctgtatctccttggtaaattctagcgttcagctgagatataacttaggcgatcgtaccatcattcttgagacacttcaaaaagtgacaataaacgggagtacttggcacattatcaaggctggacgcgtcggcgctgagggctacctggaccttgacggaattaatgtgacagaaaaggcatccaccaagatgtcaagtctggatacgaacaccgatttctacataggaggagtgagttctctgaaccttgtaaacccaatggctatcgagaacgaaccagtggggtttcaggggtgcattcgccaggtgattatcaacaaccaggagttacagctgaccgagtttggtgccaaggggggaagtaacgtgggtgattgcgatgggactgcgtgcgggtacaatacctgccgaaatggaggggagtgcacagtgaatggtaccactttctcttgccgttgtctacctgactgggccggaaacacttgcaaccagtcagttagttgcctgaacaatctatgtctgcaccagtctctgtgcatcccagaccaaagcttcagttacagctgtctgtgtactctgggctgggtggggagatactgtgagaacaaaacttctttttcaaccgctaagtttatgggtaatagctacatcaagtatatcgatcctaactaccgcatgcggaacctgcagtttacaactatcagtctgaatttctcgaccacgaagaccgaaggtctgattgtatggatgggaatagcacagaatgaggaaaatgactttctagcgatcggactccataaccaaaccctcaaaatcgctgtcaatctgggggagcgcatatctgtgcccatgtcatataacaacgggaccttttgttgcaataagtggcaccacgtagtggtgatccagaatcagactctgatcaaggcatacatcaacaacagcctgatactttccgaagacatagaccctcataaaaattttgtagccttaaactatgatgggatttgttatctgggtggctttgagtacggcagaaaggtgaatattgtgacacaagaaatcttcaagactaattttgtgggaaaaatcaaggacgtagtcttcttccaggagcccaagaacatcgagctgattaagctcgaaggatataatgtatatgatggggatgaacaaaacgaggtcacgta

SEQ ID NO: 54756 - DNA, 9435 bp, Artificial Sequence
  derived and/or modified sequence
atgaccgacaagagcatcgtgatcctgagcctgatggtgttccacagcagcttcatcaacggcaagacctgcagaagacagctggtggaggagtggcacccccagcccagcagctacgtggtgaactggaccctgaccgagaacatctgcctggacttctacagagactgctggttcctgggcgtgaacaccaagatcgacaccagcggcaaccaggccgtgccccagatctgccccctgcagatccagctgggcgacatcctggtgatcagcagcgagcccagcctgcagttccccgagatcaacctgatgaacgtgagcgagaccagcttcgtgggctgcgtgcagaacaccaccaccgaggaccagctgctgttcggctgcagactgaagggcatgcacaccgtgaacagcaagtggctgagcgtgggcacccactacttcatcaccgtgatggccagcggccccagcccctgccccctgggcctgagactgaacgtgaccgtgaagcagcagttctgccaggagagcctgagcagcgagttctgcagcggccacggcaagtgcctgagcgaggcctggagcaagacctacagctgccactgccagccccccttcagcggcaagtactgccaggagctggacgcctgcagcttcaagccctgcaagaacaacggcagctgcatcaacaagagagagaactgggacgagcaggcctacgagtgcgtgtgccacccccccttcaccggcaagaactgcagcgagatcatcggccagtgccagccccacgtgtgcttccacggcaactgcagcaacatcaccagcaacagcttcatctgcgagtgcgacgagcagttcagcggccccttctgcgaggtgagcgccaagccctgcgtgagcctgctgttctggaagagaggcatctgccccaacagcagcagcgcctacacctacgagtgccccaagggcagcagcagccagaacggcgagaccgacgtgagcgagttcagcctggtgccctgccagaacggcaccgactgcatcaagatcagcaacgacgtgatgtgcatctgcagccccatcttcaccgacctgctgtgcaagagcatccagaccagctgcgagagcttccccctgagaaacaacgccacctgcaagaagtgcgagaaggactacccctgcagctgcatcagcggcttcaccgagaagaactgcgagaaggccatcgaccactgcaagctgctgagcatcaactgcctgaacgaggagtggtgcttcaacatcatcggcagattcaagtacgtgtgcatccccggctgcaccaagaacccctgctggttcctgaagaacgtgtacctgatccaccagcacctgtgctactgcggcgtgaccttccacggcatctgccaggacaagggccccgcccagttcgagtacgtgtggcagctgggcttcgccggcagcgagggcgagaagtgccagggcgtgatcgacgcctacttcttcctggccgccaactgcaccgaggacgccacctacgtgaacgaccccgaggacaacaacagcagctgctggttcccccacgagggcaccaaggagatctgcgccaacggctgcagctgcctgagcgaggaggacagccaggagtacagatacctgtgcttcctgagatgggccggcaacatgtacctggagaacaccaccgacgaccaggagaacgagtgccagcacgaggccgtgtgcaaggacgagatcaacagacccagatgcagctgcagcctgagctacatcggcagactgtgcgtggtgaacgtggactactgcctgggcaaccacagcatcagcgtgcacggcctgtgcctggccctgagccacaactgcaactgcagcggcctgcagagatacgagagaaacatctgcgagatcgacaccgaggactgcaagagcgccagctgcaagaacggcaccaccagcacccacctgagaggctacttcttcagaaagtgcgtgcccggcttcaagggcacccagtgcgagatcgacatcgacgagtgcgccagccacccctgcaagaacggcgccacctgcatcgaccagcccggcaactacttctgccagtgcgtgccccccttcaaggtggtggacggcttcagctgcctgtgcaaccccggctacgtgggcatcagatgcgagcaggacatcgacgactgcatcctgaacgcctgcgagcacaacagcacctgcaaggacctgcacctgagctaccagtgcgtgtgcctgagcgactgggagggcaacttctgcgagcaggagagcaacgagtgcaagatgaacccctgcaagaacaacagcacctgcaccgacctgtacaagagctacagatgcgagtgcaccagcggctggaccggccagaactgcagcgaggagatcaacgagtgcgacagcgacccctgcatgaacggcggcctgtgccacgagagcaccatccccggccagttcgtgtgcctgtgcccccccctgtacaccggccagttctgccaccagagatacaacctgtgcgacctgctgcacaacccctgcagaaacaacagcacctgcctggccctggtggacgccaaccagcactgcatctgcagagaggagttcgagggcaagaactgcgagatcgacgtgaaggactgcctgttcctgagctgccaggactacggcgactgcgaggacatggtgaacaacttcagatgcatctgcagacccggcttcagcggcagcctgtgcgagatcgagatcaacgagtgcagcagcgagccctgcaagaacaacggcacctgcgtggacctgaccaacagattcttctgcaactgcgagcccgagtaccacggccccttctgcgagctggacgtgaacaagtgcaagatcagcccctgcctggacgaggagaactgcgtgtacagaaccgacggctacaactgcctgtgcgcccccggctacaccggcatcaactgcgagatcaacctggacgagtgcctgagcgagccctgcctgcacgacggcgtgtgcatcgacggcatcaaccactacacctgcgactgcaagagcggcttcttcggcacccactgcgagaccaacgccaacgactgcctgagcaacccctgcctgcacggcagatgcaccgagctgatcaacgagtacccctgcagctgcgacgccgacggcaccagcacccagtgcaagatcaagatcaacgactgcaccagcatcccctgcatgaacgagggcttctgccagaagagcgcccacggcttcacctgcatctgccccagaggctacaccggcgcctactgcgagaagagcatcgacaactgcgccgagcccgagctgaacagcgtgatctgcctgaacggcggcatctgcgtggacggccccggccacaccttcgactgcagatgcctgcccggcttcagcggccagttctgcgagatcaacatcaacgagtgcagcagcagcccctgcctgcacggcgccgactgcgaggaccacatcaacggctacgtgtgcaagtgccagcccggctggagcggccaccactgcgagaacgagctggagtgcatccccaacagctgcgtgcacgagctgtgcatggagaacgagcccggcagcacctgcctgtgcacccccggcttcatgacctgcagcatcggcctgctgtgcggcgacgagatcagaagaatcacctgcctgacccccatcttccagagaaccgaccccatcagcacccagacctacaccatcccccccagcgagaccctggtgagcagcttccccagcatcaaggccaccagaatccccgccatcatggacacctaccccgtggaccagggccccaagcagaccggcatcgtgaagcacgacatcctgcccaccaccggcctggccaccctgagaatcagcacccccctggagagctacctgctgcaggagctgatcgtgaccagagagctgagcgccaagcacagcctgctgagcagcgccgacgtgagcagcagcagattcctgaacttcggcatcagagaccccgcccagatcgtgcaggacaagaccagcgtgagccacatgcccatcagaaccagcgccgccaccctgggcttcttcttccccgacagaagagccagaacccccttcatcatgagcagcctgatgagcgacttcatcttccccacccagagcctgctgttcgagaactgccagaccgtggccctgagcgccacccccaccaccagcgtgatcagaagcatccccggcgccgacatcgagctgaacagacagagcctgctgagcagaggcttcctgctgatcgccgccagcatcagcgccacccccgtggtgagcagaggcgcccaggaggacatcgaggagtacagcgccgacagcctgatcagcagaagagagcactggagactgctgagccccagcatgagccccatcttccccgccaaggtgatcatcagcaagcaggtgaccatcctgaacagcagcgccctgcacagattcagcaccaaggccttcaaccccagcgagtaccaggccatcaccgaggccagcagcaaccagagactgaccaacatcaagagccaggccgccgacagcctgagagagctgagccagacctgcgccacctgcagcatgaccgagatcaagagcagcagagagttcagcgaccaggtgctgcacagcaagcagagccacttctacgagaccttctggatgaacagcgccatcctggccagctggtacgccctgatgggcgcccagaccatcaccagcggccacagcttcagcagcgccaccgagatcacccccagcgtggccttcaccgaggtgcccagcctgttccccagcaagaagagcgccaagagaaccatcctgagcagcagcctggaggagagcatcaccctgagcagcaacctggacgtgaacctgtgcctggacaagacctgcctgagcatcgtgcccagccagaccatcagcagcgacctgatgaacagcgacctgaccagcaagatgaccaccgacgagctgagcgtgagcgagaacatcctgaagctgctgaagatcagacagtacggcatcaccatgggccccaccgaggtgctgaaccaggagagcctgctggacatggagaagagcaagggcagccacaccctgttcaagctgcaccccagcgacagcagcctggacttcgagctgaacctgcagatctaccccgacgtgaccctgaagacctacagcgagatcacccacgccaacgacttcaagaacaacctgccccccctgaccggcagcgtgcccgacttcagcgaggtgaccaccaacgtggccttctacaccgtgagcgccacccccgccctgagcatccagaccagcagcagcatgagcgtgatcagacccgactggccctacttcaccgactacatgaccagcctgaagaaggaggtgaagaccagcagcgagtggagcaagtgggagctgcagcccagcgtgcagtaccaggagttccccaccgccagcagacacctgcccttcaccagaagcctgaccctgagcagcctggagagcatcctggccccccagagactgatgatcagcgacttcagctgcgtgagatactacggcgacagctacctggagttccagaacgtggccctgaacccccagaacaacatcagcctggagttccagaccttcagcagctacggcctgctgctgtacgtgaagcaggacagcaacctggtggacggcttcttcatccagctgttcatcgagaacggcaccctgaagtaccacttctactgccccggcgaggccaagttcaagagcatcaacaccaccgtgagagtggacaacggccagaagtacaccctgctgatcagacaggagctggacccctgcaacgccgagctgaccatcctgggcagaaacacccagatctgcgagagcatcaaccacgtgctgggcaagcccctgcccaagagcggcagcgtgttcatcggcggcttccccgacctgcacggcaagatccagatgcccgtgcccgtgaagaacttcaccggctgcatcgaggtgatcgagatcaacaactggagaagcttcatccccagcaaggccgtgaagaactaccacatcaacaactgcagaagccagggcttcatgctgagccccaccgccagcttcgtggacgccagcgacgtgacccagggcgtggacaccatgtggaccagcgtgagccccagcgtggccgcccccagcgtgtgccagcaggacgtgtgccacaacggcggcacctgccacgccatcttcctgagcagcggcatcgtgagcttccagtgcgactgccccctgcacttcaccggcagattctgcgagaaggacgccggcctgttcttccccagcttcaacggcaacagctacctggagctgcccttcctgaagttcgtgctggagaaggagcacaacagaaccgtgaccatctacctgaccatcaagaccaacagcctgaacggcaccatcctgtacagcaacggcaacaactgcggcaagcagttcctgcacctgttcctggtggagggcagacccagcgtgaagtacggctgcggcaacagccagaacatcctgaccgtgagcgccaactacagcatcaacaccaacgccttcacccccatcaccatcagatacaccacccccgtgggcagccccggcgtggtgtgcatgatcgagatgaccgccgacggcaagccccccgtgcagaagaaggacaccgagatcagccacgccagccaggcctacttcgagagcatgttcctgggccacatccccgccaacgtgcagatccacaagaaggccggccccgtgtacggcttcagaggctgcatcctggacctgcaggtgaacaacaaggagttcttcatcatcgacgaggccagacacggcaagaacatcgagaactgccacgtgccctggtgcgcccaccacctgtgcagaaacaacggcacctgcatcagcgacaacgagaacctgttctgcgagtgccccagactgtacagcggcaagctgtgccagttcgccagctgcgagaacaacccctgcggcaacggcgccacctgcgtgcccaagagcggcaccgacatcgtgtgcctgtgcccctacggcagaagcggccccctgtgcaccgacgccatcaacatcacccagcccagattcagcggcaccgacgccttcggctacaccagcttcctggcctacagcagaatcagcgacatcagcttccactacgagttccacctgaagttccagctggccaacaaccacagcgccctgcagaacaacctgatcttcttcaccggccagaagggccacggcctgaacggcgacgacttcctggccgtgggcctgctgaacggcagcgtggtgtacagctacaacctgggcagcggcatcgccagcatcagaagcgagcccctgaacctgagcctgggcgtgcacaccgtgcacctgggcaagttcttccaggagggctggctgaaggtggacgaccacaagaacaagagcatcatcgcccccggcagactggtgggcctgaacgtgttcagccagttctacgtgggcggctacagcgagtacacccccgacctgctgcccaacggcgccgacttcaagaacggcttccagggctgcatcttcaccctgcaggtgagaaccgagaaggacggccacttcagaggcctgggcaaccccgagggccaccccaacgccggcagaagcgtgggccagtgccacgccagcccctgcagcctgatgaagtgcggcaacggcggcacctgcatcgagagcggcaccagcgtgtactgcaactgcaccaccggctggaagggcagcttctgcaccgagaccgtgagcacctgcgaccccgagcacgaccccccccaccactgcagcagaggcgccacctgcatcagcctgccccacggctacacctgcttctgccccctgggcaccaccggcatctactgcgagcaggccctgagcatcagcgaccccagcttcagaagcaacgagctgagctggatgagcttcgccagcttccacgtgagaaagaagacccacatccagctgcagttccagcccctggccgccgacggcatcctgttctacgccgcccagcacctgaaggcccagagcggcgacttcctgtgcatcagcctggtgaacagcagcgtgcagctgagatacaacctgggcgacagaaccatcatcctggagaccctgcagaaggtgaccatcaacggcagcacctggcacatcatcaaggccggcagagtgggcgccgagggctacctggacctggacggcatcaacgtgaccgagaaggccagcaccaagatgagcagcctggacaccaacaccgacttctacatcggcggcgtgagcagcctgaacctggtgaaccccatggccatcgagaacgagcccgtgggcttccagggctgcatcagacaggtgatcatcaacaaccaggagctgcagctgaccgagttcggcgccaagggcggcagcaacgtgggcgactgcgacggcaccgcctgcggctacaacacctgcagaaacggcggcgagtgcaccgtgaacggcaccaccttcagctgcagatgcctgcccgactgggccggcaacacctgcaaccagagcgtgagctgcctgaacaacctgtgcctgcaccagagcctgtgcatccccgaccagagcttcagctacagctgcctgtgcaccctgggctgggtgggcagatactgcgagaacaagaccagcttcagcaccgccaagttcatgggcaacagctacatcaagtacatcgaccccaactacagaatgagaaacctgcagttcaccaccatcagcctgaacttcagcaccaccaagaccgagggcctgatcgtgtggatgggcatcgcccagaacgaggagaacgacttcctggccatcggcctgcacaaccagaccctgaagatcgccgtgaacctgggcgagagaatcagcgtgcccatgagctacaacaacggcaccttctgctgcaacaagtggcaccacgtggtggtgatccagaaccagaccctgatcaaggcctacatcaacaacagcctgatcctgagcgaggacatcgacccccacaagaacttcgtggccctgaactacgacggcatctgctacctgggcggcttcgagtacggcagaaaggtgaacatcgtgacccaggagatcttcaagaccaacttcgtgggcaagatcaaggacgtggtgttcttccaggagcccaagaacatcgagctgatcaagctggagggctacaacgtgtacgacggcgacgagcagaacgaggtgacctag

SEQ ID NO: 54757 - protein, 619 aa, Artificial Sequence
  derived and/or modified sequence
MTDKSIVILSLMVFHSSFINGKTCRRQLVEEWHPQPSSYVVNWTLTENICLDFYRDCWFLGVNTKIDTSGNQAVPQICPLQIQLGDILVISSEPSLQFPEINLMNVSETSFVGCVQNTTTEDQLLFGCRLKGMHTVNSKWLSVGTHYFITVMASGPSPCPLGLRLNVTVKQQFCQESLSSEFCSGHGKCLSEAWSKTYSCHCQPPFSGKYCQELDACSFKPCKNNGSCINKRENWDEQAYECVCHPPFTGKNCSEIIGQCQPHVCFHGNCSNITSNSFICECDEQFSGPFCEVSAKPCVSLLFWKRGICPNSSSAYTYECPKGSSSQNGETDVSEFSLVPCQNGTDCIKISNDVMCICSPIFTDLLCKSIQTSCESFPLRNNATCKKCEKDYPCSCISGFTEKNCEKAIDHCKLLSINCLNEEWCFNIIGRFKYVCIPGCTKNPCWFLKNVYLIHQHLCYCGVTFHGICQDKGPAQFEYVWQLGFAGSEGEKCQGVIDAYFFLAANCTEDATYVNDPEDNNSSCWFPHEGTKEICANGCSCLSEEDSQEYRYLCFLRWAGNMYLENTTDDQENECQHEAVCKDEINRPRRILNTVIPHQIQQHIERFIQHDQVGFIVRI

SEQ ID NO: 54758 - DNA, 5450 bp, Artificial Sequence
  derived and/or modified sequence
agaaacaaagtgatacacgctaggcatgtccagacattaaccgtaatcagaagcctcctagggttgcaagcctccttggctaatggttgggctttgtgcctcactcttctcttacacctggggagtcaagtctggatcctctgctccatatttatttagcaaataaaacactgatctcaaacagcaacggaacctgtgtacttgaggtgttttttgaaaactaatcagaagaggaatgcttatctcccaagaaaattgaaaccatctgtaaaagaatcttggctgtgctgtgttttgattagattgaagcttggtgtaaagagaaaacacaaaagaccgcagaatatttacaacatttgaattcctgtttctccatcaaagcacattgtcatcaaagctactttgggtatagaaaaaaggtcaattccaattcccaggaatccttaaccacaactttacttggaaatttccggtaatacttaaaacaccattttgcagcaattctttatgataaactgtaaaatacagctacccgaaaatgactgacaaatcaatcgtcattctgagcctgatggtttttcacagctctttcataaatggaaaaacatgtagacggcaattggtggaagaatggcatccacaaccctcatcatatgtggtaaattggacactaacagaaaacatctgcttggacttctacagagattgctggtttttgggtgtaaacactaaaatagatacttcaggcaatcaagctgttccccagatttgccctttgcaaattcaattaggagatatccttgtaatttcttctgaaccatctcttcaatttccagaaataaatttgatgaatgtttctgaaacatctttcgttggctgtgtgcaaaataccacaacggaagatcagttactttttggctgcagactaaaaggaatgcacactgttaattctaagtggctgagtgttgggacacattattttatcacagttatggcaagtggtccatcaccttgtccactgggacttcgactaaatgtgacagtgaaacagcagttctgccaggaatctctgagttcagaattttgctctggtcatggtaaatgtcttagtgaagcttggagcaagacatatagctgccattgccagcctccattttctggaaaatactgccaggaacttgatgcatgttcttttaaaccatgtaaaaataatggcagttgcattaataaaagagaaaattgggatgagcaagcatatgaatgtgtctgtcacccaccatttacaggaaagaattgctcagaaataattggccagtgtcaaccacatgtctgtttccatggaaactgcagcaatattacttcaaatagtttcatttgtgaatgtgatgagcaattttcaggtccattctgtgaggtgtcagcaaaaccttgtgtttctctgcttttttggaaaagaggaatttgcccaaatagcagttctgcttatacttatgaatgcccaaaaggatcttccagccaaaatggtgaaactgatgtcagtgagttttcattagtaccatgtcagaatggtactgactgcatcaaaatatcaaatgatgttatgtgcatctgttcaccaatatttacagatttgctttgtaagagcattcaaacatcatgtgagtcatttcctttgaggaataatgctacatgtaagaaatgtgagaaagattatccttgcagctgtatatcaggatttactgaaaaaaactgtgagaaagcaattgaccactgtaaactgctcagcatcaactgtctgaatgaagaatggtgtttcaatataattggaagattcaaatatgtatgcattccagggtgcacaaaaaatccatgttggtttttgaagaatgtttacctaattcatcaacacctctgctactgtggagtcaccttccatggtatttgccaagataaaggtcctgctcaatttgaatatgtgtggcaattgggatttgcaggatctgaaggcgaaaagtgccaaggggttattgatgcctatttctttctggctgcaaactgcactgaagatgcaacctatgtgaacgatcctgaagataataattcttcatgttggttcccacatgaaggcacaaaagagatttgtgcaaatggatgcagttgtttgagtgaagaagacagtcaggaatatcggtatctatgttttctcagatgggctggcaacatgtatctggaaaatacaactgatgatcaagaaaatgagtgtcaacatgaagctgtttgtaaagatgaaattaatagacccagaagaatcctcaacacggtgataccacaccaaattcagcaacatatagaaaggtttatacagcatgaccaggtgggatttatcgtaagaatataagtttgatttagtggcttaaaatcaattaatgtaatttaatgtatcaatagaataaataaagaagaaaatgcatgataatgtagatggagaaaaaaattgtattacagaatctcacaacactttatgaaacaaacactcaacaaataaagaataaaagggaacttccacaatctgataagagaagttaaaaaaaaataagaagaatgaagaaacataactaacattatactttacggtgaaaggctgaaagactggaattttaaatcaaaacaatgagataacactttacacccagcaattctacttctagtatatactcaaaaaattgaaaatatatgttctttacaaaaatttatatgtgaatgtttacagttttgttcgaaagagtcaaaaagttgaaacaacccaaatgaccatcaactgatgaatggatatataaaatttgttatatccatacaatgaaatgttattcagcaatagacaaagatgaattactgatatgtgcttcaatacgaataaacattgaaaacattttgataaggaaaagtagtaagccacaaaagacacatagaatagtgctcaacaaatacttgtttaatgaaacaatgattttcagaagcttttttatttactaagaaaattatccttcgttttgtgatgttatttccttttttctgattttgtgattctcttttgtttgccattattttttgatatccagagaatcttggataaattacaaaatttttgtaatttatcaacactttaatgagttcttgatattgtctcataattaatactaacaatggagcccaacaaatgttgcagatacaagtattttatataaaattaagtttctctatatcagttgcaatatctagaaattatatgtgtgataccacctgttataatgtcaaaagatatgcaaaatgtttagaattaaaaaaaagatgctctaattctccattaaaaagaccctctatataccactaagctcaatgaaaaagagaaaattatatatacactgaataaatggaaatataatgcatggagttaaatattaggccttaaattagctaaaatattaattcttcccaaattaattcacacatttaatgcaatagtaaaaatattgcaagttattttagaaactaattatcatgttatatatatttatgaataatattttctaaattatgaagtcatctttgaaaaggaagactaatggggtgggatctgatgaaccatatgacatgacagactacataacacatatgggtgcctttaaaggaaaaaaaataataatgggtcaacagagagctctgacaacaacccgagtatatacgggaactcaatatatgagaaatttggctataatctcatttgaacatacagggttctttagtaaatggtattgaggaaatggctcataataagaccttaaatgaaactggattacaaccttataccttatatagaagtagactctaaatgtgtatagggatctaaaagtttaaggtaaaatgacgatataaatgaaagaaatgtagaaaaatatctttgtgatttcgggatggagaaatttttcaattaaactcaatttataaggcaaaataatgatagtattataatgatagacactaataatgttgatgatgttaacggacacaaagttaatgaatagcgtataaacattttcttttaaagtgtattttaaatgggtgcagattaaaattcattatataaatgatgtattgcaaacaggtctgcatattaccacatttttttgccctgaaatcttcaaaaaatttttctgggggtttataaaatgtttaatgagccaaagactaaatcataccagccatattgttacttaagaccaggaaagatttgctaagtctgggatgttaatttcttaataccatgcccagactgtgaagtgttcatgactcccacctgtttttgaagcctcaaatttatgtctaagtcaccaatccctacttgctaccagaaatatcataacagaatgaaatatattcattcatacatttattatttattgaatctcctctaactggaagatatttttcaaaatgttatgacaatgagacatgatacctgtccccaggtaatgtactatacataggtaagattatacactcttcagaacacatctcatggttcttctgtttcatttagaaagtgaacacatttttaaagtactaaagtaattatttttttcactttctgaacatacaagttgcttgattatagcagtgtgtcttctggctttctttctggaagttttaaatttaacctgtttcctttacaggctattttaggagattcacattttctgtgtaatgttaaatatatccaaaacataattttcagttataagtaagagttctgtttcaaagtgtagaatctaaaagtccataagaaaatcaggtgaagtttcaaaaactatttctgtagagtcaggaggcttgtaaaaatagagctttatgtgaatatggcacaaaagtatagtataatttgaccaggattttcttaaattatttctgatcccaaaagtctaataattatttattctaagactattgtaatttctgccgtgatgtccgtgattttattaacaagttgaatagttggttttaggtttatttatttattttggctatactatgcaaacttttctgccttcaagtaaaagttttatgtgggtatatttttacctttaaagcaaaaaagatatcgaactgcatatgaaagtgtcatattgaatgtatttttgggttggggccagtcttgaaaccactagatcaagtgtctaaatctttttgtctaaggcacttacatacactgatatattttctctctttattatgctctagaaaaccaaataatcttggttcttaaatccttatagtaaaatgatatagaaatcattcatttaagcaattctagagtacatatcattgtattacccatacacataccaaaattattataacaaacttcattaaatgaagcatttttgaataataaa

SEQ ID NO: 54759 - DNA, 1860 bp, Artificial Sequence
  derived and/or modified sequence
atgaccgataaatctatcgttattctgagtcttatggtgtttcacagtagcttcatcaatggcaaaacctgtcgaagacagctggtcgaagaatggcatccacagcccagtagttacgtggtgaattggacattaaccgagaacatctgtctggacttttaccgagactgctggtttcttggagtgaataccaaaatagacaccagtggcaatcaagctgtgcctcagatctgccccctgcaaattcaactaggcgacattttggtgatatcatcagaaccatcacttcagttcccggagatcaacttgatgaacgtgtccgaaactagctttgttgggtgtgtccagaacactacaacagaggaccagttactgtttggttgtagactgaaaggtatgcacacggtcaattctaagtggctctcagtgggcacacactactttataacagtaatggcctctggaccatccccttgtccactggggttgcggctaaatgttactgtgaagcaacagttctgtcaggaatccctgagctctgagttttgtagtggacatggcaagtgcctgtcggaagcttggtcgaagacatacagctgccactgccagcccccgttttccggaaagtactgtcaggagttggacgcctgttcattcaagccttgtaaaaataatggctcatgtatcaataaacgagagaactgggacgaacaggcctatgagtgcgtatgccatccccctttcaccggcaaaaattgttctgagatcataggacagtgtcaaccgcatgtttgctttcatggcaactgttccaatattacatcaaactcttttatatgtgagtgtgacgaacagtttagtggacccttttgcgaagtatcagcaaagccttgtgtgagcctactgttttggaagcggggtatttgccctaacagctcaagcgcctacacctatgaatgccccaaaggctctagttcgcaaaacggcgagacagacgtgagcgaattcagcctagtgccttgtcagaatggcaccgactgcataaaaatctctaatgatgtaatgtgtatttgctctcctatattcaccgatctgctgtgcaagtccattcagacttcttgcgagtcatttccactgcggaacaacgctacatgcaaaaaatgtgagaaggactacccctgttcctgcatctcggggtttaccgaaaagaactgtgagaaagcaattgatcactgcaagctcctatctatcaactgcctcaatgaagaatggtgcttcaacattattggacggttcaagtatgtttgtatccccggatgtaccaaaaacccttgttggttcctgaagaacgtgtacctgatacaccagcatctttgctactgcggagtcactttccatggtatttgccaagacaagggaccggcccaattcgagtacgtgtggcagcttggtttcgcaggcagcgagggcgagaagtgtcagggagtcattgatgcctatttctttctcgccgcaaactgcactgaagacgccacctatgtgaatgatccagaggacaacaatagcagctgctggtttccccatgaaggcaccaaagagatatgtgcaaatggatgttcttgcctctctgaagaggatagccaagaatatagatacttatgtttcctgaggtgggctggcaatatgtatctcgagaacacgacagacgaccaagagaacgagtgccagcacgaggctgtgtgtaaggatgagatcaataggccccggcgaattctgaatacagtgatccctcatcaaattcagcagcatatagaaagatttattcagcatgaccaagtgggctttatagtccgcatttag

SEQ ID NO: 54760 - DNA, 1860 bp, Artificial Sequence
  derived and/or modified sequence
atgacagacaagagcatcgtcatcctgagcctgatggtgttccacagcagcttcatcaacgggaagacctgccggcggcagctggtggaggagtggcacccccagcccagcagctatgtggtgaactggaccctgacagagaacatctgcctggacttctacagagactgctggttcctgggcgtgaacaccaagattgacaccagcggcaaccaggccgtgccccagatctgccccctgcagatccagctgggggacatcctggtgatcagcagcgagcccagcctgcagtttcctgagatcaacctgatgaatgtgtctgagaccagctttgtgggctgtgtgcagaacaccaccacagaggaccagctgctgtttggctgccgcctgaagggcatgcacacagtgaacagcaagtggctgtctgtgggcacccactacttcatcaccgtgatggccagcggccccagcccctgccccctgggcctgcggctgaatgtgacagtgaagcagcagttctgccaggagagcctgagcagcgagttctgcagcggccacggcaagtgcctgtctgaggcctggagcaagacctacagctgccactgccagccccccttcagcggcaagtactgccaggagctggatgcctgcagcttcaagccctgcaagaacaacggcagctgcatcaacaagcgggagaactgggatgagcaggcctatgaatgtgtgtgccacccccccttcaccgggaagaactgcagcgagatcatcggccagtgccagccccacgtgtgcttccacggcaactgcagcaacatcaccagcaacagcttcatctgtgaatgtgatgagcagttcagcggccccttctgtgaggtgtctgccaagccctgtgtgtccctgctcttctggaagaggggcatctgccccaacagcagcagcgcctacacctatgaatgtcccaagggcagcagcagccagaatggagaaacagatgtgtctgagttcagcctggtgccctgccagaatggaacagactgcatcaagatcagcaatgatgtgatgtgcatctgcagccccatcttcacagacctgctgtgcaagagcatccagaccagctgtgagagcttccccctgaggaacaatgccacctgcaagaagtgtgagaaggactacccctgcagctgcatcagcggcttcacagagaagaactgtgagaaggccatcgaccactgcaagctgctgagcatcaactgcctgaatgaggagtggtgcttcaacatcatcggccgcttcaagtatgtgtgcatccctggctgcaccaagaacccctgctggttcctgaagaatgtgtacctgatccaccagcacctgtgctactgtggggtgaccttccacggcatctgccaggacaagggccctgcccagtttgaatatgtgtggcagctgggctttgctggcagcgagggggagaagtgccagggcgtgattgatgcctacttcttcctggccgccaactgcacagaagatgccacctacgtgaatgaccctgaggacaacaacagcagctgctggttcccccatgagggcaccaaggagatctgtgccaacggctgcagctgcctgtctgaggaggacagccaggagtaccgctacctgtgcttcctgcgctgggccggcaacatgtacctggagaacaccacagatgaccaggagaatgaatgccagcatgaagctgtgtgcaaggatgagatcaaccggccccggcgcatcctgaacacagtcatcccccaccagatccagcagcacatcgagcgcttcatccagcacgaccaggtgggcttcatcgtgcgcatctag

SEQ ID NO: 54761 - DNA, 1860 bp, Artificial Sequence
  derived and/or modified sequence
atgaccgacaagagcatcgtgatcctgagcctgatggtgttccacagctcgtttatcaatggcaagacctgtaggaggcagttggttgaggagtggcacccccagccaagcagctatgtagtaaactggaccctcactgagaacatttgcctggatttctacagagattgctggttcttgggcgttaataccaaaattgacacttcaggcaatcaagcagtccctcagatctgtccgctgcaaatccagttgggggacattcttgtcatctcatcagagccctcactccagttcccagaaattaatctcatgaacgtctctgagacgtcttttgtaggatgcgtgcaaaacaccactaccgaggaccaactcctgttcggatgcagactgaaggggatgcacaccgtcaattcaaagtggctgtctgttggaacgcactattttatcactgttatggcgagcggaccctcaccttgcccccttgggctgcgacttaatgtcaccgttaaacagcagttctgccaggaaagcctatcaagcgagttctgcagcggacacggcaagtgtttatcggaggcgtggtcgaagacgtacagctgtcactgtcagcctcctttcagcggcaagtattgtcaggaactggatgcctgtagctttaaaccctgcaagaataatggcagctgtatcaacaagcgcgagaactgggatgaacaggcatatgagtgcgtttgtcatcccccctttacaggaaagaactgtagtgagattattggacagtgccagccacacgtgtgtttccacggcaattgttcaaacattacctcaaattccttcatctgcgagtgtgatgaacagtttagcggccccttctgtgaggtttccgctaagccctgtgtaagcctcctgttttggaagcggggtatatgcccaaatagctcctctgcatacacctacgaatgtccaaagggcagcagttcacagaacggcgaaaccgatgtgagtgaattctcactggtgccttgtcagaatggaaccgattgcatcaaaatcagcaacgatgtgatgtgcatttgttcgcctatattcactgaccttctgtgcaagtcaatccaaacctcctgcgagagttttccgcttagaaacaacgctacgtgtaaaaagtgtgagaaggactacccttgttcctgcatttctggttttacggagaagaactgtgagaaggcgatcgaccactgtaagctgttgtccatcaactgcctgaatgaggagtggtgcttcaatattatcggccgctttaaatacgtgtgtatccctgggtgcactaagaacccgtgctggtttctgaaaaatgtatatctgatccatcaacatctgtgctattgtggcgtcacctttcatgggatctgtcaggacaagggtcctgcacagtttgagtacgtctggcaactgggcttcgctggatctgaaggggaaaagtgtcagggagtcatcgacgcatactttttcctcgccgccaactgcactgaggacgctacctacgtgaatgaccccgaagataataacagtagctgttggttcccccatgaaggcactaaggagatctgcgccaatggctgcagttgcctatcagaggaggatagtcaggagtatcggtatctttgctttctaagatgggcaggtaacatgtatctcgaaaacactacagatgaccaggaaaatgagtgtcaacatgaagctgtttgcaaagatgagataaatcggccacgtcgtatcctgaacacggttattccacatcagatccagcagcatatagagcggtttatccagcacgaccaggtcggcttcattgtgagaatctag

SEQ ID NO: 54762 - DNA, 1860 bp, Artificial Sequence
  derived and/or modified sequence
atgactgataaatctatagtgattctgagtctgatggtcttccattcttcctttatcaacggaaagacctgtcgacggcaattggtcgaggagtggcacccccagccctcaagctatgttgtgaattggactttaactgaaaatatctgtttggacttctatcgtgactgttggtttctgggggtgaatacgaaaattgatacttctggcaaccaggccgtccctcagatctgtccactccagatccagttaggggatatcctggtgatcagctcagaaccctcgcttcagtttcctgagatcaacttgatgaatgtgagcgagacatctttcgtgggttgcgtccagaataccacgactgaggaccagctcctgtttggctgtcggctgaagggtatgcacactgtgaacagcaagtggttatcagtggggacccactatttcataactgtcatggcttctggtccaagcccctgtccactgggtctaaggctcaacgtgacagtcaaacagcagttttgccaggagtcactgtccagcgagttttgttccggacacggaaagtgcctgtccgaggcctggtcgaagacttactcctgtcattgtcaaccacccttcagcgggaagtattgtcaggagctggatgcttgctcattcaagccttgtaagaacaatggaagttgcatcaataaaagagaaaactgggatgagcaggcctacgaatgtgtgtgccaccctcccttcactggcaagaactgcagcgagatcattgggcagtgtcagccacacgtgtgttttcatgggaattgcagtaatataacctccaacagctttatctgtgaatgtgacgaacagttttcagggccattctgcgaagtgagcgctaagccctgtgtaagcctcttattttggaagagaggtatctgtcccaacagcagcagtgcctacacatatgagtgccctaagggctctagctcacaaaacggggagacggatgtgtctgaatttagtctcgttccatgccaaaatggtactgactgtattaagatatcaaatgatgttatgtgcatttgcagccccatatttaccgatctgttatgcaagagtatacaaacatcctgtgaatcatttcccctccggaacaacgccacctgtaagaaatgcgaaaaagactatccctgtagctgtattagcggctttacagaaaaaaactgtgagaaagctattgaccactgtaagctcctctcaataaattgcctgaatgaggaatggtgctttaatatcattggtcgcttcaaatacgtttgtatccccggttgtactaagaatccgtgttggttccttaagaatgtctacctgattcatcagcatctttgttactgtggggtgacctttcacggaatatgccaggataaggggccagcacaatttgaatacgtctggcagctggggttcgccggaagtgaaggcgaaaagtgtcagggcgtgatagatgcatatttctttctggcagccaactgtaccgaagacgcaacctacgttaatgatcctgaggacaacaatagtagctgttggtttccacatgagggaacaaaggagatttgtgccaatgggtgttcgtgcttaagcgaagaggattctcaagagtatcgttatttgtgtttcctgcggtgggccggaaatatgtacctggaaaataccacggatgaccaggaaaacgaatgccagcatgaggccgtctgtaaggacgagatcaaccgcccacggcgaattctgaacaccgtgatcccccaccaaatccagcagcacatcgagcgctttattcagcacgaccaggtaggtttcatcgtcagaatttag

SEQ ID NO: 54763 - DNA, 1860 bp, Artificial Sequence
  derived and/or modified sequence
atgaccgacaagagcatcgtgatcctgagcctgatggtgttccacagcagcttcatcaacggcaagacctgcagaagacagctggtggaggagtggcacccccagcccagcagctacgtggtgaactggaccctgaccgagaacatctgcctggacttctacagagactgctggttcctgggcgtgaacaccaagatcgacaccagcggcaaccaggccgtgccccagatctgccccctgcagatccagctgggcgacatcctggtgatcagcagcgagcccagcctgcagttccccgagatcaacctgatgaacgtgagcgagaccagcttcgtgggctgcgtgcagaacaccaccaccgaggaccagctgctgttcggctgcagactgaagggcatgcacaccgtgaacagcaagtggctgagcgtgggcacccactacttcatcaccgtgatggccagcggccccagcccctgccccctgggcctgagactgaacgtgaccgtgaagcagcagttctgccaggagagcctgagcagcgagttctgcagcggccacggcaagtgcctgagcgaggcctggagcaagacctacagctgccactgccagccccccttcagcggcaagtactgccaggagctggacgcctgcagcttcaagccctgcaagaacaacggcagctgcatcaacaagagagagaactgggacgagcaggcctacgagtgcgtgtgccacccccccttcaccggcaagaactgcagcgagatcatcggccagtgccagccccacgtgtgcttccacggcaactgcagcaacatcaccagcaacagcttcatctgcgagtgcgacgagcagttcagcggccccttctgcgaggtgagcgccaagccctgcgtgagcctgctgttctggaagagaggcatctgccccaacagcagcagcgcctacacctacgagtgccccaagggcagcagcagccagaacggcgagaccgacgtgagcgagttcagcctggtgccctgccagaacggcaccgactgcatcaagatcagcaacgacgtgatgtgcatctgcagccccatcttcaccgacctgctgtgcaagagcatccagaccagctgcgagagcttccccctgagaaacaacgccacctgcaagaagtgcgagaaggactacccctgcagctgcatcagcggcttcaccgagaagaactgcgagaaggccatcgaccactgcaagctgctgagcatcaactgcctgaacgaggagtggtgcttcaacatcatcggcagattcaagtacgtgtgcatccccggctgcaccaagaacccctgctggttcctgaagaacgtgtacctgatccaccagcacctgtgctactgcggcgtgaccttccacggcatctgccaggacaagggccccgcccagttcgagtacgtgtggcagctgggcttcgccggcagcgagggcgagaagtgccagggcgtgatcgacgcctacttcttcctggccgccaactgcaccgaggacgccacctacgtgaacgaccccgaggacaacaacagcagctgctggttcccccacgagggcaccaaggagatctgcgccaacggctgcagctgcctgagcgaggaggacagccaggagtacagatacctgtgcttcctgagatgggccggcaacatgtacctggagaacaccaccgacgaccaggagaacgagtgccagcacgaggccgtgtgcaaggacgagatcaacagacccagaagaatcctgaacaccgtgatcccccaccagatccagcagcacatcgagagattcatccagcacgaccaggtgggcttcatcgtgagaatctag

SEQ ID NO: 54764 - protein, 174 aa, Artificial Sequence
  derived and/or modified sequence
  misc_feature (1)..(1): Xaa can be any naturally occurring amino acid
XIDAGTQIFFSYAIGLGALTALGSYNRFNNNCYNGTSFFAGFVVFSILGFMAAEQGVHISKVAESGPGLAFIAYPRAVTLMPVAPLWAALFFFMLLLLGLDSQFVGVEGFITGLLDLLPASYYFRFQREISVALCCALCFVIDLSMVTDGGMYVFQLFDYYSASGTTLLWQAFW

SEQ ID NO: 54765 - DNA, 525 bp, Artificial Sequence
  derived and/or modified sequence
tgaatcgacgccggcacccagatcttcttcagctacgccatcggcctgggcgccctgaccgccctgggcagctacaacagattcaacaacaactgctacaacggcaccagcttcttcgccggcttcgtggtgttcagcatcctgggcttcatggccgccgagcagggcgtgcacatcagcaaggtggccgagagcggccccggcctggccttcatcgcctaccccagagccgtgaccctgatgcccgtggcccccctgtgggccgccctgttcttcttcatgctgctgctgctgggcctggacagccagttcgtgggcgtggagggcttcatcaccggcctgctggacctgctgcccgccagctactacttcagattccagagagagatcagcgtggccctgtgctgcgccctgtgcttcgtgatcgacctgagcatggtgaccgacggcggcatgtacgtgttccagctgttcgactactacagcgccagcggcaccaccctgctgtggcaggccttctggtag

SEQ ID NO: 54766 - DNA, 525 bp, Artificial Sequence
  derived and/or modified sequence
tgaatcgatgcaggaactcagattttcttttcctacgccattggactgggtgccctgacagcccttgggtcttataatcgttttaacaacaactgttataatgggacctccttttttgctggattcgttgtgttctcgatcctggggttcatggcagccgaacagggcgtgcacatttctaaagtggctgagtcaggccccggcttagctttcattgcatatccgagagctgtgacccttatgcctgtcgccccgctttgggctgcactatttttcttcatgctcttactgctgggcttggattctcagtttgtcggcgtcgaaggcttcatcacaggtctcttagacctgttacctgctagctattattttcgttttcagagagagatttctgtggcgctttgctgcgcgctgtgtttcgtaattgacctgagcatggttaccgacggaggcatgtatgtatttcagctcttcgattactatagtgcttcgggcaccacgctcctatggcaggccttttggtag

SEQ ID NO: 54767 - DNA, 525 bp, Artificial Sequence
  derived and/or modified sequence
tgaattgatgctggcacccagatcttcttctcctatgccatcggcctgggcgccctgacagccctgggcagctacaaccgcttcaacaacaactgctacaacggcaccagcttctttgctggctttgtggtgttcagcatcctgggcttcatggctgctgagcagggcgtgcacatcagcaaggtggccgagagcggccctggcctggccttcatcgcctaccccagggctgtgaccctgatgcctgtggcccccctgtgggccgccctcttcttcttcatgctgctgctgctgggcctggacagccagtttgtgggcgtggagggcttcatcaccggcctgctggacctgctgcctgccagctactacttccgcttccagcgggagatctctgtggccctgtgctgtgccctgtgcttcgtcatcgacctgtccatggtgacagatggcggcatgtatgtgttccagctgtttgactactacagcgccagcggcaccaccctgctgtggcaggccttctggtag

SEQ ID NO: 54768 - DNA, 525 bp, Artificial Sequence
  derived and/or modified sequence
tgaatcgacgccggcacccagatcttcttcagctacgccatcggcctaggcgcacttactgctctgggttcatataatagattcaacaacaactgctacaatgggacctctttctttgccggattcgtggtgttcagcattcttgggtttatggcagccgaacagggagtacacatcagtaaggtggccgagtctggccccgggctggcattcattgcctaccctagggctgtcacgctcatgcctgtcgcgccactgtgggctgccttgtttttcttcatgttactgcttctcgggctggactcccagttcgtgggtgtagaggggttcattacgggacttttggatctgctgccggcctcatactacttcaggttccagagggagattagtgtggctctttgttgtgccctctgcttcgtgattgatctgagcatggtcacagacggaggcatgtacgttttccagttgttcgactactatagtgcgtctgggaccactcttctgtggcaggctttttggtag

SEQ ID NO: 54769 - DNA, 525 bp, Artificial Sequence
  derived and/or modified sequence
tgaatagacgccggaactcagatcttcttcagctatgctatcgggctgggcgctctgaccgcattgggttcctataacaggttcaataacaattgttacaatggcacctcttttttcgcagggttcgtagtgttctccattctcggattcatggctgcggaacagggagttcatatcagcaaggttgctgagagcgggcctggcctggcattcatagcttaccctcgtgctgtgactttaatgcccgtcgccccactttgggcagccctgtttttcttcatgctgttactgctggggttggatagtcaatttgttggagtggagggattcattacaggtctcctggacttactgcccgcatcgtactactttcggttccaaagagagattagcgtagctctgtgctgtgccctgtgctttgttattgatctgagtatggtaacggacggaggaatgtacgtatttcagttattcgattattatagtgcaagtggcaccaccctgttgtggcaggctttctggtag

SEQ ID NO: 54770 - DNA, 523 bp, Artificial Sequence
  derived and/or modified sequence
ggatagatgcggggacccagattttcttttcttacgccattggcctgggggccctcacagccctgggcagctacaaccgcttcaacaacaactgctacaatgggaccagcttctttgctggcttcgtggtcttctccatcctgggcttcatggctgcagagcagggcgtgcacatctccaaggtggcagagtcagggccgggcctggccttcatcgcctacccgcgggctgtcacgctgatgccagtggccccactctgggctgccctgttcttcttcatgctgttgctgcttggtctcgacagccagtttgtaggtgtggagggcttcatcaccggcctcctcgacctcctcccggcctcctactacttccgtttccaaagggagatctctgtggccctctgttgtgccctctgctttgtcatcgatctctccatggtgactgatggcgggatgtacgtcttccagctgtttgactactactcggccagcggcaccaccctgctctggcaggccttttggga

SEQ ID NO: 54771 - protein, 729 aa, Artificial Sequence
  derived and/or modified sequence
MLPTLQIQGPAAFAPGDRGPGRHCPFPVPITPTGALLPVSDSCDSLVDLVWPSVTYLALGTQSRVWPHPLGAPGQAGESPEQRRQCLELWDMASSLGDKVPRAACGKRGQTVWQLHLACLCLAQFHSPPAQPPPLSRRGGGPDPDPISRSLPGPPTPALPTHSYSSHSPRAPRLLSPLRRAPRGSPAPHRHASLQTNEAPRELPHCTWPGLPGRSLAPSFLWREPWLGGQWGPLNIPARKGDRRRWEWGCEGGGATASAEQPGPQIVYFTATFPYVVLVVLLVRGVLLPGALDGIIYYLKPDWSKLGSPQVWIDAGTQIFFSYAIGLGALTALGSYNRFNNNCYKDAIILALINSGTSFFAGFVVFSILGFMAAEQGVHISKVAESGPGLAFIAYPRAVTLMPVAPLWAALFFFMLLLLGLDSQVCMGLWDREPGGGRREGCRQGKGWRRCGARPELPWPQFVGVEGFITGLLDLLPASYYFRFQREISVALCCALCFVIDLSMVTDVSGVGGLPVTSGGRLPSSLTGLCPQGGMYVFQLFDYYSASGTTLLWQAFWECVVVAWVYGRSWLRAGLGDGGGEGRSPAWPASPRGADRFMDDIACMIGYRPCPWMKWCWSFFTPLVCMGIFIFNVVYYEPLVYNNTYVYPWWGEAMGWAFALSSMLCVPLHLLGCLLRAKGTMAERWQHLTQPIWGLHHLEYRAQDADVRGLTTLTPVSESSKVVVVESVM

SEQ ID NO: 54772 - protein, 520 aa, Artificial Sequence
  derived and/or modified sequence
MKAGSINVWNICPLFKGLGYASMVIVFYCNTYYIMVLAWGFYYLVKSFTTTLPWATCGHTWNTPDCVEIFRHEDCANASLANLTCDQLADRRSPVIEFWENKVLRLSGGLEVPGALNWEVTLCLLACWVLVYFCVWKGVKSTGKIVYFTATFPYVVLVVLLVRGVLLPGALDGIIYYLKPDWSKLGSPQVWIDAGTQIFFSYAIGLGALTALGSYNRFNNNCYKDAIILALINSGTSFFAGFVVFSILGFMAAEQGVHISKVAESGPGLAFIAYPRAVTLMPVAPLWAALFFFMLLLLGLDSQFVGVEGFITGLLDLLPASYYFRFQREISVALCCALCFVIDLSMVTDGGMYVFQLFDYYSASGTTLLWQAFWECVVVAWVYGADRFMDDIACMIGYRPCPWMKWCWSFFTPLVCMGIFIFNVVYYEPLVYNNTYVYPWWGEAMGWAFALSSMLCVPLHLLGCLLRAKGTMAERWQHLTQPIWGLHHLEYRAQDADVRGLTTLTPVSESSKVVVVESVM

SEQ ID NO: 54773 - DNA, 867 bp, Artificial Sequence
  derived and/or modified sequence
atgtacgtgttccagctgttcgactactacagcgccagcggcaccaccctgctgtggcaggccttctgggagtgcgtggtggtggcctgggtgtacggcgccgacagattcaccgacgacatcgcctgcatgatcggctacagaccctgcccctggatgaagtggtgctggagcttcttcacccccctggtgtgcatgggcatcttcatcttcaacgtggtgtactacgagcccctggtgtacaacaacaccaacgtgtacccctggtggggcgaggccatgggctgggccttcgtgctgagcagcatgctgtgcatgcccctgcacctgctgggctgcctgctgagagccaagggcaccatggccgagtgctggaagcacctgacccagcccatctggggcctgcaccacctggagtacagagcccaggacgccgacgtgagaggcctgaccaccctgacccccgtgagcgagagcagcaaggtggtggtggtggagagcgtgatgggccagctgagcagccaccaccagctgaccagcggcctgtggggcaagagactgcagtacagcatcctgggcgtgtgggccgccaacctggcctgcagcggcttccccccctgcgccctgggctgggcccagccccaggagggcacccccgacaccgcccccaccagcagactgaaggccgacgccctgcccgccccccccgtgttctgcgtggccgccctgacccacgtgtgcctgagcagacccgtgcccagaagactgagcgaccccaagaagggcttccccgacaccagaaccgaggccggcggcctgggcctgagagagggcggcggccccgccggcaccttcctgctgtgctag

SEQ ID NO: 54774 - DNA, 867 bp, Artificial Sequence
  derived and/or modified sequence
atgtacgtgtttcagctttttgactattactctgcttcaggcaccaccttactatggcaggctttctgggagtgtgtcgttgtggcttgggtttacggagccgatagatttacagacgacatcgcttgtatgattggataccgcccctgcccctggatgaaatggtgttggagttttttcactcctctcgtctgcatgggcattttcattttcaacgtggtgtattatgagcccctggtctataacaatacaaatgtctatccttggtggggagaagctatgggctgggcttttgtattgtcttctatgttgtgcatgcccctccaccttcttggctgccttctgcgcgctaaagggaccatggccgagtgttggaagcacctgacacagccaatctgggggctgcaccatttagaataccgagcccaggacgccgatgtgcggggcttgaccacacttacgcccgtatccgagtcatcgaaagtcgtggtggtagaatccgtgatgggtcaactgagcagccaccatcagctaacttccggcctttggggaaaaagacttcagtattcgatcctgggagtgtgggctgctaacctggcctgtagcggtttccccccctgtgcacttggctgggcgcaaccccaggaaggcacaccagatacagccccaactagccgacttaaagccgatgctttaccagccccgccagtcttctgtgtcgccgcgctgacccacgtgtgtctgtccagaccagttcccaggagactgagcgatcctaagaagggttttccagacacgcggacagaagcggggggtttgggcttgcgagaaggaggtggccctgctgggacattcctgctctgctag

SEQ ID NO: 54775 - DNA, 867 bp, Artificial Sequence
  derived and/or modified sequence
atgtatgtgttccagctgtttgactactacagcgccagcggcaccaccctgctgtggcaggccttctgggagtgtgtggtggtggcctgggtgtatggagctgaccgcttcacagatgacatcgcctgcatgattggctaccggccctgcccctggatgaagtggtgctggagcttcttcacccccctggtgtgcatgggcatcttcatcttcaacgtggtgtactatgagcccctggtgtacaacaacaccaacgtgtacccctggtggggcgaggccatgggctgggcctttgtgctgagctccatgctgtgcatgcccctgcacctgctgggctgcctgctgcgggccaagggcaccatggccgagtgctggaagcacctgacccagcccatctggggcctgcaccacctggagtaccgggcccaggatgctgatgtgcggggcctgaccaccctgacccctgtgtctgagagcagcaaggtggtggtggtggagagcgtgatgggccagctgagcagccaccaccagctgaccagcggcctgtggggcaagaggctgcagtacagcatcctgggcgtgtgggccgccaacctggcctgcagcggcttccccccctgtgccctgggctgggcccagccccaggagggcaccccagacacagcccccaccagccggctgaaggcagatgccctgcctgcccctcctgtgttctgtgtggccgccctgacccacgtgtgcctgagcaggcctgtgccccggcggctgagtgaccccaagaagggcttcccagacaccaggacagaggccggcggcctgggcctgcgggagggcggcggccctgctggcaccttcctgctgtgctag

SEQ ID NO: 54776 - DNA, 867 bp, Artificial Sequence
  derived and/or modified sequence
atgtacgtgttccagctgttcgactactacagcgccagcggcaccaccctgctctggcaggcattttgggaatgtgtcgtggtggcctgggtttatggcgccgatcggtttacagacgatatcgcctgtatgattggctaccggccctgcccctggatgaagtggtgttggagttttttcacccctttggtttgcatgggcatctttatcttcaatgtagtctactacgaacccttagtatacaacaacaccaatgtctacccctggtggggagaagccatgggatgggcatttgtgttgtcttccatgctgtgtatgccactccacctgctgggctgcctccttcgggctaaaggcacaatggccgagtgctggaagcacctgacccagcctatctggggtttgcatcacctggaatatcgggcacaagacgccgatgtccgaggattgaccacattgactcccgtctccgagagttctaaggttgttgtcgttgagtccgtgatgggacaactgtccagtcatcaccaactgactagtggcttgtgggggaagcggcttcagtactctatactgggagtgtgggccgcaaacctcgcctgctccggcttcccaccatgcgccctgggctgggcccagccccaggagggaacaccagacacagcccccacatcccgcttaaaagctgacgccctcccagctcccccagtcttttgcgttgctgccctgacgcacgtgtgcctgagtaggcccgtccctcgccgcctcagcgaccctaagaagggctttcctgacacacgcactgaggccggcggactcggcctgcgtgagggcggcggtccagccggcacgttcttactctgttag

SEQ ID NO: 54777 - DNA, 867 bp, Artificial Sequence
  derived and/or modified sequence
atgtatgtgttccagttgttcgattactactcagcgtccggcaccaccctgttatggcaagctttttgggagtgtgtggttgtggcctgggtgtatggggcagaccgctttacggacgatattgcgtgcatgattggctatagaccttgtccttggatgaagtggtgctggtccttcttcacacccctggtctgtatggggatctttatctttaacgtcgtttactatgagcctctggtgtataataacaccaatgtctacccgtggtggggcgaagcaatgggctgggccttcgttctgagtagcatgttatgcatgcctctgcatctgctaggctgtctgttacgcgcaaaaggcaccatggcagaatgctggaagcatctcactcagcctatttggggcctgcaccacttggaataccgggctcaggacgccgacgtccggggactgaccactttgacccctgtaagcgagtcaagcaaggttgtagtggtggaatcagtgatgggtcagttgtcttctcaccaccaactgacctcaggactttgggggaagcgtctgcagtactctatcctgggcgtctgggccgcaaatttggcctgcagcggcttcccaccttgtgccttggggtgggcgcagccacaggagggcacaccagatacagccccaacctcaaggctcaaggccgacgcgctgcccgctcctcctgtcttctgcgttgcggcactgacccacgtgtgcctgagcagaccggtgccccgtaggctgtcagatccaaagaaggggtttcctgatacaagaacagaagccggtggcctgggcctcagggagggaggcggtcctgccggaacgtttctgctgtgttag

SEQ ID NO: 54778 - DNA, 3839 bp, Artificial Sequence
  derived and/or modified sequence
aagtccgggcagcggttggcccctgggcacgcggggtcggggccgcccctggtccaccgctgctgctcggtggctgggccgtccgcctccacccctctcgcagtcatgtgcctggcagggtgaggggcgggggccggcgatgcccgcgaggctgccccccagactcctgggctggaaggagcgattggccgccgaggtgggaaagcaggcctgcgccttggggtctcctcgaagtgtgttccttattccctgcatcctgatagccctggtcggaggaatccccattttcttcttggagatctcgctgggccagttcatgaaggccggcagcatcaatgtctggaacatctgtcccttgttcaaaggtgagcagcccttggccagcctcagggactgcccccttttcccagctggctcccacttgagaaatcttttcctgtcctgagcaccaggcctggggccacgtgatggcatcccagtctcgaggggggagcctggaggagatgttcaggccgcacagtgaacttggggaagcagggactagagggggcataggcagctccacaaggcaaggacaggccaggcatagccgggctggggatgggacctgcccagcacacttggctctctaggtaggtcctactattactgtccccaaggacgctggggcacagacaggtggagcgacgtactgaggttgcccactacgggggcaactgtctccaacactacctcaggctactagaaactccccccctccccaccaccaccaccaccagctgctgaggactggagctactgggtggccaggtggaggcttggacctcctggaaccgccatggtggcagtgggacccacagaaggggccaggtgtgtaaggctggagactcaacagcacttggtcagatggggacaggaggagaggggctcgctctgccttgggtctagggggcggctggaggagaggagagaggctggggagtcagcccagtgttggggctcacacaagggggagtccaggggagtcaggagcaccacaaacaaggctccagaaggacagacggtgggagcactgccagcctgggtggggagataaaggggtggcaggggaggtggccaggaaagaatctacatggcaaggacttcccggccccaggcctgggctatgcctccatggtgatcgtcttctactgcaacacctactacatcatggtgctggcctggggcttctattacctggtcaagtcctttaccaccacgctgccctgggccacatgtggccacacctggaacactcccgactgtgtggagatcttccaccatgaagactgtgccagtgccagcctggccaacctcacttgtgaccagcttgctgaccgccagtcccctgtcatcgagttctgggagaacaaagtcttgaggctgtctgggggactggaggtgccaggggccctcaactgggaggtgaccctttgtctgctggcctgctgggtgctggtctacttctgtgtctgaaagggggtcaaatccatgggaaaggtaccactagaggcatgcaggggggagggtggctcagccctgggagctggatgtctgtgccaggcacacccgtggcaacgggaggtgaccagacagagtctagccctaaggaagggggaggtactgaaagccaagcaacactccccaccctgcaaatccagggcccagcagcctttgctcctgtggggagaggccccagcaggcactgtcccttccctgtgcccatcacccccaccggtgccctcctgccagtctctgactcttgtgacagtctgctggacctggtctggccatctgttacctgcctatcttgccttggggacacagagcagagtctggccacatcccttgggggctcctggtcaggctggggagtcacctgaacaaagaagacaatgtccagagctgtgggacatggccagctccctgggggacaaggtccccagagcagcatgtgggaagagggggcagacagtgtggcagccgcatcttgcctgcctctgcctggcccagttccactcttcacctgctcagccccgacctctctccagaagaggaggggggcccggccctgatccaatatcccgctccctgcctgggcctcccatgcgtgcactgcccacacactcacacagctctcactccccacatgctccatgcctcctgtccccactgaggagagctcccagaggctcgcccgctccccactgacatgcatccctgcagacaaacgaggcgcccagagagcttccccactgcacttgccagggctgccggggcccagccttgcccctagcttcctctggcgggagctatggctcggaggagaatggggacctctgaacatacctgcccgcaagggggaccggaggtgctcggagtgggcttgtgagggaggtggtgccgcagtccccgctgagcagcctggccccccagatcgtgtacttcactgctacattcccctacgtggtcctggtcgtgctgcttgtgcttggagtgctgctgcctggcgccctggacagcatcatttactatctcaagcctgactggtcaaagctggggtcccctcaggtgaggtggaggtggggaggctgcagcagggtgttgtgggggagccctgcaggcccctcatgcctgcactctccagccctcctctaggtatggatagatgtggggacccagattttcttttcttatgccattggcctgggggccctcacagccctgggcagctacaaccgcttcaacaacaactgctacaagacgccatcatcctggctgtcatcaacagtgggaccagcttctttgctggcttcgtggtcttctccatcctgggcttcatggctgcagagcagggcatgcacatctccaaggtggcagagtcagggtgggatgtatgtcttccagctgtttgactactactcagccagcggcaccaccctgctctggcaggccttttgggagtgcgtggtggtggcctgggtgtatggagctgaccgcttcacggacgacattgcctgtatgatcgggtaccgaccttgcccctggatgaaatggtgctggtccttcttcaccccgctggtttgcatgggcatcttcatcttcaacgttgtgtactacgagccgctggtctacaacaacaccaacgtgtacccgtggtggggtgaggccatgggctgggccttcgtgctgtcctccatgctgtgcatgccactgcacctcctgggctgcctcctcagggccaagggcaccatggctgagtgctggaagcacctgacccagcccatctggggcctccaccacttggagtaccgagctcaggatgcagatgtcaggggcctgaccaccctgaccccagtgtccgagagcagcaaggtcgtcgtggtggagagtgtcatgggacagctcagctcacatcaccagctcacctctggtctgtggggcaagaggctgcaatattccatcctgggtgtctgggctgctaacctggcctgctcaggcttcccaccctgtgccctgggctgggcacagccccaggaagggaccccggacacggctcccacatccaggctcaaggcggatgcacttcctgcacctccagtcttctgtgtagcggctttaacccacgtatgtctgtcacgtccagtcccgagacggctgagtgaccccaagaaaggcttccctgacacccggacagaggctggagggctggggctgcgtgagggtggtgggcctgcggggacattcttactgtgctaaaaagccactgcaaacatagcaataaaaacctgtcattttcc

SEQ ID NO: 54779 - DNA, 2190 bp, Artificial Sequence
  derived and/or modified sequence
atgctgcccaccctgcagatccagggccccgccgccttcgcccccggcgacagaggccccggcagacactgccccttccccgtgcccatcacccccaccggcgccctgctgcccgtgagcgacagctgcgacagcctggtggacctggtgtggcccagcgtgacctacctggccctgggcacccagagcagagtgtggccccaccccctgggcgcccccggccaggccggcgagagccccgagcagagaagacagtgcctggagctgtgggacatggccagcagcctgggcgacaaggtgcccagagccgcctgcggcaagagaggccagaccgtgtggcagctgcacctggcctgcctgtgcctggcccagttccacagcccccccgcccagcccccccccctgagcagaagaggcggcggccccgaccccgaccccatcagcagaagcctgcccggcccccccacccccgccctgcccacccacagctacagcagccacagccccagagcccccagactgctgagccccctgagaagagcccccagaggcagccccgccccccacagacacgccagcctgcagaccaacgaggcccccagagagctgccccactgcacctggcccggcctgcccggcagaagcctggcccccagcttcctgtggagagagccctggctgggcggccagtggggccccctgaacatccccgccagaaagggcgacagaagaagatgggagtggggctgcgagggcggcggcgccaccgccagcgccgagcagcccggcccccagatcgtgtacttcaccgccaccttcccctacgtggtgctggtggtgctgctggtgagaggcgtgctgctgcccggcgccctggacggcatcatctactacctgaagcccgactggagcaagctgggcagcccccaggtgtggatcgacgccggcacccagatcttcttcagctacgccatcggcctgggcgccctgaccgccctgggcagctacaacagattcaacaacaactgctacaaggacgccatcatcctggccctgatcaacagcggcaccagcttcttcgccggcttcgtggtgttcagcatcctgggcttcatggccgccgagcagggcgtgcacatcagcaaggtggccgagagcggccccggcctggccttcatcgcctaccccagagccgtgaccctgatgcccgtggcccccctgtgggccgccctgttcttcttcatgctgctgctgctgggcctggacagccaggtgtgcatgggcctgtgggacagagagcccggcggcggcagaagagagggctgcagacagggcaagggctggagaagatgcggcgccagacccgagctgccctggccccagttcgtgggcgtggagggcttcatcaccggcctgctggacctgctgcccgccagctactacttcagattccagagagagatcagcgtggccctgtgctgcgccctgtgcttcgtgatcgacctgagcatggtgaccgacgtgagcggcgtgggcggcctgcccgtgaccagcggcggcagactgcccagcagcctgaccggcctgtgcccccagggcggcatgtacgtgttccagctgttcgactactacagcgccagcggcaccaccctgctgtggcaggccttctgggagtgcgtggtggtggcctgggtgtacggcagaagctggctgagagccggcctgggcgacggcggcggcgagggcagaagccccgcctggcccgccagccccagaggcgccgacagattcatggacgacatcgcctgcatgatcggctacagaccctgcccctggatgaagtggtgctggagcttcttcacccccctggtgtgcatgggcatcttcatcttcaacgtggtgtactacgagcccctggtgtacaacaacacctacgtgtacccctggtggggcgaggccatgggctgggccttcgccctgagcagcatgctgtgcgtgcccctgcacctgctgggctgcctgctgagagccaagggcaccatggccgagagatggcagcacctgacccagcccatctggggcctgcaccacctggagtacagagcccaggacgccgacgtgagaggcctgaccaccctgacccccgtgagcgagagcagcaaggtggtggtggtggagagcgtgatgtag

SEQ ID NO: 54780 - DNA, 471 bp, Artificial Sequence
  derived and/or modified sequence
ctgctgcacagccccacctggagctggagctgctgctggtgcgtggagtgctgctgcctggccccctggatggccagcttcaccatcagcagcctgaccggccagagctggggccccctgagccccggccagctgcagcccctgcagcagcagctgctgcagtgggaccagctgctgtgctggctgagaggcctgctgcaccccggcctgcacggctgcagagccggcagagcccacctgcagggcggcagagtgagagagatcagcgtggccctgtgctgcgccctgtgcttcgtgatcgacctgagcatggtgaccgacggcggcatgtacgtgttccagctgttcgactactacagcgccagcggcaccaccctgctgtggcaggccttctgggagtgcgtggtggtggcctgggtgtacggcgccgacagattcatggacgacatcgcctgcatgatcggctactag

SEQ ID NO: 54781 - DNA, 339 bp, Artificial Sequence
  derived and/or modified sequence
tgattcagacacgaggactgcgccaacgccagcctggccaacctgacctgcgaccagctggccgacagaagaagccccgtgatcgagttctgggagaacaaggtgctgagactgagcggcggcctggaggtgcccggcgccctgaactgggaggtgaccctgtgcctgctggcctgctgggtgctggtgtacttctgcgtgtggaagggcgtgaagagcaccggcaaggtgcccctggaggcctgcagcggcgagggcggcagcgccctgggcgccggctgcctgtgccaggcccacctgtggcagagagaggtgaccagacagagcctggccctgtag

SEQ ID NO: 54782 - DNA, 2190 bp, Artificial Sequence
  derived and/or modified sequence
atgctcccaactctccagattcaaggcccagcagcatttgcccccggcgatcgaggtcccggcagacattgtcctttcccagtcccaattaccccgactggcgcactgttgccagtaagtgacagctgtgattccttagtcgatttggtctggccctcagtgacctatctcgcccttggaacacagtctagagtttggcctcaccctttgggtgctcctggccaagccggcgagtcccccgagcaaagaagacagtgcctcgagctatgggacatggcatcaagcttgggagataaagtccctcgggccgcttgtggtaagcgggggcagaccgtgtggcaactgcacctcgcctgtttgtgtctggcacaatttcactcgcctcccgctcagcctccccctctgagtagacggggggggggaccagatcctgatcctatcagcaggagccttccaggacctcctacacccgccttgcccactcactcttactctagccacagcccacgtgcgccacggctgttatcaccccttagaagggctcctaggggttcacccgccccccacagacacgcctcccttcagaccaacgaggcgcccagagagctcccccattgcacatggcccggcttgcctggaagatctctcgctccatctttcctctggagagaaccgtggcttggcgggcagtggggccccctgaacatccctgccaggaaaggcgataggcgaaggtgggaatggggctgcgaaggaggaggcgcgaccgcctctgccgagcaacccgggccccagattgtgtatttcaccgccacattcccttatgttgtgctagtagtcctgctggtgcgtggggtgcttctgcccggcgccctcgacgggattatctactacctgaaaccggattggtctaaactaggctccccacaagtatggatcgacgctggcacccaaatttttttttcctatgcaatcggactgggggccctgacagctctgggtagctataatcgcttcaacaacaattgttataaagatgccatcatccttgccttgattaactcaggtacctccttttttgctggttttgttgtgttttccatccttggattcatggccgcagagcagggggtgcacattagtaaagtggcggagagcggccctggcctcgcctttatcgcgtatccccgagctgtcacgctgatgccagtggccccattatgggctgccctgtttttctttatgctgctcctgctagggctagactcccaggtttgcatgggcttatgggaccgggagcctggcggggggcgccgggagggctgccgccagggcaaaggatggagaaggtgcggcgcacgaccggaactaccatggccccagttcgttggggtcgaggggttcattaccggtctgctggatttgttgcccgcctcctactactttaggtttcaacgggaaatcagcgttgctttatgctgtgctctatgttttgtgatcgatttatcaatggtcacagatgtttcgggcgtagggggcctcccagtgacttccggtggacgtctgccttcaagtctgactggtctctgccctcaaggaggtatgtacgtgtttcagctgtttgattactattccgcatccgggacaaccttgctttggcaagccttctgggagtgcgtcgtcgtagcatgggtgtatggtagatcttggctccgcgccggcctgggggacggaggtggcgaaggccgatctcctgcgtggcctgccagcccccggggtgcagatcggttcatggacgatattgcctgcatgatcggctatcgcccttgcccatggatgaagtggtgctggagctttttcacaccacttgtctgcatggggatatttatttttaatgtggtgtattacgagcctctggtgtataacaatacatacgtgtatccctggtggggagaagctatggggtgggcattcgcgctttcctcaatgctgtgtgtgccgctgcacttactcgggtgtcttctgcgtgccaagggcacaatggcagagcggtggcagcatctcacgcagcccatctggggattgcaccacctggaatatcgagcccaagatgcagatgtgcgcgggctaactacactgaccccagttagcgagtcttctaaagtagtcgtggtagagtccgtgatgtag

SEQ ID NO: 54783 - DNA, 471 bp, Artificial Sequence
  derived and/or modified sequence
ttattacactctccaacctggagctggagctgctgctggtgtgttgagtgttgctgtctggccccctggatggcctccttcaccatctcctccttaacaggtcagagttggggcccgttgtcacccggtcagcttcagcctctgcagcaacagctactgcagtgggatcagctcctttgttggctgagggggctcttacaccctgggttacacgggtgccgagccggacgggcccacctgcaaggcgggcgagtgagagagatttcggtggccttatgttgcgcactttgcttcgtgatcgacctctcaatggtcaccgacggcgggatgtacgttttccagctttttgactattactcagcaagcggaaccaccctattatggcaggccttctgggaatgcgtggtggtggcctgggtgtacggcgccgatcgcttcatggatgatatcgcctgcatgatcggctactag

SEQ ID NO: 54784 - DNA, 339 bp, Artificial Sequence
  derived and/or modified sequence
taattccggcatgaggattgtgcaaacgcttctctggctaatttgacctgcgaccagctcgccgacagaagatcccccgttatcgagttctgggagaataaagtcttaagactgtcaggcgggttggaggtcccgggtgcgttgaattgggaggtcacactctgccttttagcctgctgggtattagtctatttttgcgtgtggaaaggcgtcaaaagtacggggaaggtgcctttggaagcatgctctggcgaaggcgggagtgccctcggcgccggctgtctatgtcaagctcatctgtggcagagggaggttacacgccaatccctcgccctatag

SEQ ID NO: 54785 - DNA, 2190 bp, Artificial Sequence
  derived and/or modified sequence
atgctgcccaccctgcagatccagggccctgctgcctttgcccctggggaccggggccctggccgccactgccccttccctgtgcccatcacccccactggagccctgctgcctgtgtctgacagctgtgacagcctggtggacctggtgtggcccagcgtgacctacctggccctgggcacccagagccgggtgtggccccaccccctgggcgcccctggccaggccggggagagccctgagcagaggcggcagtgcctggagctgtgggacatggccagcagcctgggggacaaggtgcccagggctgcctgtgggaagaggggccagacagtgtggcagctgcacctggcctgcctgtgcctggcccagttccacagccccccagcccagcccccacccctgagcagaagaggaggcggccctgaccctgaccccatcagccgcagcctgcccggcccccccaccccagccctgcccacccacagctacagcagccacagcccccgggccccccggctgctgagccccctgcggcgggccccccggggcagccctgccccccacagacatgccagcctgcagaccaatgaggccccccgggagctgccccactgcacctggccaggcctgcccggccgcagcctggcccccagcttcctgtggagggagccctggctgggcggccagtggggccccctgaacatcccagccaggaagggggacagaagacgctgggagtggggctgtgagggcggcggggccacagccagcgctgagcagcccggcccccagatcgtgtacttcaccgccaccttcccctacgtggtgctggtggtgctgctggtgcggggcgtgctgctgcccggggccctggatggcatcatctactacctgaagccagactggagcaagctgggcagcccccaggtgtggattgatgctggcacccagatcttcttctcctatgccatcggcctgggcgccctgacagccctgggcagctacaaccgcttcaacaacaactgctacaaggatgccatcatcctggccctgatcaacagcggcaccagcttctttgctggctttgtggtgttcagcatcctgggcttcatggctgctgagcagggcgtgcacatcagcaaggtggccgagagcggccctggcctggccttcatcgcctaccccagggctgtgaccctgatgcctgtggcccccctgtgggccgccctcttcttcttcatgctgctgctgctgggcctggacagccaggtgtgcatgggcctgtgggaccgggagcccggcggcggccggcgggagggctgccggcagggcaagggctggaggcgctgtggggcccggcctgagctgccctggccccagtttgtgggcgtggagggcttcatcaccggcctgctggacctgctgcctgccagctactacttccgcttccagcgggagatctctgtggccctgtgctgtgccctgtgcttcgtcatcgacctgtccatggtgacagatgtgtctggagtgggcggcctgcctgtgaccagcggcggccgcctgcccagcagcctgaccggcctgtgcccccagggcggcatgtatgtgttccagctgtttgactactacagcgccagcggcaccaccctgctgtggcaggccttctgggagtgtgtggtggtggcctgggtgtatggccgctcctggctgcgggccggcctgggagatggcggcggggagggccgcagccctgcctggccagccagccccagaggagctgaccgcttcatggatgacatcgcctgcatgattggctaccggccctgcccctggatgaagtggtgctggagcttcttcacccccctggtgtgcatgggcatcttcatcttcaacgtggtgtactatgagcccctggtgtacaacaacacctacgtgtacccctggtggggcgaggccatgggctgggcctttgccctgagctccatgctgtgtgtgcccctgcacctgctgggctgcctgctgcgggccaagggcaccatggccgagcgctggcagcacctgacccagcccatctggggcctgcaccacctggagtaccgggcccaggatgctgatgtgcggggcctgaccaccctgacccctgtgtctgagagcagcaaggtggtggtggtggagagcgtgatgtag

SEQ ID NO: 54786 - DNA, 471 bp, Artificial Sequence
  derived and/or modified sequence
ctgctgcacagccccacctggagctggagctgctgctggtgtgtggagtgctgctgcctggccccctggatggccagcttcaccatcagcagcctgaccggccagagctggggccccctgagccctggccagctgcagcccctgcagcagcagctgctgcagtgggaccagctgctgtgctggctgcggggcctgctgcaccctggcctgcacggctgcagagctggccgggcccacctgcagggcggccgggtgcgggagatctctgtggccctgtgctgtgccctgtgcttcgtcatcgacctgtccatggtgacagatggcggcatgtatgtgttccagctgtttgactactacagcgccagcggcaccaccctgctgtggcaggccttctgggagtgtgtggtggtggcctgggtgtatggagctgaccgcttcatggatgacatcgcctgcatgattggctactag

SEQ ID NO: 54787 - DNA, 339 bp, Artificial Sequence
  derived and/or modified sequence
tgattcagacatgaggactgtgccaatgccagcctggccaacctgacctgtgaccagctggccgacagaagaagccctgtgattgagttctgggagaacaaggtgctgcggctgagcggcggcctggaggtgcctggggccctgaactgggaggtgaccctgtgcctgctggcctgctgggtgctggtgtacttctgtgtgtggaagggcgtgaagagcacaggcaaggtgcccctggaggcctgcagcggggagggcggcagcgccctgggcgccggctgcctgtgccaggcccacctgtggcagcgggaggtgacccggcagagcctggccctgtag

SEQ ID NO: 54788 - DNA, 2190 bp, Artificial Sequence
  derived and/or modified sequence
atgctgcccaccctgcagatccagggccccgccgccttcgcccccggtgatcggggtccagggcggcattgcccctttcccgtgcctatcaccccaaccggagccctgctgccagtgagcgacagttgcgactcgctcgttgacctagtctggccctctgtcacatacttagcactgggcacccagtccagggtgtggccacaccctttgggggctcctggccaggccggcgaaagcccagagcagcggcgccaatgcctggaactctgggacatggcctctagtttgggtgacaaagtgccaagagcagcatgtggcaagcggggacagactgtgtggcagctgcatctggcctgcctctgtctggcacaatttcacagtcctccggcccagcctcctccattgtcgagacgtgggggtgggcccgatcccgatcccatttcacgctcactccccgggccaccaacccctgccctgcccacccactcatacagctcacattcaccgagggctccacgcctgctttcacccctcaggcgggcgccaagaggctcacccgctccccaccgtcacgcctccctgcagaccaatgaagcccccagagagttgccccattgcacatggcccggcttacccggacggagcttagccccctctttcctgtggagggagccgtggcttggtggacagtggggcccacttaacatcccagcccgaaagggcgacaggcgtaggtgggagtggggctgcgagggtggaggcgcaacagcaagtgctgagcagccggggccccagatagtctactttactgcgacttttccttacgtagtcctggttgtgctgctagtcagaggtgtcttgctccctggagcattggatggaatcatttattatttaaaacctgattggagtaaattggggagcccacaggtgtggatcgatgctgggacgcagatcttcttctcctacgcaataggattgggggctctgacagccctgggatcttacaatcgcttcaacaataactgttataaagatgccatcattctcgcgctgattaatagtggcacttcgttctttgctgggttcgtagtgttttcgatcttaggatttatggctgctgagcagggcgttcatatttcaaaagtcgctgagagcggccccggtcttgcttttatcgcctaccctcgcgcagtgaccctgatgccggtcgcacctctttgggcggcacttttcttttttatgcttcttctcttaggcctggacagtcaggtgtgcatgggcttgtgggaccgcgagccaggtggagggagaagggaggggtgtcggcagggaaagggatggcggcgttgtggggctcgacccgagctcccctggccccagttcgtgggagtcgaggggttcattaccggcctcttggacttgctccccgcctcctactatttcagatttcaacgggaaatcagtgtcgcattatgttgtgccctttgtttcgtgattgatttgtccatggtgaccgacgttagtggcgtgggcggcttgccggtcacctccggaggcagactgccttcttctctcacaggactgtgcccacaagggggtatgtatgtcttccaacttttcgactactacagtgcttccggcaccactctgttatggcaggctttctgggagtgtgtagtcgtggcctgggtgtatggcagatcatggctccgcgccgggctgggtgatgggggcggcgagggcaggtcccccgcttggcctgctagtccacggggggcagacaggtttatggatgatatagcctgtatgattggttaccgaccttgtccttggatgaagtggtgttggagtttttttacacctctcgtttgcatgggcatctttattttcaatgtggtgtattacgaaccactcgtttacaacaatacatatgtttacccgtggtggggcgaagccatgggctgggcctttgctctttcttccatgctgtgcgtgcctctccatctgctcggatgtctcttgcgggccaagggtacgatggccgagcgctggcagcatctcacccagccaatctggggactgcaccatctggaatacagagcacaggatgcagacgtacggggacttaccactctgaccccagtaagcgagtcaagcaaggtcgtagttgtcgagtctgtcatgtag

SEQ ID NO: 54789 - DNA, 471 bp, Artificial Sequence
  derived and/or modified sequence
ctgctgcacagccccacctggagctggagctgctgctggtgcgtggaatgctgttgcctcgctccatggatggcctcttttactattagctcactgactggtcagtcatggggccccctgtctcccggccagctgcagcctctgcagcagcagttgctgcaatgggaccagctcctgtgttggttgcggggcctgttgcatcctggtcttcacggatgtagagcgggccgtgcgcacctccagggcggacgtgttagggagatttcagttgctttgtgttgcgctctttgtttcgtcatcgatctgtccatggtgacagacggaggaatgtatgttttccaactgttcgactactattctgctagcggtactacgttactgtggcaggcgttttgggagtgcgtggtcgtggcgtgggtgtatggtgcggacagatttatggatgacattgcatgtatgatcggatattag

SEQ ID NO: 54790 - DNA, 339 bp, Artificial Sequence
  derived and/or modified sequence
tgattccggcacgaggactgcgccaacgccagcctggccaacctgacatgcgatcagctggcggacagaaggtcacccgtgatcgagttctgggaaaacaaagttctgaggctatctggaggcctggaggtgcctggggctctgaactgggaagttaccttgtgcctgcttgcctgttgggtactcgtgtatttttgcgtctggaaaggagtcaagtctaccgggaaagtgccattagaagcctgttcgggcgaaggaggcagcgctctcggtgccggctgtctttgtcaagcacatctgtggcagcgtgaagttacaagacagtctctagcgttgtag

SEQ ID NO: 54791 - DNA, 2190 bp, Artificial Sequence
  derived and/or modified sequence
atgctgcctacactgcagatacaggggccagccgcattcgctcccggagacagaggaccgggaagacactgtccgttcccagttcctatcacgcctactggagctcttctgcctgtctctgacagttgcgacagcctggtggacctagtgtggcccagtgtaacgtaccttgcgctggggacacagtcccgagtgtggcctcaccccttgggggctccagggcaggctggcgaatctcccgaacaaaggaggcaatgtctcgagctgtgggacatggcgtcatcccttggcgataaggtcccacgggctgcctgtgggaaaaggggtcagacagtgtggcagttgcacctggcttgcttgtgccttgcacaatttcatagcccccctgcccaaccgccaccccttagtcggcgagggggagggcctgaccctgatcctataagcagaagtctcccgggtccccctactcccgcactgcccacacacagctactcatcacatagcccacgggctccgcgtctgctctctcctctgagacgtgctccacgcggttccccggctccacaccgccacgcgtctctgcagacaaatgaggcccctagagagttgcctcactgcacttggccgggacttccgggacggagcctagcccctagcttcctgtggagggagccatggctgggtggacaatggggaccacttaacattcctgccaggaagggcgacaggcggcgttgggagtggggctgtgagggagggggagcaaccgctagtgccgagcagcctggaccacagattgtctattttactgctacattcccttacgtcgtgcttgtggttcttctcgtgcggggtgtgctactcccaggagccctggacggcatcatatattacttaaaacctgattggtcaaaactgggttctcctcaggtatggatagacgccggaacgcagatcttcttcagctatgctattgggctgggcgctttgactgcgctgggatcatacaatcggtttaacaacaactgttataaggatgcaatcattctggccctcattaactccgggacatcttttttcgctggcttcgtcgttttcagcatacttggcttcatggcagcggaacaaggtgtgcacatttcaaaagtggccgagtccggtccgggtctcgcatttatagcataccccagagctgtgacacttatgcctgtagctcctttatgggcagctttgtttttcttcatgctgctcctcctcggtctcgacagtcaggtttgtatgggcctctgggaccgagagcctgggggaggccgtagagagggttgccgacaagggaaaggatggaggagatgtggcgctagaccagaattgccttggcctcagttcgtgggtgtcgagggcttcattaccggcctgcttgatcttctccctgcttcatactattttcgtttccagcgcgaaatttccgtagcgctgtgctgtgctctgtgcttcgtaatcgacctttcaatggtgacagacgtctctggcgtcgggggacttccagttacttccgggggaaggctgccctcatctctgacaggactctgtccccaaggcggaatgtatgtcttccagctcttcgattattactcggcatccggaaccaccctgctctggcaggccttttgggagtgcgtggtagtggcttgggtctatgggcgttcctggctaagggcaggtcttggcgatgggggaggagaaggcaggtcgcccgcttggccggcttctccaaggggagccgatcggtttatggatgatatcgcatgcatgataggctataggccttgcccgtggatgaagtggtgttggtccttttttacacctttagtctgtatgggtatttttatattcaatgtcgtttactatgaaccccttgtgtataacaatacgtacgtctatccctggtggggagaggcaatgggttgggccttcgctctttctagcatgctatgcgtgcctttacatctgctcggttgcttattgcgcgcaaaggggaccatggctgagcgctggcagcacctaactcaaccaatctgggggctccatcacctagagtatagggcacaagatgcggacgtccgtgggctcaccactttgacccctgtgagcgagtcctcaaaagttgtcgtcgtcgaaagcgtaatgtag

SEQ ID NO: 54792 - DNA, 471 bp, Artificial Sequence
  derived and/or modified sequence
ctcctacactccccaacttggtcttggtcttgctgctggtgcgttgagtgttgctgcttggccccatggatggcttccttcaccatctcctcacttactggccagtcctggggtcctttatctcctggacaactccagccactgcagcagcagcttctgcagtgggaccaattactttgttggctgcggggactgcttcaccctggtctgcatgggtgccgcgctggacgggcacatctccaaggaggccgagtccgggagatctcggtagccctttgctgtgccctgtgcttcgtgatagatctcagcatggtgaccgatggcggaatgtacgtctttcagcttttcgactattactccgcatccggaacaacactgctctggcaggccttttgggaatgtgtagtggtggcatgggtttacggggctgaccgcttcatggacgacatcgcctgtatgatcggttattag

SEQ ID NO: 54793 - DNA, 339 bp, Artificial Sequence
  derived and/or modified sequence
tgattcaggcatgaagactgcgctaatgcctctctggccaacttaacctgcgatcaactggctgataggagatcccctgtgatcgaattctgggagaataaggtactaaggctatcagggggacttgaagtgccaggtgccctgaactgggaagttacactgtgcttattagcctgttgggtcctcgtatacttttgcgtctggaagggcgtcaaatctacgggtaaagtgcctttggaggcctgctctggagaaggcggtagtgctcttggcgcaggttgcttatgtcaagcgcacttatggcagcgagaggtgacccggcagtccctcgccttgtag

SEQ ID NO: 54794 - DNA, 2390 bp, Artificial Sequence
  derived and/or modified sequence
ctgaaagccaagcaatgctccccaccctgcaaatccagggcccagcagcctttgctcctggggatagaggccctggcaggcactgtcccttccctgtgcccatcacccccactggtgccctcctgccagtctctgactcttgtgacagtctggtggacctggtctggccatctgttacctatcttgccttggggacccagagcagagtctggccacatcccttgggggctcctggtcaggctggggagtcacctgaacaaagaagacagtgtctagagctgtgggacatggccagctccctgggggacaaggtccccagagcagcatgtgggaagagggggcagacagtgtggcagctgcatctcgcctgcctctgcctggcccagttccactctccacctgctcaacccccacctctctccagaagaggagggggacccgacccggatccaatatcccgctccctgcctgggcctcccacacctgcactgcccacacactcatacagctctcactccccacgtgctccacgcctcctgtccccactgaggagagctcccagaggctcgcctgctccccaccgacacgcgtccctgcagacaaacgaggcgcccagggagcttccccactgcacttggccagggctgccggggcgcagccttgcccctagcttcctctggcgggagccatggctcggaggacaatggggacctctgaacatacctgcccgcaagggggaccggaggcgctgggagtgggggtgtgagggaggtggtgccacagcctccgctgagcagcctggcccccagatcgtgtacttcactgctacattcccctacgtggtcctggtcgtgctgctggtgcgtggagtgctgctgcctggcgccctggatggcatcatttactatctcaagcctgactggtcaaagctggggtcccctcaggtgtggatagatgcggggacccagattttcttttcttacgccattggcctgggggccctcacagccctgggcagctacaaccgcttcaacaacaactgctacaaggacgccatcatcctggctctcatcaacagtgggaccagcttctttgctggcttcgtggtcttctccatcctgggcttcatggctgcagagcagggcgtgcacatctccaaggtggcagagtcagggccgggcctggccttcatcgcctacccgcgggctgtcacgctgatgccagtggccccactctgggctgccctgttcttcttcatgctgttgctgcttggtctcgacagccaggtttgcatggggctctgggacagggagccaggaggggggcggagggagggctgcaggcaaggaaaggggtggaggcggtgcggggctcggcctgagctgccctggccacagtttgtaggtgtggagggcttcatcaccggcctcctcgacctcctcccggcctcctactacttccgtttccaaagggagatctctgtggccctctgttgtgccctctgctttgtcatcgatctctccatggtgactgatgtgagtggggtggggggtctgcctgtgacctctggtggccgtctgccatcctccctgactgggctctgtccccagggcgggatgtacgtcttccagctgtttgactactactcggccagcggcaccaccctgctctggcaggccttttgggagtgcgtggtggtggcctgggtgtacggtaggtcatggctgagggctgggctgggggatggtggcggggaaggcaggtctccagcttggcccgcctcacctcgcggagctgaccgcttcatggacgacattgcctgtatgatcgggtaccgaccttgcccctggatgaaatggtgctggtccttcttcaccccgctggtctgcatgggcatcttcatcttcaacgttgtgtactacgagccgctggtctacaacaacacctacgtgtacccgtggtggggtgaggccatgggctgggccttcgccctgtcctccatgctgtgcgtgccgctgcacctcctgggctgcctcctcagggccaagggcaccatggctgagcgctggcagcacctgacccagcccatctggggcctccaccacttggagtaccgagctcaggacgcagatgtcaggggcctgaccaccctgaccccagtgtccgagagcagcaaggtcgtcgtggtggagagtgtcatgtgacaactcagctcacatcaccagctcacctctggtagccatagcagcccctgcttcagccccaccgcacccctccagggggcctgcctttccctgacacttttggggtctgcctgggggaggaggggagaaagcaccatgagtgctcactaaaacaactttttccatttttaataaaacgccaaaaat

SEQ ID NO: 54795 - DNA, 468 bp, Artificial Sequence
  derived and/or modified sequence
ctgctacattcccctacgtggtcctggtcgtgctgctggtgcgtggagtgctgctgcctggcgccctggatggcatcatttactatctcaagcctgactggtcaaagctggggtcccctcagccctgggcagctacaaccgcttcaacaacaactgctacaatgggaccagcttctttgctggcttcgtggtcttctccatcctgggcttcatggctgcagagcagggcgtgcacatctccaaggtggcagagtcagggagatctctgtggccctctgttgtgccctctgctttgtcatcgatctctccatggtgactgatggcgggatgtacgtcttccagctgtttgactactactcggccagcggcaccaccctgctctggcaggccttttgggagtgcgtggtggtggcctgggtgtacggagctgaccgcttcatggacgacattgcctgtatgatcgggtac

SEQ ID NO: 54796 - DNA, 334 bp, Artificial Sequence
  derived and/or modified sequence
cttccgccatgaagactgtgccaatgccagcctggccaacctcacctgtgaccagcttgctgaccgccggtcccctgtcatcgagttctgggagaacaaagtcttgaggctgtctgggggactggaggtgccaggggccctcaactgggaggtgaccctttgtctgctggcctgctgggtgctggtctacttctgtgtctggaagggggtcaaatccacgggaaaggtaccactagaggcatgcagcggggagggtggctcagccctgggagccggatgtctgtgccaggcacacctgtggcaacgggaggtgaccagacagagtctagcccta

SEQ ID NO: 54797 - DNA, 266 bp, Artificial Sequence
  derived and/or modified sequence
ggacgccatcatcctggctctcatcaacagtgggaccagcttctttgctggcttcgtggtcttctccatcctgggcttcatggctgcagagcagggcgtgcacatctccaaggtggcagagtcagggccgggcctggccttcatcgcctacccgcgggctgtcacgctgatgccagtggccccactctgggctgccctgttcttcttcatgctgttgctgcttggtctcgacagccaggtgtggagggcttcatcaccggcctcct

SEQ ID NO: 54798 - protein, 431 aa, Artificial Sequence
  derived and/or modified sequence
MEDLKGPTVSSFLSGMKTELYPGVTAIDMMYKEGLHGVDNGILIFDKVRIPRENLLDKFGSVAPDGQYHSPIRNKSARFNAMLAALTPSRLAVAFQAMGAMKLGLTIAIRYSHSRRQFGPKTKEEVKIIEHQTQTLRLMPHLATALALTFVSRYAGALLDEDVFQGKELVNSRSLQALVAGLKAYSTWENIRCLQDCRECTGGMVVGRELLAQYTKQYEEKPLFGLLQNWAESVGDKLRTSFLAFNMDTVDDLAFLLKAVKFRERVLQRGLVARIYYKVKTKKEDFFHAWNSCLHHVASLSLAHTHRVTLEQFSLAVKSCPDQEDQTLLMKFCLLYGTKLVFQERAWYLEHKYLTPMASTRIRNQLLDLCDSVKDDARRVISTFNIPHTYLHAPIAGISNPRAAWAFYPAPLQPRPREEARSRRPKLGAKL

SEQ ID NO: 54799 - protein, 580 aa, Artificial Sequence
  derived and/or modified sequence
MRALTVQRVKFAMDLPLLKRAGQDLAEKTKNFVSRSLVIGEVLSMADMATGVKCGIIYWLFGGAIRNLGSPEHVTKWFQPLQEQKYTGMFAMTERGHGSNARGIQTEATFDLSAQEFVIDTPCENAEKMYIGNAMYGNYAAVFAQLIIDGRSQGPHCFIVPVRDENGSLYPGVTAIDMMYKEGLHGVDNGILIFDKVRIPRENLLDKFGSVAPDGQYHSPIRNKSARFNAMLAALTPSRLAVAFQAMGAMKLGLTIAIRYSHSRRQFGPKTKEEVKIIEHQTQTLRLMPHLATALALTFVSRYAGALLDEDVFQGKELVNSRSLQALVAGLKAYSTWENIRCLQDCRECTGGMVVGRELLAQYTKQYEEKPLFGLLQNWAESVGDKLRTSFLAFNMDTVDDLAFLLKAVKFRERVLQRGLVARIYYKVKTKKEDFFHAWNSCLHHVASLSLAHTHRVTLEQFSLAVKSCPDQEDQTLLMKFCLLYGTKLVFQERAWYLEHKYLTPMASTRIRNQLLDLCDSVKDDARRVISTFNIPHTYLHAPIAGISNPRAAWAFYPAPLQPRPREEARSRRPKLGAKL

SEQ ID NO: 54800 - DNA, 1296 bp, Artificial Sequence
  derived and/or modified sequence
atggaggacctgaagggccccaccgtgagcagcttcctgagcggcatgaagaccgagctgtaccccggcgtgaccgccatcgacatgatgtacaaggagggcctgcacggcgtggacaacggcatcctgatcttcgacaaggtgagaatccccagagagaacctgctggacaagttcggcagcgtggcccccgacggccagtaccacagccccatcagaaacaagagcgccagattcaacgccatgctggccgccctgacccccagcagactggccgtggccttccaggccatgggcgccatgaagctgggcctgaccatcgccatcagatacagccacagcagaagacagttcggccccaagaccaaggaggaggtgaagatcatcgagcaccagacccagaccctgagactgatgccccacctggccaccgccctggccctgaccttcgtgagcagatacgccggcgccctgctggacgaggacgtgttccagggcaaggagctggtgaacagcagaagcctgcaggccctggtggccggcctgaaggcctacagcacctgggagaacatcagatgcctgcaggactgcagagagtgcaccggcggcatggtggtgggcagagagctgctggcccagtacaccaagcagtacgaggagaagcccctgttcggcctgctgcagaactgggccgagagcgtgggcgacaagctgagaaccagcttcctggccttcaacatggacaccgtggacgacctggccttcctgctgaaggccgtgaagttcagagagagagtgctgcagagaggcctggtggccagaatctactacaaggtgaagaccaagaaggaggacttcttccacgcctggaacagctgcctgcaccacgtggccagcctgagcctggcccacacccacagagtgaccctggagcagttcagcctggccgtgaagagctgccccgaccaggaggaccagaccctgctgatgaagttctgcctgctgtacggcaccaagctggtgttccaggagagagcctggtacctggagcacaagtacctgacccccatggccagcaccagaatcagaaaccagctgctggacctgtgcgacagcgtgaaggacgacgccagaagagtgatcagcaccttcaacatcccccacacctacctgcacgcccccatcgccggcatcagcaaccccagagccgcctgggccttctaccccgcccccctgcagcccagacccagagaggaggccagaagcagaagacccaagctgggcgccaagctgtag

SEQ ID NO: 54801 - DNA, 1743 bp, Artificial Sequence
  derived and/or modified sequence
atgagagccctgaccgtgcagagagtgaagttcgccatggacctgcccctgctgaagagagccggccaggacctggccgagaagaccaagaacttcgtgagcagaagcctggtgatcggcgaggtgctgagcatggccgacatggccaccggcgtgaagtgcggcatcatctactggctgttcggcggcgccatcagaaacctgggcagccccgagcacgtgaccaagtggttccagcccctgcaggagcagaagtacaccggcatgttcgccatgaccgagagaggccacggcagcaacgccagaggcatccagaccgaggccaccttcgacctgagcgcccaggagttcgtgatcgacaccccctgcgagaacgccgagaagatgtacatcggcaacgccatgtacggcaactacgccgccgtgttcgcccagctgatcatcgacggcagaagccagggcccccactgcttcatcgtgcccgtgagagacgagaacggcagcctgtaccccggcgtgaccgccatcgacatgatgtacaaggagggcctgcacggcgtggacaacggcatcctgatcttcgacaaggtgagaatccccagagagaacctgctggacaagttcggcagcgtggcccccgacggccagtaccacagccccatcagaaacaagagcgccagattcaacgccatgctggccgccctgacccccagcagactggccgtggccttccaggccatgggcgccatgaagctgggcctgaccatcgccatcagatacagccacagcagaagacagttcggccccaagaccaaggaggaggtgaagatcatcgagcaccagacccagaccctgagactgatgccccacctggccaccgccctggccctgaccttcgtgagcagatacgccggcgccctgctggacgaggacgtgttccagggcaaggagctggtgaacagcagaagcctgcaggccctggtggccggcctgaaggcctacagcacctgggagaacatcagatgcctgcaggactgcagagagtgcaccggcggcatggtggtgggcagagagctgctggcccagtacaccaagcagtacgaggagaagcccctgttcggcctgctgcagaactgggccgagagcgtgggcgacaagctgagaaccagcttcctggccttcaacatggacaccgtggacgacctggccttcctgctgaaggccgtgaagttcagagagagagtgctgcagagaggcctggtggccagaatctactacaaggtgaagaccaagaaggaggacttcttccacgcctggaacagctgcctgcaccacgtggccagcctgagcctggcccacacccacagagtgaccctggagcagttcagcctggccgtgaagagctgccccgaccaggaggaccagaccctgctgatgaagttctgcctgctgtacggcaccaagctggtgttccaggagagagcctggtacctggagcacaagtacctgacccccatggccagcaccagaatcagaaaccagctgctggacctgtgcgacagcgtgaaggacgacgccagaagagtgatcagcaccttcaacatcccccacacctacctgcacgcccccatcgccggcatcagcaaccccagagccgcctgggccttctaccccgcccccctgcagcccagacccagagaggaggccagaagcagaagacccaagctgggcgccaagctgtag

SEQ ID NO: 54802 - DNA, 1296 bp, Artificial Sequence
  derived and/or modified sequence
atggaagacctcaaaggccctaccgtaagtagctttctgagcggaatgaaaacagagctttatcccggtgtaacagccattgacatgatgtacaaagaaggcctccatggtgtggataacggcattctgattttcgataaggttagaatcccccgcgagaatctcctggacaaattcggaagcgtcgcccctgatggtcagtaccactccccaattcggaacaagtcggcccggttcaatgcaatgctggctgccctgaccccgtcaagattggctgtcgcctttcaggcgatgggagccatgaaactcgggctgacaatcgctattagatactcccactccagaagacagttcggaccaaagaccaaggaggaagtcaagattatagaacaccagacccagaccctaaggctgatgccacatctggccacagctttggcccttaccttcgtgagtcgctatgcaggtgcactactcgacgaagacgtttttcagggaaaagaactggtgaactccagaagtttgcaagccctggtggcaggacttaaggcttacagcacatgggagaatatacgttgtctgcaagattgccgggagtgcacagggggcatggtggttggccgtgagctcctggcccagtacactaaacagtacgaggagaagccgctgtttggcttacttcagaactgggccgagtccgtgggggacaagctgaggacttctttcctagccttcaatatggacacggtcgatgatctggcattcctcctgaaagccgtcaaatttcgggaaagagtgctgcagcgcggactggtggcacgaatctactacaaagtcaaaacaaaaaaagaggacttttttcatgcttggaacagttgcctccatcacgtggcaagtctctctctcgcccatactcaccgcgtgacactggagcagtttagcctcgctgtgaagagctgccctgatcaggaggaccagacactgctcatgaaattctgcctactctacggaactaaattagtgttccaagaaagggcctggtatctcgagcataaataccttacccccatggcctctacacgcattagaaaccagctgctcgacctatgtgattcggtaaaggatgatgccaggcgcgttatcagtaccttcaatatccctcatacctatctccacgcacctatcgccgggatctcaaacccccgggctgcctgggctttctacccagctcctctgcagccacggcctcgagaggaagcgcggagtcggagacccaagctcggtgcaaagctgtag

SEQ ID NO: 54803 - DNA, 1743 bp, Artificial Sequence
  derived and/or modified sequence
atgcgggccctgactgtgcagcgcgtgaagtttgccatggatcttcctttactcaaaagggcaggccaggacctagctgaaaaaaccaaaaattttgtgtctaggagtctggtgatcggggaggtgctgtctatggcagacatggcgaccggtgttaagtgtggcatcatctactggctattcggcggggcaatcagaaatctgggctccccagaacacgtgaccaaatggttccaacccctccaggagcaaaaatacacaggtatgtttgccatgaccgaaagagggcacggctccaatgcaagaggaatccaaactgaagccacatttgatttgtcagcccaagagttcgtaatcgatactccctgcgagaatgcagagaagatgtacataggaaacgccatgtatggcaactatgccgccgtcttcgcgcagctgattatcgatgggcgatcgcaggggcctcattgtttcatagtcccagtaagggacgagaacggtagcctctatccaggtgtgacagcgatcgatatgatgtacaaggagggtctccacggtgtcgataatggcatcttgatttttgataaagttcgtattccacgtgagaacttactggacaaatttggttccgtcgcccctgatgggcagtaccattcccccataaggaataaatctgctaggttcaacgccatgttggccgctctcactccttcacgtctggcagtggcatttcaggccatgggggccatgaagcttggactcactattgccattcgctatagccattcccgacgccagttcgggccaaaaaccaaggaggaggtcaagatcatcgaacaccaaacccaaactttaaggctgatgcctcacctggcgacagctcttgcgttgacttttgtgtctcggtacgctggtgcccttcttgatgaggatgtctttcaggggaaggagctagtgaacagccgttccctccaggcccttgtggctggcctcaaagcctacagtacctgggaaaatatccgctgcctacaggactgtcgggagtgtactgggggtatggttgttgggcgggagctcctggcacaatataccaaacagtatgaggagaagcctctttttggcctgctgcaaaattgggccgaatccgttggggataaactcaggacctctttcctagcttttaatatggacacggtggacgacctggcctttctgcttaaagcggtaaagtttcgcgaacgggttctacagcggggtctggtggcaagaatttattataaagtcaagactaagaaagaagacttcttccacgcatggaacagttgtttgcatcatgtcgctagtctgtcactggcccatactcatagagtgactcttgagcaattcagtcttgcagtgaagagttgccccgatcaggaggatcaaaccctgttgatgaaattctgccttttatacggcactaagcttgtgttccaagaaagagcttggtacctagaacataaatacctcaccccgatggcctcgacccggattcgaaaccaacttctggatctgtgtgactccgttaaagacgatgccaggagggtgattagtacgttcaacatcccccatacgtatctgcatgcacccatagccggtatttccaatccaagagctgcatgggccttttaccctgcgcccctgcagccgagaccgcgcgaagaggcccgcagtagaagaccaaagctgggggcaaagctctag

SEQ ID NO: 54804 - DNA, 1296 bp, Artificial Sequence
  derived and/or modified sequence
atggaggacctgaagggccccaccgtgtcctccttcctgagcggcatgaagacagagctgtacccaggagtgacagccatcgacatgatgtacaaggagggcctgcacggcgtggacaatggcatcctgatctttgacaaggtgcgcatcccccgggagaacctgctggacaagtttggatctgtggccccagatggccagtaccacagccccatccggaacaagagcgcccgcttcaatgccatgctggccgccctgacccccagccggctggccgtggccttccaggccatgggcgccatgaagctgggcctgaccatcgccatccgctacagccacagccggcggcagtttggccccaagaccaaggaggaggtgaagatcatcgagcaccagacccagaccctgcggctgatgccccacctggccacagccctggccctgacctttgtgagccgctatgctggggccctgctggatgaagatgtgttccagggcaaggagctggtgaacagccgcagcctgcaggccctggtggccggcctgaaggcctacagcacctgggagaacatccgctgcctgcaggactgcagagaatgtactggaggcatggtggtgggccgggagctgctggcccagtacaccaagcagtatgaggagaagcccctgtttggcctgctgcagaactgggccgagagcgtgggggacaagctgcggaccagcttcctggccttcaacatggacacagtggatgacctggccttcctgctgaaggctgtgaagttccgggagcgggtgctgcagaggggcctggtggcccgcatctactacaaggtgaagaccaagaaggaggacttcttccacgcctggaacagctgcctgcaccacgtggccagcctgagcctggcccacacccaccgggtgaccctggagcagttcagcctggccgtgaagagctgcccagaccaggaggaccagaccctgctgatgaagttctgcctgctgtatggcaccaagctggtgttccaggagcgggcctggtacctggagcacaagtacctgacccccatggccagcacccgcatccggaaccagctgctggacctgtgtgacagcgtgaaggatgatgcccggcgggtcatcagcaccttcaacatcccccacacctacctgcacgcccccatcgccggcatcagcaaccccagggctgcctgggccttctacccagcccccctgcagccccggccccgggaggaggcccggagcagaagacccaagctgggcgccaagctgtag

SEQ ID NO: 54805 - DNA, 1743 bp, Artificial Sequence
  derived and/or modified sequence
atgagggccctgactgtgcagagggtgaagtttgccatggacctgcccctgctgaagagagctggccaggacctggccgagaagaccaagaactttgtgagccgcagcctggtgattggagaggtgctgtccatggctgacatggccaccggggtgaagtgtggcatcatctactggctgtttggaggagccatccggaacctgggcagccctgagcacgtgaccaagtggttccagcccctgcaggagcagaagtacacaggcatgtttgccatgacagagcggggccacggcagcaatgcccggggcatccagacagaggccacctttgacctgagcgcccaggagtttgtgattgacaccccctgtgaaaatgctgagaagatgtacatcggaaatgccatgtatggcaactatgctgctgtgtttgcccagctgatcattgatggccgcagccagggcccccactgcttcatcgtgcctgtgagagatgaaaatggcagcctgtacccaggagtgacagccatcgacatgatgtacaaggagggcctgcatggagtggacaatggcatcctgatctttgacaaggtgcgcatcccccgggagaacctgctggacaagtttggatctgtggccccagatggccagtaccacagccccatccggaacaagagcgcccgcttcaatgccatgctggccgccctgacccccagccggctggccgtggccttccaggccatgggcgccatgaagctgggcctgaccatcgccatccgctacagccacagccggcggcagtttggccccaagaccaaggaggaggtgaagatcatcgagcaccagacccagaccctgcggctgatgccccacctggccacagccctggccctgacctttgtgagccgctatgctggggccctgctggatgaagatgtgttccagggcaaggagctggtgaacagccgcagcctgcaggccctggtggccggcctgaaggcctacagcacctgggagaacatccgctgcctgcaggactgccgggagtgcaccggcggcatggtggtgggccgggagctgctggcccagtacaccaagcagtatgaggagaagcccctgtttggcctgctgcagaactgggccgagagcgtgggggacaagctgcggaccagcttcctggccttcaacatggacacagtggatgacctggccttcctgctgaaggctgtgaagttccgggagcgggtgctgcagaggggcctggtggcccgcatctactacaaggtgaagaccaagaaggaggacttcttccacgcctggaacagctgcctgcaccacgtggccagcctgagcctggcccacacccaccgggtgaccctggagcagttcagcctggccgtgaagagctgcccagaccaggaggaccagaccctgctgatgaagttctgcctgctgtatggcaccaagctggtgttccaggagcgggcctggtacctggagcacaagtacctgacccccatggccagcacccgcatccggaaccagctgctggacctgtgtgacagcgtgaaggatgatgcccggcgggtcatcagcaccttcaacatcccccacacctacctgcacgcccccatcgccggcatcagcaacccccgggccgcctgggccttctacccagcccccctgcagccccggccccgggaggaggcccggagccggcggcccaagctgggcgccaagctgtag

SEQ ID NO: 54806 - DNA, 1296 bp, Artificial Sequence
  derived and/or modified sequence
atggaggacctgaagggccccaccgtgagcagcttcctgagcggcatgaaaacagaactataccccggggtgaccgcaatcgacatgatgtacaaagaagggcttcacggggtggataatggaatactgatctttgacaaagtgcggatcccaagagagaatctcttagataaattcgggagtgtcgccccagatgggcagtatcactcccctatccggaacaagagcgctagatttaatgcaatgttagccgctttgaccccctccaggctggcggtggcatttcaggccatgggcgccatgaagctgggactgacaatcgccatcagatacagccattcccggcggcagtttggccccaagacgaaagaagaagttaaaatcatagaacatcaaacacagacacttcgccttatgccacatctggccactgcactggctctgacctttgtgtcgaggtatgccggcgcattactggacgaagatgtcttccaagggaaggagctggtgaattctcgcagcctccaggcactagttgccggcctgaaggcttatagtacctgggagaacatcaggtgcctccaggattgcagggaatgtacaggcggaatggtagtgggtcgcgagctcttagctcaatacaccaaacagtatgaagagaaacctctctttggactgctgcagaattgggccgaaagtgtcggagacaaactaagaacatcttttcttgcgttcaacatggacaccgtggacgacctagcattcttgctgaaggccgtgaagttcagagagagggttcttcagagaggtttagttgctcgaatctattacaaagtaaagaccaaaaaagaagattttttccacgcttggaacagttgcctgcatcatgtcgcctccctgtcactggctcatacccatcgggtgacactggagcagttctctctggcggtgaagtcctgtcccgaccaggaggaccagaccttactgatgaagttctgcctcctgtacgggactaagctggtgttccaggagagggcatggtacctggaacataagtaccttacacccatggccagtacccgtattagaaatcagctcttggacctttgcgattccgttaaggacgacgcccgcagagtcatcagcactttcaacataccacacacttacctccacgcacccatcgccgggatatccaaccccagggccgcatgggctttttacccagcccccttgcagccacgacctcgtgaggaagcaagatcacgccggccgaaactgggtgccaaactgtag

SEQ ID NO: 54807 - DNA, 1743 bp, Artificial Sequence
  derived and/or modified sequence
atgcgggccctgaccgtgcagcgggtgaagttcgccatggacctgcctctgcttaagagggctggtcaggatctggccgagaagacaaaaaactttgtgtcgcggtcactggtcattggtgaagtactgagcatggcggacatggctacgggcgtgaagtgcgggattatctattggttatttggcggggctatccggaacctgggcagtcccgaacacgtaaccaagtggtttcagccattacaagagcagaagtacacaggtatgttcgccatgactgaaagggggcacgggagcaacgccagaggtattcagaccgaagccactttcgatctttcagcccaggagttcgtgatcgataccccttgcgagaacgcggaaaagatgtatattggtaacgcaatgtacggcaattacgccgccgtcttcgcgcagctcatcattgatggaagatctcagggcccccattgcttcatcgtgcccgttcgggacgagaacgggagcttataccctggcgtgacggcaattgacatgatgtataaggagggattacacggtgtcgataacggcatcctgatctttgacaaagtccgcatccctcgcgagaatctgttagacaagttcgggtcagttgccccagacggtcagtatcactctcccattcggaataagagtgcgcggtttaatgccatgttggccgccctgacacctagcaggctagcagtggcgtttcaagctatgggggccatgaaactcggattaaccattgcgatacggtactcccacagtcggagacaatttggcccgaagaccaaggaggaggtcaagatcattgagcaccaaacacagactttacggttaatgccccacttggctacagcactggctctgacttttgtgagccgctatgcgggcgctctcttggatgaagacgtgtttcagggcaaggagctagtgaattctcgatccctccaagccctcgtcgccggacttaaggcttatagcacgtgggaaaacattcggtgtctgcaggattgccgggagtgtacaggcggtatggttgtggggcgtgagctgttggcgcagtatacaaaacagtacgaagagaagccattgtttggactgctgcagaactgggctgagtccgtcggagataaacttcggacttcctttttggccttcaatatggacaccgtggatgacttggcatttctgctgaaggccgtgaagttccgtgagcgtgttttacaaagaggcctcgtcgcccgcatatactacaaggtgaagacgaagaaggaggatttcttccacgcctggaactcctgcctgcaccatgtggcaagcttgtcgttggcacatacccacagagtcaccttggagcagttcagccttgctgtgaaatcatgccctgatcaggaagatcagaccctcctgatgaaattttgcctcctgtacggcaccaaactcgtatttcaggagcgagcatggtacttggaacataagtatctgactcctatggctagcacaagaattcgtaatcaacttctggacttgtgcgacagcgtaaaggacgacgctcgacgggtaatatccactttcaatataccacacacctatttgcatgcccctatcgccgggattagtaatcccagagctgcatgggccttctaccctgctcctctgcagcctcgaccaagagaggaggcgcgcagtcggcgccccaaactgggagcaaaattatag

SEQ ID NO: 54808 - DNA, 2371 bp, Artificial Sequence
  derived and/or modified sequence
acctgctgggagctggaggaggcgcggagcgaagccggccctgccagccacgcggagaagcagaggcaggtgagcgcgatgcagccggcgccgggtctggggctcggggactcctccctgcaccgctacctggacggcgacttctggagcctcaagaacgagctgcgcggactcctcggcggcgcccgctcttccggcaaaggtatgatttaagcttggatgaaatgagagctttgacagttcagagagtgaagtttgccatggacctgcctctgttaaaacgtgcaggtcaggatctggcagagaaaacaaagaattttgtcagccgaagccttgtcataggagaagtcctctccatggcggacatggccacaggagtgaagtgcggaataatttattggctatttggtggtgctatcaggaatctcggaagccctgaacatgttactaagtggtttcagccactccaggagcagaaatacactgggatgtttgcaatgaccgagaggggccatgggagcaacgcgagagggatccagaccgaagccacctttgacctctctgcccaggagtttgtaattgacacgccgtgtgaaaatgcggagaagatgtatattggaaatgccatgtacgggaattatgcagctgtctttgcccagctcatcatagatggaagatctcaagggccccactgtttcatcgttcctgtccgggatgaaaacggaattgtacccaggagtcacagctattgatatgatgtacaaggagggtctgcatggtgtggacaatgggatattaatatttgacaaggttcggatacccagggagaacctgctggataagtttggttccgtggctccagatggacagtaccattcgcctattaggaacaagagtgcaagattcaatgccatgctggcagcactgaccccttcgagattagctgtggctttccaagctatgggtgccatgaagcttgggttgacgatagccattcgctatagccacagccggaggcagtttgggcccaaaaccaaggaagaggtgaagatcattgagcaccaaacacagaccctgcggctgatgccccacctggccacagccttggccctgaccttcgtcagcaggtatgctggggccctcctggatgaggatgtcttccagggaaaggagctggtcaacagtcgctcgctgcaggctctggtggcggggctgaaggcctacagcacctgggagaacatccgctgcctgcaggactgccgcgagtgcactggaggcatggttgtggggcgggaactgctggcccaatacaccaaacagtatgaagaaaaaccactctttggcctgctccaaaactgggctgaatctgtgggggacaagctgagaaccagtttcctggcatttaacatggacacagttgatgatctcgcctttctgttgaaagcagtgaaatttcgtgaaagggttcttcagcggggtttggtggccagaatttattataaggtaaagaccaagaaggaggattttttccatgcctggaactcgtgtctgcaccacgtggcttctctgtccctggcacacactcaccgagttaccttagagcagttctccctagcagtgaagagctgtcctgaccaagaggaccagactttgttaatgaagttttgtctgttgtatggaaccaagctggtgtttcaggagcgggcctggtatttagaacataaatacttgactcccatggccagcacgaggatcaggaatcagttgctggatttgtgcgactcggtgaaggatgatgcccggagggtgatctcgacctttaacattccacacacctacctccacgcaccaatcgccggaatctccaacccgcgggccgcgtgggctttctaccctgcaccgctgcagccgcggccacgggaagaggcgcgctcccggcggcccaagctgggagccaagctctaacgggtgtggcgggaagtgtggtggcccgccagcagctgccacgacgctcgctccaccgacgcccagagctgtggccgaggccgggggctggcacccgctgggccgccactctcggggattttggtggcaaagcggaggtcccgccgaggctggcgaggtgcgcggctggctgctaggaaagagatccagacggtcgcctggtgcgctggatccctgtgccctttccctgaaacccagcctggcctgactgcaacctctcccaacttcagtgccggatcccctagacaatcagggtgggctccccgctgcgagcgcgccccacagccgggtgccgccaaaggtctcctgctgttagcggtgactcacattcccagtgatttagaaaaactgtggtgccgagtgaaag

SEQ ID NO: 54809 - DNA, 1296 bp, Artificial Sequence
  derived and/or modified sequence
atggaggacttgaagggcccaacggtatccagctttttaagcggaatgaaaaccgaactgtatcctggcgtgaccgcaatcgatatgatgtataaggagggtctgcacggggtcgataacggaatcctgatcttcgataaagtcaggattccaagggagaatctgctggataagttcggatcagtcgctccagatgggcagtaccatagtccaatacgcaataaatcggcccgtttcaacgctatgctcgcagcactaactccctcgaggttggcagtggcgtttcaggctatgggtgctatgaagctgggcctgacaatagctatccgttactctcactccagacggcaattcggcccaaagaccaaagaggaggtaaagatcattgaacaccaaacgcagactctcaggcttatgcctcatctcgcaactgccctagcgctcacgtttgtgagtcgctatgccggtgcccttctggatgaggacgtgtttcagggcaaagaactggtgaatagccgcagcttgcaagcactagtagcaggtctgaaagcctattcgacatgggagaatatacgctgcctccaggattgccgggagtgcaccggtgggatggttgtaggccgtgagttgctggcccaatacaccaagcagtacgaggaaaagccactgtttggattactgcagaactgggcagaaagcgtcggggataagctgcggactagttttcttgcctttaacatggacacggttgatgatctggctttccttctgaaggctgtgaaattcagagaacgggttctgcaacggggattggtggctcgtatatactataaagttaagaccaaaaaagaggatttctttcacgcctggaacagttgcctgcatcatgtcgcttctctaagtctggcccacactcaccgagtgactctggagcagttctcgctggcagtgaagagctgtcccgaccaggaggaccagaccctgttaatgaagttttgtcttctctacggaacgaagcttgtgttccaggaacgggcttggtatctggagcataagtacttgacccccatggcctccaccaggattcgaaaccagcttctggacctgtgtgatagcgttaaggatgatgcaagacgcgtgatatcaacgttcaatatcccacatacttacttgcacgccccaatcgccggaatctccaatcccagggcagcatgggcgttttatcctgcgcctctccagcccagaccgagggaggaagctaggagcagacgccctaaactcggggcaaaactgtag

SEQ ID NO: 54810 - DNA, 1743 bp, Artificial Sequence
  derived and/or modified sequence
atgagagccctgactgtccagcgtgtgaaatttgctatggatctgccgcttctgaagagggcgggacaggatctggccgagaaaacaaagaacttcgtgtccaggtccctagtcattggggaagtgctcagtatggcagatatggccactggggtcaagtgtggcatcatttactggcttttcggcggagctattcggaatctggggtcaccagaacatgtgaccaaatggtttcagcccctgcaggaacagaagtacacaggtatgttcgcaatgacagagcgaggccacggttccaacgcccgtggaatccaaaccgaggcgacatttgatctcagtgcccaagaattcgtgattgacacaccctgcgagaatgcagagaagatgtacattgggaacgccatgtacgggaactacgccgcagtgttcgcccagctcatcattgatggcaggagtcagggtccgcattgctttattgttcctgtgagagatgaaaatgggagcctctaccccggagtcactgctatcgatatgatgtacaaggaggggctacatggagttgataatggcatccttatcttcgacaaggtgcgcattcctagagaaaacctcctggataaattcgggagcgtggctcccgacgggcaatatcactcccccatccggaacaaatctgccagattcaacgccatgctcgccgcactcacccctagcaggctggctgtggccttccaggcaatgggtgctatgaagctgggcctgactatagctatcaggtatagccacagtagacgccagttcggacccaagactaaagaagaggtaaagatcattgagcatcagacccagactctgagactgatgccacatctggcgaccgccctggccctgactttcgtttctcgctatgcaggcgcattgctcgacgaggacgtgttccagggcaaggaactcgtcaattcccgctcactgcaggcactggtggccggactgaaagcttacagcacttgggagaatattagatgcctgcaggactgcagagagtgcaccggcggaatggtggtggggagagagctcttggcccagtataccaagcagtacgaagagaaaccgttatttgggctgctacagaattgggctgagtctgtgggtgataaacttcggacttcattcctggcattcaacatggatacagtggacgacctcgccttccttcttaaagccgttaagttcagggagagagtgctgcaaagaggactcgtggcaaggatctactataaggttaagactaaaaaagaggacttttttcatgcctggaacagctgcttgcaccatgtcgcttccttatccctcgctcacactcaccgggtgactctggagcagttcagcctggcggtgaaatcttgtcccgaccaggaggatcagacactacttatgaagttttgtttgctgtacggaaccaagttggtctttcaggagagagcatggtatctcgaacataaatacctgacacccatggcgagtactcgcataaggaaccagctgctggatttgtgtgactccgtgaaggacgatgctcgaagggtgatctccacgtttaatatcccacatacatatctgcacgcaccaatcgctggcatttcaaatccccgagcagcatgggccttttacccagcaccactccagccccgaccaagagaagaagccagatctagaagaccgaaactgggcgctaaactttag

SEQ ID NO: 54811 - DNA, 2373 bp, Artificial Sequence
  derived and/or modified sequence
acctgctgggagctggaggaggcgcggagcgaagccggccctgccagccacgcggagaagcagaggcaggtgagcgcgatgcagccggcgccgggtctggggctcggggactcctccctgcaccgctacctggacggcgacttctggagcctcaagaacgagctgcgcggactcctcggcggcgcccgctcttccggcaaaggtatgatttaagcttggatgaaatgagagctttgacagttcagagagtgaagtttgccatggacctgcctctgttaaaacgtgcaggtcaggatctggcagagaaaacaaagaattttgtcagccgaagccttgtcataggagaagtcctctccatggcggacatggccacaggagtgaagtgcggaataatttattggctatttggtggtgctatcaggaatctcggaagccctgaacatgttactaagtggtttcagccactccaggagcagaaatacactgggatgtttgcaatgaccgagaggggccatgggagcaacgcgagagggatccagaccgaagccacctttgacctctctgcccaggagtttgtaattgacacgccgtgtgaaaatgcggagaagatgtatattggaaatgccatgtacgggaattatgcagctgtctttgcccagctcatcatagatggaagatctcaagggccccactgtttcatcgttcctgtccgggatgaaaacggaagcttgtacccaggagtcacagctattgatatgatgtacaaggagggtctgcatggtgtggacaatgggatattaatatttgacaaggttcggatacccagggagaacctgctggataagtttggttccgtggctccagatggacagtaccattcgcctattaggaacaagagtgcaagattcaatgccatgctggcagcactgaccccttcgagattagctgtggctttccaagctatgggtgccatgaagcttgggttgacgatagccattcgctatagccacagccggaggcagtttgggcccaaaaccaaggaagaggtgaagatcattgagcaccaaacacagaccctgcggctgatgccccacctggccacagccttggccctgaccttcgtcagcaggtatgctggggccctcctggatgaggatgtcttccagggaaaggagctggtcaacagtcgctcgctgcaggctctggtggcggggctgaaggcctacagcacctgggagaacatccgctgcctgcaggactgccgcgagtgcactggaggcatggttgtggggcgggaactgctggcccaatacaccaaacagtatgaagaaaaaccactctttggcctgctccaaaactgggctgaatctgtgggggacaagctgagaaccagtttcctggcatttaacatggacacagttgatgatctcgcctttctgttgaaagcagtgaaatttcgtgaaagggttcttcagcggggtttggtggccagaatttattataaggtaaagaccaagaaggaggattttttccatgcctggaactcgtgtctgcaccacgtggcttctctgtccctggcacacactcaccgagttaccttagagcagttctccctagcagtgaagagctgtcctgaccaagaggaccagactttgttaatgaagttttgtctgttgtatggaaccaagctggtgtttcaggagcgggcctggtatttagaacataaatacttgactcccatggccagcacgaggatcaggaatcagttgctggatttgtgcgactcggtgaaggatgatgcccggagggtgatctcgacctttaacattccacacacctacctccacgcaccaatcgccggaatctccaacccgcgggccgcgtgggctttctaccctgcaccgctgcagccgcggccacgggaagaggcgcgctcccggcggcccaagctgggagccaagctctaacgggtgtggcgggaagtgtggtggcccgccagcagctgccacgacgctcgctccaccgacgcccagagctgtggccgaggccgggggctggcacccgctgggccgccactctcggggattttggtggcaaagcggaggtcccgccgaggctggcgaggtgcgcggctggctgctaggaaagagatccagacggtcgcctggtgcgctggatccctgtgccctttccctgaaacccagcctggcctgactgcaacctctcccaacttcagtgccggatcccctagacaatcagggtgggctccccgctgcgagcgcgccccacagccgggtgccgccaaaggtctcctgctgttagcggtgactcacattcccagtgatttagaaaaactgtggtgccgagtgaaag

SEQ ID NO: 54812 - protein, 222 aa, Artificial Sequence
  derived and/or modified sequence
MAPPAAPGRDRVGREDEDGWETRGDRKARKPLVEKKRRARINESLQELRLLLAGAEAKLENAEVLELTVRRVQGVLRGRAREREQLQAEASERFAAGYIQCMHEVHTFVSTCQAIDATVAAELLNHLLESMPLREGSSFQDLLGDALAGPPRAPGRSGWPAGGAPGSPIPSPPGPGDDLCSDLEEAPEAELSQAPAEGPDLVPAALGSLTTAQIARSVWRPW

SEQ ID NO: 54813 - DNA, 669 bp, Artificial Sequence
  derived and/or modified sequence
atggctccaccagcggccccaggacgggacagggtgggtcgggaagatgaggatggatgggaaacacggggcgatcggaaagcccgaaagcctctagtggagaaaaaacggcgggcaagaattaacgagagtctccaggagctcaggctgctgctggctggcgcggaggccaagctggagaatgctgaagtgttggagctgacagtcaggcgggtccagggcgtccttaggggccgggccagagagcgtgagcagctgcaggccgaggcttcagagcgcttcgccgccggctatattcagtgcatgcacgaggtccacaccttcgtctcgacatgccaggcaatcgacgcgaccgtggccgctgagttgctgaatcacctattggagtccatgccactgcgcgaggggtcttcgttccaggacctccttggtgatgccctggctggtccaccgcgggcccctggaagatccggatggcctgcgggcggagcccctggcagccccataccaagccctcctggccccggagacgatctatgcagcgatctagaggaagctcccgaagcggaacttagccaagctcccgccgaaggccccgatctggtgccagccgcactgggtagcttaacaaccgcacagatagctcgctcagtgtggcggccctggtag

SEQ ID NO: 54814 - DNA, 1600 bp, Artificial Sequence
  derived and/or modified sequence
aagccgcgaggagcgcggacggctgggctgctgctgggcggccgcggggcagcggagggcgccggcactccggtccccgccgctccccgtccccgctgctcctagcccctgccgcgtccccggcggagcgggcatggcgccacccgcggcgcctggccgggaccgtgtgggccgtgaggatgaggacggctgggagacgcgaggggaccgcaaggcccggaagcccctggtggagaagaagcggcgcgcgcggatcaacgagagcctgcaggagctgcggctgctgctggcgggcgccgaggtgcaggccaagctggagaacgccgaagtgctggagctgacggtgcggcgggtccagggtgtgctgcggggccgggcgcgcggtgagtggcggcggggcgggcgggggcgccggccgcgggcgcctgtaacccctgccagacggaggacttccctcccggcgcccctgtcctgtcggcggcgagggctcccaccggagcagggtgcgcccccgcgtctcctgggtgagccgcgtccccgcgggccgggtgggctgggccacgcagtcgccgctcaccgcgcgggacgcggctctctccctcccaccctcgggcccagagcgcgagcagctgcaggcggaagcgagcgagcgcttcgctgccggctacatccagtgcatgcacgaggtgcacacgttcgtgtccacgtgccaggccatcgacgctaccgtcgctgccgagctcctgaaccatctgctcgagtccatgccgctgcgtgagggcagcagcttccaggatctgctgggggacgccctggcggggccacctagagcccctggacggagtggctggcctgcggggggcgctccgggatccccaatacccagccccccgggtcctggggacgacctgtgctccgacctggaggaggcccctgaggctgaactgagtcaggctcctgctgaggggcccgacttggtgcccgcagccctgggcagcctgaccacagcccaaattgcccggagtgtctggaggccttggtgaccaatgccagccagagtcctgcgggggtgggcccggccctccctggatctcctccctcctcccaggggttcagatgtggtggggtagggccctggaagtctcccaggtcttccctccctcctctgatggatggcttgcagggcagcccctggtaaccagcccagtcaggccccagccccgtttcttaagaaacttttagggaccctgcagctctggagtgggtggagggagggagctacgggcaggaggaagaattttgtagagctgccagcgctctcccaggttcacccacccaggcttcaccagccctgtgcgggctctgggggcagaggtggcagaaatggtgctgggcactagtgttccaggcagccctgggctaaacaaaagcttgaacttgccacttcagcggggagatgagaggcaggtgcactgagctgcactgcccagagctgtgatgctctgtacatcttgtttgtagcacacttgagtttgtgtattccattgacatcaaatgtgacaattttactaaataaagaattttggagttagttaccctt

SEQ ID NO: 54815 - DNA, 1286 bp, Artificial Sequence
  derived and/or modified sequence
ctccggtccccgccgctccccgtccccgctgctcctagcccctgccgcgtccccggcggagcgggcatggcgccacccgcggcgcctggccgggaccgtgtgggccgtgaggatgaggacggctgggagacgcgaggggaccgcaaggcccggaagcccctggtggagaagaagcggcgcgcgcggatcaacgagagcctgcaggagctgcggctgctgctggcgggcgccgaggccaagctggagaacgccgaagtgctggagctgacggtgcggcgggtccagggtgtgctgcggggccgggcgcgcgagcgcgagcagctgcaggcggaagcgagcgagcgcttcgctgccggctacatccagtgcatgcacgaggtgcacacgttcgtgtccacgtgccaggccatcgacgctaccgtcgctgccgagctcctgaaccatctgctcgagtccatgccgctgcgtgagggcagcagcttccaggatctgctgggggacgccctggcggggccacctagagcccctggacggagtggctggcctgcggggggcgctccgggatccccaatacccagccccccgggtcctggggacgacctgtgctccgacctggaggaggcccctgaggctgaactgagtcaggctcctgctgaggggcccgacttggtgcccgcagccctgggcagcctgaccacagcccaaattgcccggagtgtctggaggccttggtgaccaatgccagccagagtcctgcgggggtgggcccggccctccctggatctcctccctcctcccaggggttcagatgtggtggggtagggccctggaagtctcccaggtcttccctccctcctctgatggatggcttgcagggcagcccctggtaaccagcccagtcaggccccagccccgtttcttaagaaacttttagggaccctgcagctctggagtgggtggagggagggagctacgggcaggaggaagaattttgtagagctgccagcgctctcccaggttcacccacccaggcttcaccagccctgtgcgggctctgggggcagaggtggcagaaatggtgctgggcactagtgttccaggcagccctgggctaaacaaaagcttgaacttgccacttcagcggggagatgagaggcaggtgcactgagctgcactgcccagagctgtgatgctctgtacatcttgtttgtagcacacttgagtttgtgtattccattgacatcaaatgtgacaattttactaaataaagaattttggagttagtt

SEQ ID NO: 54816 - DNA, 669 bp, Artificial Sequence
  derived and/or modified sequence
atggcccctcctgctgcccctggccgggacagagtgggcagagaagatgaagatggctgggagaccaggggggacaggaaggccaggaagcccctggtggagaagaagagaagagcccgcatcaatgaaagcctgcaggagctgcggctgctgctggccggggctgaggccaagctggagaatgctgaggtgctggagctgactgtgcggcgggtgcagggcgtgctgcggggccgggcccgggagcgggagcagctgcaggccgaggccagcgagagatttgctgctggctacatccagtgcatgcatgaggtgcacacctttgtgtccacctgccaggccattgatgccaccgtggccgctgagctgctgaaccacctgctggagagcatgcccctgcgggagggcagcagcttccaggacctgctgggagatgccctggccggccccccccgggcccctggccgcagcggctggccagctggaggagcccctggcagccccatccccagccccccaggccctggagatgacctgtgcagcgacctggaggaggcccctgaggccgagctgagccaggccccagctgagggccctgacctggtgcctgctgccctgggcagcctgaccacagcccagatcgcccggtctgtgtggaggccctggtag

SEQ ID NO: 54817 - DNA, 669 bp, Artificial Sequence
  derived and/or modified sequence
atggccccccccgccgcccccggccgggaccgggtgggccgggaggatgaggatggatgggagacacgcggagatcggaaagccaggaagcccctggtggaaaagaaaaggagggctcgcatcaatgaaagcctccaagagctgcgcttgctgctggccggggctgaggccaagttggaaaacgccgaggtgctcgaacttacagtgaggcgggtgcaaggagtactgagaggaagggcgcgcgagcgcgagcaactgcaggctgaggcctcagaacggttcgctgctgggtatatccaatgtatgcatgaggtgcacaccttcgtctccacctgtcaggccattgacgcgaccgttgctgccgaactcctcaatcacttgctggaaagtatgcccctgagggaggggagttctttccaggatctgctgggggacgctctggcagggccacctagggcccccgggcgatccggctggcccgccggaggagctcccggaagtcccatacctagtcctcccgggcctggggatgatctatgctccgatctggaggaggctcccgaggccgagttgtcacaggctcccgccgaaggacctgacttagtgcctgcggccctaggttctctgaccacagcacaaatcgcgagatcagtgtggagaccatggtag

SEQ ID NO: 54818 - DNA, 669 bp, Artificial Sequence
  derived and/or modified sequence
atggcccctcccgctgcccctggcagagaccgggtcgggcgtgaagacgaggatggttgggaaacccgcggtgaccgtaaagccaggaagccgctcgtcgaaaaaaaacgcagggctcggattaacgagagcctacaagagctacgcctgctgttagcaggtgcagaggctaaactggaaaatgctgaagtgctcgagcttacggtgaggagggtccagggagtgctgcgaggtagggctagggagcgcgagcagctccaggctgaggctagtgagaggtttgccgcaggatacatccagtgcatgcacgaagtgcacacattcgtttccacctgccaggctattgacgcaacagtggccgctgagctgctgaaccacctacttgagtctatgcccctacgggaaggttcttctttccaggatctcttaggtgatgcccttgcaggacctcctcgcgcacctggcagaagcgggtggccagcagggggagccccagggagccccatcccaagccctccaggcccaggggacgatctgtgcagcgatttggaggaggcccctgaggcagaattgagtcaggctccagccgaggggccagacctggtccccgctgcactaggctccctgacaaccgcccagattgcaagatctgtctggcgcccatggtag

SEQ ID NO: 54819 - DNA, 669 bp, Artificial Sequence
  derived and/or modified sequence
atggccccccccgccgcccccggcagagacagagtgggcagagaggacgaggacggctgggagaccagaggcgacagaaaggccagaaagcccctggtggagaagaagagaagagccagaatcaacgagagcctgcaggagctgagactgctgctggccggcgccgaggccaagctggagaacgccgaggtgctggagctgaccgtgagaagagtgcagggcgtgctgagaggcagagccagagagagagagcagctgcaggccgaggccagcgagagattcgccgccggctacatccagtgcatgcacgaggtgcacaccttcgtgagcacctgccaggccatcgacgccaccgtggccgccgagctgctgaaccacctgctggagagcatgcccctgagagagggcagcagcttccaggacctgctgggcgacgccctggccggcccccccagagcccccggcagaagcggctggcccgccggcggcgcccccggcagccccatccccagcccccccggccccggcgacgacctgtgcagcgacctggaggaggcccccgaggccgagctgagccaggcccccgccgagggccccgacctggtgcccgccgccctgggcagcctgaccaccgcccagatcgccagaagcgtgtggagaccctggtag

SEQ ID NO: 54820 - protein, 2521 aa, Artificial Sequence
  derived and/or modified sequence
MEPHVLGAVLYWLLLPCALLAACLLRFSGLSLVYLLFLLLLPWFPGPTRCGLQGHTGRLLRALLGLSLLFLVAHLALQICLHIVPRLDQLLGPSCSRWETLSRHIGVTRLDLKDIPNAIRLVAPDLGILVVSSVCLGICGRLARNTRQSPHPRELDDDERDVDASPTAGLQEAATLAPTRRSRLAARFRVTAHWLLVAAGRVLAVTLLALAGIAHPSALSSVYLLLFLALCTWWACHFPISTRGFSRLCVAVGCFGAGHLICLYCYQMPLAQALLPPAGIWARVLGLKDFVGPTNCSSPHALVLNTGLDWPVYASPGVLLLLCYATASLRKLRAYRPSGQRKEAAKGYEARELELAELDQWPQERESDQHVVPTAPDTEADNCIVHELTGQSSVLRRPVRPKRAEPREASPLHSLGHLIMDQSYVCALIAMMVWSITYHSWLTFVLLLWACLIWTVRSRHQLAMLCSPCILLYGMTLCCLRYVWAMDLRPELPTTLGPVSLRQLGLEHTRYPCLDLGAMLLYTLTFWLLLRQFVKEKLLKWAESPAALTEVTVADTEPTRTQTLLQSLGELVKGVYAKYWIYVCAGMFIVVSFAGRLVVYKIVYMFLFLLCLTLFQVYYSLWRKLLKAFWWLVVAYTMLVLIAVYTFQFQDFPAYWRNLTGFTDEQLGDLGLEQFSVSELFSSILVPGFFLLACILQLHYFHRPFMQLTDMEHVSLPGTRLPRWAHRQDAVSGTPLLREEQQEHQQQQQEEEEEEEDSRDEGLGVATPHQATQVPEGAAKWGLVAERLLELAAGFSDVLSRVQVFLRRLLELHVFKLVALYTVWVALKEVSVMNLLLVVLWAFALPYPRFRPMASCLSTVWTCVIIVCKMLYQLKVVNPQEYSSNCTEPFPNSTNLLPTEISQSLLYRGPVDPANWFGVRKGFPNLGYIQNHLQVLLLLVFEAIVYRRQEHYRRQHQLAPLPAQAVFASGTRQQLDQDLLGCLKYFINFFFYKFGLEICFLMAVNVIGQRMNFLVTLHGCWLVAILTRRHRQAIARLWPNYCLFLALFLLYQYLLCLGMPPALCIDYPWRWSRAVPMNSALIKWLYLPDFFRAPNSTNLISDFLLLLCASQQWQVFSAERTEEWQRMAGVNTDRLEPLRGEPNPVPNFIHCRSYLDMLKVAVFRYLFWLVLVVVFVTGATRISIFGLGYLLACFYLLLFGTALLQRDTRARLVLWDCLILYNVTVIISKNMLSLLACVFVEQMQTGFCWVIQLFSLVCTVKGYYDPKEMMDRDQDCLLPVEEAGIIWDSVCFFFLLLQRRVFLSHYYLHVRADLQATALLASRGFALYNAANLKSIDFHRRIEEKSLAQLKRQMERIRAKQEKHRQGRVDRSRPQDTLGPKDPGLEPGPDSPGGSSPPRRQWWRPWLDHATVIHSGDYFLFESDSEEEEEAVPEDPRPSAQSAFQLAYQAWVTNAQAVLRRRQQEQEQARQEQAGQLPTGGGPSQEVEPAEGPEEAAAGRSHVVQRVLSTAQFLWMLGQALVDELTRWLQEFTRHHGTMSDVLRAERYLLTQELLQGGEVHRGVLDQLYTSQAEATLPGPTEAPNAPSTVSSGLGAEEPLSSMTDDMGSPLSTGYHTRSGSEEAVTDPGEREAGASLYQGLMRTASELLLDRRLRIPELEEAELFAEGQGRALRLLRAVYQCVAAHSELLCYFIIILNHMVTASAGSLVLPVLVFLWAMLSIPRPSKRFWMTAIVFTEIAVVVKYLFQFGFFPWNSHVVLRRYENKPYFPPRILGLEKTDGYIKYDLVQLMALFFHRSQLLCYGLWDHEEDSPSKEHDKSGEEEQGAEEGPGVPAATTEDHIQVEARVGPTDGTPEPQVELRPRDTRRISLRFRRRKKEGPARKGAAAIEAEDREEEEGEEEKEAPTGREKRPSRSGGRVRAAGRRLQGFCLSLAQGTYRPLRRFFHDILHTKYRAATDVYALMFLADVVDFIIIIFGFWAFGKHSAATDITSSLSDDQVPEAFLVMLLIQFSTMVVDRALYLRKTVLGKLAFQVALVLAIHLWMFFILPAVTERMFNQNVVAQLWYFVKCIYFALSAYQIRCGYPTRILGNFLTKKYNHLNLFLFQGFRLVPFLVELRAVMDWVWTDTTLSLSSWMCVEDIYANIFIIKCSRETEKKYPQPKGQKKKKIVKYGMGGLIILFLIAIIWFPLLFMSLVRSVVGVVNQPIDVTVTLKLGGYEPLFTMSAQQPSIIPFTAQAYEELSRQFDPQPLAMQFISQYSPEDIVTAQIEGSSGALWRISPPSRAQMKRELYNGTADITLRFTWNFQRDLAKGGTVEYANEKHMLALAPNSTARRQLASLLEGTSDQSVVIPNLFPKYIRAPNGPEANPVKQLQPNEEADYLGVRIQLRREQGAGATGFLEWWVIELQECRTDCNLLPMVIFSDKVSPPSLGFLAGYGIMGLYVSIVLVIGKFVRGFFSEISHSIMFEELPCVDRILKLCQDIFLVRETRELELEEELYAKLIFLYRSPETMIKWTREKE

SEQ ID NO: 54821 - protein, 373 aa, Artificial Sequence
  derived and/or modified sequence
MKICPFSSKSSIVLALKFRSLIHFEKYPQPKGQKKKKIVKYGMGGLIILFLIAIIWFPLLFMSLVRSVVGVVNQPIDVTVTLKLGGYEPLFTMSAQQPSIIPFTAQAYEELSRQFDPQPLAMQFISQYSPEDIVTAQIEGSSGALWRISPPSRAQMKRELYNGTADITLRFTWNFQRDLAKGGTVEYANEKHMLALAPNSTARRQLASLLEGTSDQSVVIPNLFPKYIRAPNGPEANPVKQLQPNEEADYLGVRIQLRREQGAGATGFLEWWVIELQECRTDCNLLPMVIFSDKHHGAVRVHRAGHRQVRARILQRDLALHYVRGAAVRGPHPQALPGHLPGAGDSGAGAGGGVVRQAHLPLPLTGDHDQVDS

SEQ ID NO: 54822 - protein, 2467 aa, Artificial Sequence
  derived and/or modified sequence
  misc_feature (1)..(1): Xaa can be any naturally occurring amino acid
XTGRLLRALLGLSLLFLVAHLALQICLHIVPRLDQLLGPSCSRWETLSRHIGVTRLDLKDIPNAIRLVAPDLGILVVSSVCLGICGRLARNTRQSPHPRELDDDERDVDASPTAGLQEAATLAPTRRSRLAARFRVTAHWLLVAAGRVLAVTLLALAGIAHPSALSSVYLLLFLALCTWWACHFPISTRGFSRLCVAVGCFGAGHLICLYCYQMPLAQALLPPAGIWARVLGLKDFVGPTNCSSPHALVLNTGLDWPVYASPGVLLLLCYATASLRKLRAYRPSGQRKEAAKGYEARELELAELDQWPQERESDQHVVPTAPDTEADNCIVHELTGQSSVLRRPVRPKRAEPREASPLHSLGHLIMDQSYVCALIAMMVWSITYHSWLTFVLLLWACLIWTVRSRHQLAMLCSPCILLYGMTLCCLRYVWAMDLRPELPTTLGPVSLRQLGLEHTRYPCLDLGAMLLYTLTFWLLLRQFVKEKLLKWAESPAALTEVTVADTEPTRTQTLLQSLGELVKGVYAKYWIYVCAGMFIVVSFAGRLVVYKIVYMFLFLLCLTLFQVYYSLWRKLLKAFWWLVVAYTMLVLIAVYTFQFQDFPAYWRNLTGFTDEQLGDLGLEQFSVSELFSSILVPGFFLLACILQLHYFHRPFMQLTDMEHVSLPGTRLPRWAHRQDAVSGTPLLREEQQEHQQQQQEEEEEEEDSRDEGLGVATPHQATQVPEGAAKWGLVAERLLELAAGFSDVLSRVQVFLRRLLELHVFKLVALYTVWVALKEVSVMNLLLVVLWAFALPYPRFRPMASCLSTVWTCVIIVCKMLYQLKVVNPQEYSSNCTEPFPNSTNLLPTEISQSLLYRGPVDPANWFGVRKGFPNLGYIQNHLQVLLLLVFEAIVYRRQEHYRRQHQLAPLPAQAVFASGTRQQLDQDLLGCLKYFINFFFYKFGLEICFLMAVNVIGQRMNFLVTLHGCWLVAILTRRHRQAIARLWPNYCLFLALFLLYQYLLCLGMPPALCIDYPWRWSRAVPMNSALIKWLYLPDFFRAPNSTNLISDFLLLLCASQQWQVFSAERTEEWQRMAGVNTDRLEPLRGEPNPVPNFIHCRSYLDMLKVAVFRYLFWLVLVVVFVTGATRISIFGLGYLLACFYLLLFGTALLQRDTRARLVLWDCLILYNVTVIISKNMLSLLACVFVEQMQTGFCWVIQLFSLVCTVKGYYDPKEMMDRDQDCLLPVEEAGIIWDSVCFFFLLLQRRVFLSHYYLHVRADLQATALLASRGFALYNAANLKSIDFHRRIEEKSLAQLKRQMERIRAKQEKHRQGRVDRSRPQDTLGPKDPGLEPGPDSPGGSSPPRRQWWRPWLDHATVIHSGDYFLFESDSEEEEEAVPEDPRPSAQSAFQLAYQAWVTNAQAVLRRRQQEQEQARQEQAGQLPTGGGPSQEVEPAEGPEEAAAGRSHVVQRVLSTAQFLWMLGQALVDELTRWLQEFTRHHGTMSDVLRAERYLLTQELLQGGEVHRGVLDQLYTSQAEATLPGPTEAPNAPSTVSSGLGAEEPLSSMTDDMGSPLSTGYHTRSGSEEAVTDPGEREAGASLYQGLMRTASELLLDRRLRIPELEEAELFAEGQGRALRLLRAVYQCVAAHSELLCYFIIILNHMVTASAGSLVLPVLVFLWAMLSIPRPSKRFWMTAIVFTEIAVVVKYLFQFGFFPWNSHVVLRRYENKPYFPPRILGLEKTDGYIKYDLVQLMALFFHRSQLLCYGLWDHEEDSPSKEHDKSGEEEQGAEEGPGVPAATTEDHIQVEARVGPTDGTPEPQVELRPRDTRRISLRFRRRKKEGPARKGAAAIEAEDREEEEGEEEKEAPTGREKRPSRSGGRVRAAGRRLQGFCLSLAQGTYRPLRRFFHDILHTKYRAATDVYALMFLADVVDFIIIIFGFWAFGKHSAATDITSSLSDDQVPEAFLVMLLIQFSTMVVDRALYLRKTVLGKLAFQVALVLAIHLWMFFILPAVTERMFNQNVVAQLWYFVKCIYFALSAYQIRCGYPTRILGNFLTKKYNHLNLFLFQGFRLVPFLVELRAVMDWVWTDTTLSLSSWMCVEDIYANIFIIKCSRETEKKYPQPKGQKKKKIVKYGMGGLIILFLIAIIWFPLLFMSLVRSVVGVVNQPIDVTVTLKLGGYEPLFTMSAQQPSIIPFTAQAYEELSRQFDPQPLAMQFISQYSPEDIVTAQIEGSSGALWRISPPSRAQMKRELYNGTADITLRFTWNFQRDLAKGGTVEYANEKHMLALAPNSTARRQLASLLEGTSDQSVVIPNLFPKYIRAPNGPEANPVKQLQPNEEADYLGVRIQLRREQGAGATGFLEWWVIELQECRTDCNLLPMVIFSDKVSPPSLGFLAGYGIMGLYVSIVLVIGKFVRGFFSEISHSIMFEELPCVDRILKLCQDIFLVRETRELELEEELYAKLIFLYRSPETMIKWTREKE

SEQ ID NO: 54823 - DNA, 7566 bp, Artificial Sequence
  derived and/or modified sequence
atggagccccacgtgctgggcgccgtgctgtactggctgctgctgccctgcgccctgctggccgcctgcctgctgagattcagcggcctgagcctggtgtacctgctgttcctgctgctgctgccctggttccccggccccaccagatgcggcctgcagggccacaccggcagactgctgagagccctgctgggcctgagcctgctgttcctggtggcccacctggccctgcagatctgcctgcacatcgtgcccagactggaccagctgctgggccccagctgcagcagatgggagaccctgagcagacacatcggcgtgaccagactggacctgaaggacatccccaacgccatcagactggtggcccccgacctgggcatcctggtggtgagcagcgtgtgcctgggcatctgcggcagactggccagaaacaccagacagagcccccaccccagagagctggacgacgacgagagagacgtggacgccagccccaccgccggcctgcaggaggccgccaccctggcccccaccagaagaagcagactggccgccagattcagagtgaccgcccactggctgctggtggccgccggcagagtgctggccgtgaccctgctggccctggccggcatcgcccaccccagcgccctgagcagcgtgtacctgctgctgttcctggccctgtgcacctggtgggcctgccacttccccatcagcaccagaggcttcagcagactgtgcgtggccgtgggctgcttcggcgccggccacctgatctgcctgtactgctaccagatgcccctggcccaggccctgctgccccccgccggcatctgggccagagtgctgggcctgaaggacttcgtgggccccaccaactgcagcagcccccacgccctggtgctgaacaccggcctggactggcccgtgtacgccagccccggcgtgctgctgctgctgtgctacgccaccgccagcctgagaaagctgagagcctacagacccagcggccagagaaaggaggccgccaagggctacgaggccagagagctggagctggccgagctggaccagtggccccaggagagagagagcgaccagcacgtggtgcccaccgcccccgacaccgaggccgacaactgcatcgtgcacgagctgaccggccagagcagcgtgctgagaagacccgtgagacccaagagagccgagcccagagaggccagccccctgcacagcctgggccacctgatcatggaccagagctacgtgtgcgccctgatcgccatgatggtgtggagcatcacctaccacagctggctgaccttcgtgctgctgctgtgggcctgcctgatctggaccgtgagaagcagacaccagctggccatgctgtgcagcccctgcatcctgctgtacggcatgaccctgtgctgcctgagatacgtgtgggccatggacctgagacccgagctgcccaccaccctgggccccgtgagcctgagacagctgggcctggagcacaccagatacccctgcctggacctgggcgccatgctgctgtacaccctgaccttctggctgctgctgagacagttcgtgaaggagaagctgctgaagtgggccgagagccccgccgccctgaccgaggtgaccgtggccgacaccgagcccaccagaacccagaccctgctgcagagcctgggcgagctggtgaagggcgtgtacgccaagtactggatctacgtgtgcgccggcatgttcatcgtggtgagcttcgccggcagactggtggtgtacaagatcgtgtacatgttcctgttcctgctgtgcctgaccctgttccaggtgtactacagcctgtggagaaagctgctgaaggccttctggtggctggtggtggcctacaccatgctggtgctgatcgccgtgtacaccttccagttccaggacttccccgcctactggagaaacctgaccggcttcaccgacgagcagctgggcgacctgggcctggagcagttcagcgtgagcgagctgttcagcagcatcctggtgcccggcttcttcctgctggcctgcatcctgcagctgcactacttccacagacccttcatgcagctgaccgacatggagcacgtgagcctgcccggcaccagactgcccagatgggcccacagacaggacgccgtgagcggcacccccctgctgagagaggagcagcaggagcaccagcagcagcagcaggaggaggaggaggaggaggaggacagcagagacgagggcctgggcgtggccaccccccaccaggccacccaggtgcccgagggcgccgccaagtggggcctggtggccgagagactgctggagctggccgccggcttcagcgacgtgctgagcagagtgcaggtgttcctgagaagactgctggagctgcacgtgttcaagctggtggccctgtacaccgtgtgggtggccctgaaggaggtgagcgtgatgaacctgctgctggtggtgctgtgggccttcgccctgccctaccccagattcagacccatggccagctgcctgagcaccgtgtggacctgcgtgatcatcgtgtgcaagatgctgtaccagctgaaggtggtgaacccccaggagtacagcagcaactgcaccgagcccttccccaacagcaccaacctgctgcccaccgagatcagccagagcctgctgtacagaggccccgtggaccccgccaactggttcggcgtgagaaagggcttccccaacctgggctacatccagaaccacctgcaggtgctgctgctgctggtgttcgaggccatcgtgtacagaagacaggagcactacagaagacagcaccagctggcccccctgcccgcccaggccgtgttcgccagcggcaccagacagcagctggaccaggacctgctgggctgcctgaagtacttcatcaacttcttcttctacaagttcggcctggagatctgcttcctgatggccgtgaacgtgatcggccagagaatgaacttcctggtgaccctgcacggctgctggctggtggccatcctgaccagaagacacagacaggccatcgccagactgtggcccaactactgcctgttcctggccctgttcctgctgtaccagtacctgctgtgcctgggcatgccccccgccctgtgcatcgactacccctggagatggagcagagccgtgcccatgaacagcgccctgatcaagtggctgtacctgcccgacttcttcagagcccccaacagcaccaacctgatcagcgacttcctgctgctgctgtgcgccagccagcagtggcaggtgttcagcgccgagagaaccgaggagtggcagagaatggccggcgtgaacaccgacagactggagcccctgagaggcgagcccaaccccgtgcccaacttcatccactgcagaagctacctggacatgctgaaggtggccgtgttcagatacctgttctggctggtgctggtggtggtgttcgtgaccggcgccaccagaatcagcatcttcggcctgggctacctgctggcctgcttctacctgctgctgttcggcaccgccctgctgcagagagacaccagagccagactggtgctgtgggactgcctgatcctgtacaacgtgaccgtgatcatcagcaagaacatgctgagcctgctggcctgcgtgttcgtggagcagatgcagaccggcttctgctgggtgatccagctgttcagcctggtgtgcaccgtgaagggctactacgaccccaaggagatgatggacagagaccaggactgcctgctgcccgtggaggaggccggcatcatctgggacagcgtgtgcttcttcttcctgctgctgcagagaagagtgttcctgagccactactacctgcacgtgagagccgacctgcaggccaccgccctgctggccagcagaggcttcgccctgtacaacgccgccaacctgaagagcatcgacttccacagaagaatcgaggagaagagcctggcccagctgaagagacagatggagagaatcagagccaagcaggagaagcacagacagggcagagtggacagaagcagaccccaggacaccctgggccccaaggaccccggcctggagcccggccccgacagccccggcggcagcagcccccccagaagacagtggtggagaccctggctggaccacgccaccgtgatccacagcggcgactacttcctgttcgagagcgacagcgaggaggaggaggaggccgtgcccgaggaccccagacccagcgcccagagcgccttccagctggcctaccaggcctgggtgaccaacgcccaggccgtgctgagaagaagacagcaggagcaggagcaggccagacaggagcaggccggccagctgcccaccggcggcggccccagccaggaggtggagcccgccgagggccccgaggaggccgccgccggcagaagccacgtggtgcagagagtgctgagcaccgcccagttcctgtggatgctgggccaggccctggtggacgagctgaccagatggctgcaggagttcaccagacaccacggcaccatgagcgacgtgctgagagccgagagatacctgctgacccaggagctgctgcagggcggcgaggtgcacagaggcgtgctggaccagctgtacaccagccaggccgaggccaccctgcccggccccaccgaggcccccaacgcccccagcaccgtgagcagcggcctgggcgccgaggagcccctgagcagcatgaccgacgacatgggcagccccctgagcaccggctaccacaccagaagcggcagcgaggaggccgtgaccgaccccggcgagagagaggccggcgccagcctgtaccagggcctgatgagaaccgccagcgagctgctgctggacagaagactgagaatccccgagctggaggaggccgagctgttcgccgagggccagggcagagccctgagactgctgagagccgtgtaccagtgcgtggccgcccacagcgagctgctgtgctacttcatcatcatcctgaaccacatggtgaccgccagcgccggcagcctggtgctgcccgtgctggtgttcctgtgggccatgctgagcatccccagacccagcaagagattctggatgaccgccatcgtgttcaccgagatcgccgtggtggtgaagtacctgttccagttcggcttcttcccctggaacagccacgtggtgctgagaagatacgagaacaagccctacttcccccccagaatcctgggcctggagaagaccgacggctacatcaagtacgacctggtgcagctgatggccctgttcttccacagaagccagctgctgtgctacggcctgtgggaccacgaggaggacagccccagcaaggagcacgacaagagcggcgaggaggagcagggcgccgaggagggccccggcgtgcccgccgccaccaccgaggaccacatccaggtggaggccagagtgggccccaccgacggcacccccgagccccaggtggagctgagacccagagacaccagaagaatcagcctgagattcagaagaagaaagaaggagggccccgccagaaagggcgccgccgccatcgaggccgaggacagagaggaggaggagggcgaggaggagaaggaggcccccaccggcagagagaagagacccagcagaagcggcggcagagtgagagccgccggcagaagactgcagggcttctgcctgagcctggcccagggcacctacagacccctgagaagattcttccacgacatcctgcacaccaagtacagagccgccaccgacgtgtacgccctgatgttcctggccgacgtggtggacttcatcatcatcatcttcggcttctgggccttcggcaagcacagcgccgccaccgacatcaccagcagcctgagcgacgaccaggtgcccgaggccttcctggtgatgctgctgatccagttcagcaccatggtggtggacagagccctgtacctgagaaagaccgtgctgggcaagctggccttccaggtggccctggtgctggccatccacctgtggatgttcttcatcctgcccgccgtgaccgagagaatgttcaaccagaacgtggtggcccagctgtggtacttcgtgaagtgcatctacttcgccctgagcgcctaccagatcagatgcggctaccccaccagaatcctgggcaacttcctgaccaagaagtacaaccacctgaacctgttcctgttccagggcttcagactggtgcccttcctggtggagctgagagccgtgatggactgggtgtggaccgacaccaccctgagcctgagcagctggatgtgcgtggaggacatctacgccaacatcttcatcatcaagtgcagcagagagaccgagaagaagtacccccagcccaagggccagaagaagaagaagatcgtgaagtacggcatgggcggcctgatcatcctgttcctgatcgccatcatctggttccccctgctgttcatgagcctggtgagaagcgtggtgggcgtggtgaaccagcccatcgacgtgaccgtgaccctgaagctgggcggctacgagcccctgttcaccatgagcgcccagcagcccagcatcatccccttcaccgcccaggcctacgaggagctgagcagacagttcgacccccagcccctggccatgcagttcatcagccagtacagccccgaggacatcgtgaccgcccagatcgagggcagcagcggcgccctgtggagaatcagcccccccagcagagcccagatgaagagagagctgtacaacggcaccgccgacatcaccctgagattcacctggaacttccagagagacctggccaagggcggcaccgtggagtacgccaacgagaagcacatgctggccctggcccccaacagcaccgccagaagacagctggccagcctgctggagggcaccagcgaccagagcgtggtgatccccaacctgttccccaagtacatcagagcccccaacggccccgaggccaaccccgtgaagcagctgcagcccaacgaggaggccgactacctgggcgtgagaatccagctgagaagagagcagggcgccggcgccaccggcttcctggagtggtgggtgatcgagctgcaggagtgcagaaccgactgcaacctgctgcccatggtgatcttcagcgacaaggtgagcccccccagcctgggcttcctggccggctacggcatcatgggcctgtacgtgagcatcgtgctggtgatcggcaagttcgtgagaggcttcttcagcgagatcagccacagcatcatgttcgaggagctgccctgcgtggacagaatcctgaagctgtgccaggacatcttcctggtgagagagaccagagagctggagctggaggaggagctgtacgccaagctgatcttcctgtacagaagccccgagaccatgatcaagtggaccagagagaaggagtag

SEQ ID NO: 54824 - DNA, 1122 bp, Artificial Sequence
  derived and/or modified sequence
atgaagatctgccccttcagcagcaagagcagcatcgtgctggccctgaagttcagaagcctgatccacttcgagaagtacccccagcccaagggccagaagaagaagaagatcgtgaagtacggcatgggcggcctgatcatcctgttcctgatcgccatcatctggttccccctgctgttcatgagcctggtgagaagcgtggtgggcgtggtgaaccagcccatcgacgtgaccgtgaccctgaagctgggcggctacgagcccctgttcaccatgagcgcccagcagcccagcatcatccccttcaccgcccaggcctacgaggagctgagcagacagttcgacccccagcccctggccatgcagttcatcagccagtacagccccgaggacatcgtgaccgcccagatcgagggcagcagcggcgccctgtggagaatcagcccccccagcagagcccagatgaagagagagctgtacaacggcaccgccgacatcaccctgagattcacctggaacttccagagagacctggccaagggcggcaccgtggagtacgccaacgagaagcacatgctggccctggcccccaacagcaccgccagaagacagctggccagcctgctggagggcaccagcgaccagagcgtggtgatccccaacctgttccccaagtacatcagagcccccaacggccccgaggccaaccccgtgaagcagctgcagcccaacgaggaggccgactacctgggcgtgagaatccagctgagaagagagcagggcgccggcgccaccggcttcctggagtggtgggtgatcgagctgcaggagtgcagaaccgactgcaacctgctgcccatggtgatcttcagcgacaagcaccacggcgccgtgagagtgcacagagccggccacagacaggtgagagccagaatcctgcagagagacctggccctgcactacgtgagaggcgccgccgtgagaggcccccacccccaggccctgcccggccacctgcccggcgccggcgacagcggcgccggcgccggcggcggcgtggtgagacaggcccacctgcccctgcccctgaccggcgaccacgaccaggtggacagctag

SEQ ID NO: 54825 - DNA, 7404 bp, Artificial Sequence
  derived and/or modified sequence
tgaaccggcagactgctgagagccctgctgggcctgagcctgctgttcctggtggcccacctggccctgcagatctgcctgcacatcgtgcccagactggaccagctgctgggccccagctgcagcagatgggagaccctgagcagacacatcggcgtgaccagactggacctgaaggacatccccaacgccatcagactggtggcccccgacctgggcatcctggtggtgagcagcgtgtgcctgggcatctgcggcagactggccagaaacaccagacagagcccccaccccagagagctggacgacgacgagagagacgtggacgccagccccaccgccggcctgcaggaggccgccaccctggcccccaccagaagaagcagactggccgccagattcagagtgaccgcccactggctgctggtggccgccggcagagtgctggccgtgaccctgctggccctggccggcatcgcccaccccagcgccctgagcagcgtgtacctgctgctgttcctggccctgtgcacctggtgggcctgccacttccccatcagcaccagaggcttcagcagactgtgcgtggccgtgggctgcttcggcgccggccacctgatctgcctgtactgctaccagatgcccctggcccaggccctgctgccccccgccggcatctgggccagagtgctgggcctgaaggacttcgtgggccccaccaactgcagcagcccccacgccctggtgctgaacaccggcctggactggcccgtgtacgccagccccggcgtgctgctgctgctgtgctacgccaccgccagcctgagaaagctgagagcctacagacccagcggccagagaaaggaggccgccaagggctacgaggccagagagctggagctggccgagctggaccagtggccccaggagagagagagcgaccagcacgtggtgcccaccgcccccgacaccgaggccgacaactgcatcgtgcacgagctgaccggccagagcagcgtgctgagaagacccgtgagacccaagagagccgagcccagagaggccagccccctgcacagcctgggccacctgatcatggaccagagctacgtgtgcgccctgatcgccatgatggtgtggagcatcacctaccacagctggctgaccttcgtgctgctgctgtgggcctgcctgatctggaccgtgagaagcagacaccagctggccatgctgtgcagcccctgcatcctgctgtacggcatgaccctgtgctgcctgagatacgtgtgggccatggacctgagacccgagctgcccaccaccctgggccccgtgagcctgagacagctgggcctggagcacaccagatacccctgcctggacctgggcgccatgctgctgtacaccctgaccttctggctgctgctgagacagttcgtgaaggagaagctgctgaagtgggccgagagccccgccgccctgaccgaggtgaccgtggccgacaccgagcccaccagaacccagaccctgctgcagagcctgggcgagctggtgaagggcgtgtacgccaagtactggatctacgtgtgcgccggcatgttcatcgtggtgagcttcgccggcagactggtggtgtacaagatcgtgtacatgttcctgttcctgctgtgcctgaccctgttccaggtgtactacagcctgtggagaaagctgctgaaggccttctggtggctggtggtggcctacaccatgctggtgctgatcgccgtgtacaccttccagttccaggacttccccgcctactggagaaacctgaccggcttcaccgacgagcagctgggcgacctgggcctggagcagttcagcgtgagcgagctgttcagcagcatcctggtgcccggcttcttcctgctggcctgcatcctgcagctgcactacttccacagacccttcatgcagctgaccgacatggagcacgtgagcctgcccggcaccagactgcccagatgggcccacagacaggacgccgtgagcggcacccccctgctgagagaggagcagcaggagcaccagcagcagcagcaggaggaggaggaggaggaggaggacagcagagacgagggcctgggcgtggccaccccccaccaggccacccaggtgcccgagggcgccgccaagtggggcctggtggccgagagactgctggagctggccgccggcttcagcgacgtgctgagcagagtgcaggtgttcctgagaagactgctggagctgcacgtgttcaagctggtggccctgtacaccgtgtgggtggccctgaaggaggtgagcgtgatgaacctgctgctggtggtgctgtgggccttcgccctgccctaccccagattcagacccatggccagctgcctgagcaccgtgtggacctgcgtgatcatcgtgtgcaagatgctgtaccagctgaaggtggtgaacccccaggagtacagcagcaactgcaccgagcccttccccaacagcaccaacctgctgcccaccgagatcagccagagcctgctgtacagaggccccgtggaccccgccaactggttcggcgtgagaaagggcttccccaacctgggctacatccagaaccacctgcaggtgctgctgctgctggtgttcgaggccatcgtgtacagaagacaggagcactacagaagacagcaccagctggcccccctgcccgcccaggccgtgttcgccagcggcaccagacagcagctggaccaggacctgctgggctgcctgaagtacttcatcaacttcttcttctacaagttcggcctggagatctgcttcctgatggccgtgaacgtgatcggccagagaatgaacttcctggtgaccctgcacggctgctggctggtggccatcctgaccagaagacacagacaggccatcgccagactgtggcccaactactgcctgttcctggccctgttcctgctgtaccagtacctgctgtgcctgggcatgccccccgccctgtgcatcgactacccctggagatggagcagagccgtgcccatgaacagcgccctgatcaagtggctgtacctgcccgacttcttcagagcccccaacagcaccaacctgatcagcgacttcctgctgctgctgtgcgccagccagcagtggcaggtgttcagcgccgagagaaccgaggagtggcagagaatggccggcgtgaacaccgacagactggagcccctgagaggcgagcccaaccccgtgcccaacttcatccactgcagaagctacctggacatgctgaaggtggccgtgttcagatacctgttctggctggtgctggtggtggtgttcgtgaccggcgccaccagaatcagcatcttcggcctgggctacctgctggcctgcttctacctgctgctgttcggcaccgccctgctgcagagagacaccagagccagactggtgctgtgggactgcctgatcctgtacaacgtgaccgtgatcatcagcaagaacatgctgagcctgctggcctgcgtgttcgtggagcagatgcagaccggcttctgctgggtgatccagctgttcagcctggtgtgcaccgtgaagggctactacgaccccaaggagatgatggacagagaccaggactgcctgctgcccgtggaggaggccggcatcatctgggacagcgtgtgcttcttcttcctgctgctgcagagaagagtgttcctgagccactactacctgcacgtgagagccgacctgcaggccaccgccctgctggccagcagaggcttcgccctgtacaacgccgccaacctgaagagcatcgacttccacagaagaatcgaggagaagagcctggcccagctgaagagacagatggagagaatcagagccaagcaggagaagcacagacagggcagagtggacagaagcagaccccaggacaccctgggccccaaggaccccggcctggagcccggccccgacagccccggcggcagcagcccccccagaagacagtggtggagaccctggctggaccacgccaccgtgatccacagcggcgactacttcctgttcgagagcgacagcgaggaggaggaggaggccgtgcccgaggaccccagacccagcgcccagagcgccttccagctggcctaccaggcctgggtgaccaacgcccaggccgtgctgagaagaagacagcaggagcaggagcaggccagacaggagcaggccggccagctgcccaccggcggcggccccagccaggaggtggagcccgccgagggccccgaggaggccgccgccggcagaagccacgtggtgcagagagtgctgagcaccgcccagttcctgtggatgctgggccaggccctggtggacgagctgaccagatggctgcaggagttcaccagacaccacggcaccatgagcgacgtgctgagagccgagagatacctgctgacccaggagctgctgcagggcggcgaggtgcacagaggcgtgctggaccagctgtacaccagccaggccgaggccaccctgcccggccccaccgaggcccccaacgcccccagcaccgtgagcagcggcctgggcgccgaggagcccctgagcagcatgaccgacgacatgggcagccccctgagcaccggctaccacaccagaagcggcagcgaggaggccgtgaccgaccccggcgagagagaggccggcgccagcctgtaccagggcctgatgagaaccgccagcgagctgctgctggacagaagactgagaatccccgagctggaggaggccgagctgttcgccgagggccagggcagagccctgagactgctgagagccgtgtaccagtgcgtggccgcccacagcgagctgctgtgctacttcatcatcatcctgaaccacatggtgaccgccagcgccggcagcctggtgctgcccgtgctggtgttcctgtgggccatgctgagcatccccagacccagcaagagattctggatgaccgccatcgtgttcaccgagatcgccgtggtggtgaagtacctgttccagttcggcttcttcccctggaacagccacgtggtgctgagaagatacgagaacaagccctacttcccccccagaatcctgggcctggagaagaccgacggctacatcaagtacgacctggtgcagctgatggccctgttcttccacagaagccagctgctgtgctacggcctgtgggaccacgaggaggacagccccagcaaggagcacgacaagagcggcgaggaggagcagggcgccgaggagggccccggcgtgcccgccgccaccaccgaggaccacatccaggtggaggccagagtgggccccaccgacggcacccccgagccccaggtggagctgagacccagagacaccagaagaatcagcctgagattcagaagaagaaagaaggagggccccgccagaaagggcgccgccgccatcgaggccgaggacagagaggaggaggagggcgaggaggagaaggaggcccccaccggcagagagaagagacccagcagaagcggcggcagagtgagagccgccggcagaagactgcagggcttctgcctgagcctggcccagggcacctacagacccctgagaagattcttccacgacatcctgcacaccaagtacagagccgccaccgacgtgtacgccctgatgttcctggccgacgtggtggacttcatcatcatcatcttcggcttctgggccttcggcaagcacagcgccgccaccgacatcaccagcagcctgagcgacgaccaggtgcccgaggccttcctggtgatgctgctgatccagttcagcaccatggtggtggacagagccctgtacctgagaaagaccgtgctgggcaagctggccttccaggtggccctggtgctggccatccacctgtggatgttcttcatcctgcccgccgtgaccgagagaatgttcaaccagaacgtggtggcccagctgtggtacttcgtgaagtgcatctacttcgccctgagcgcctaccagatcagatgcggctaccccaccagaatcctgggcaacttcctgaccaagaagtacaaccacctgaacctgttcctgttccagggcttcagactggtgcccttcctggtggagctgagagccgtgatggactgggtgtggaccgacaccaccctgagcctgagcagctggatgtgcgtggaggacatctacgccaacatcttcatcatcaagtgcagcagagagaccgagaagaagtacccccagcccaagggccagaagaagaagaagatcgtgaagtacggcatgggcggcctgatcatcctgttcctgatcgccatcatctggttccccctgctgttcatgagcctggtgagaagcgtggtgggcgtggtgaaccagcccatcgacgtgaccgtgaccctgaagctgggcggctacgagcccctgttcaccatgagcgcccagcagcccagcatcatccccttcaccgcccaggcctacgaggagctgagcagacagttcgacccccagcccctggccatgcagttcatcagccagtacagccccgaggacatcgtgaccgcccagatcgagggcagcagcggcgccctgtggagaatcagcccccccagcagagcccagatgaagagagagctgtacaacggcaccgccgacatcaccctgagattcacctggaacttccagagagacctggccaagggcggcaccgtggagtacgccaacgagaagcacatgctggccctggcccccaacagcaccgccagaagacagctggccagcctgctggagggcaccagcgaccagagcgtggtgatccccaacctgttccccaagtacatcagagcccccaacggccccgaggccaaccccgtgaagcagctgcagcccaacgaggaggccgactacctgggcgtgagaatccagctgagaagagagcagggcgccggcgccaccggcttcctggagtggtgggtgatcgagctgcaggagtgcagaaccgactgcaacctgctgcccatggtgatcttcagcgacaaggtgagcccccccagcctgggcttcctggccggctacggcatcatgggcctgtacgtgagcatcgtgctggtgatcggcaagttcgtgagaggcttcttcagcgagatcagccacagcatcatgttcgaggagctgccctgcgtggacagaatcctgaagctgtgccaggacatcttcctggtgagagagaccagagagctggagctggaggaggagctgtacgccaagctgatcttcctgtacagaagccccgagaccatgatcaagtggaccagagagaaggagtag

SEQ ID NO: 54826 - DNA, 7566 bp, Artificial Sequence
  derived and/or modified sequence
atggaacctcatgtcttgggagccgtgctgtactggctcttacttccctgtgccttgctggcagcttgtctgctcagattctccgggctatcactagtatacttactgttcttgctgctcctgccgtggtttcccgggcccactagatgcggccttcaaggtcacacgggccgacttctgagagctctcctcggcttaagtctcctttttctggtggcacaccttgcgctacagatctgcctgcacatcgtgcctagattggatcagctgctcgggccttcatgttcccgctgggagaccttgagcaggcacataggtgttacgcgtctggacctgaaagacataccgaacgcaattcggttagttgctccagatctggggatcctggtcgtttcctcggtctgcctcgggatctgcggtcggctggcgcgaaatactcgacagagcccccatcccagagagcttgacgatgacgagagagacgtggatgcctcgcccacggctggactgcaggaggccgcaaccttggcccctacacgtcgatcaagactggccgcccggttcagagtcacagcccattggctgcttgtcgccgccggccgggttttagctgtgactctcctcgcactcgcaggtattgcgcatccctccgcactgtccagcgtttatctgcttctattccttgccctgtgcacatggtgggcgtgccatttccccatctcgacacgagggttttcccggctgtgtgtggctgtggggtgctttggagcgggccatctgatctgtctctattgctaccaaatgcctctggcacaggccttactgccgccagctggtatctgggcgcgggtcctgggccttaaagacttcgttggcccaacgaattgctccagcccccacgcactcgttctcaataccgggcttgactggcctgtatatgcctcccccggcgtgttgctgctgctgtgttacgctacggccagtctccgcaaattgcgcgcttatagacccagtgggcagaggaaggaagcagcaaaggggtatgaggcacgggaattggaactcgctgagctggatcagtggccacaggagagagagtctgatcagcacgttgtccctacagctccggacaccgaagcagacaactgcatcgtgcacgagctcacggggcagtcttctgtactgagaaggcccgtgagacctaagcgagctgaaccacgagaagcttcccccctccacagcctcggccatcttattatggatcagtcctatgtatgcgcgctgatcgccatgatggtgtggtcgataacttatcacagctggcttactttcgtcctgctgctgtgggcttgccttatttggaccgtgagatcgagacaccagctcgctatgctgtgctctccatgcatcctgctgtacggcatgaccctttgctgtctgaggtacgtttgggccatggacttgagacccgagctgcctacaaccctaggtccagtgagcctgaggcagctggggttagaacacaccaggtacccctgcttagatcttggggccatgttgctctacacactgaccttttggctgctcttgaggcaattcgtgaaggaaaaactcctcaaatgggcagagagtccggccgcactgaccgaggtgaccgtggctgatacagaacccactcgaacccagaccctcttacagagcctgggcgagcttgtgaaaggggtgtacgctaaatattggatttacgtatgcgcgggaatgttcatcgtagtgtcattcgccggccgtttggtggtgtacaagattgtgtatatgttcctctttctgctttgtctgacattatttcaggtgtattacagcctgtggcgtaaactcttgaaagccttttggtggctcgtcgtggcttacaccatgctggtcctaatcgctgtgtataccttccaatttcaggacttcccagcttactggcgtaacttgactggattcaccgacgaacagcttggggatttgggcctggagcagtttagcgtgtctgaactgttttcttccattttggtgccaggattcttcctgttggcctgtatcctgcaactgcactactttcacagacctttcatgcagctcactgacatggagcatgtttcgctgcctggcacacgacttccgaggtgggcacaccggcaagatgccgtttccgggaccccactgctcagggaggagcagcaggaacaccaacaacagcagcaggaagaggaagaggaagaagaagattcccgagatgagggcttgggcgtggctaccccccaccaggctacccaggtacccgagggagcagccaaatggggcctagtggccgagcgactcctggagctggctgccgggttctctgatgttctgagcagggtccaagtgttcctgcggcgcctgcttgagctccacgtcttcaaattggtggccctttacaccgtgtgggtcgccctgaaagaagtgtctgttatgaaccttctcctcgttgtcctgtgggcattcgcattgccttacccacgtttcagacccatggcaagttgtcttagcacggtatggacatgtgtgataatcgtttgcaagatgctctaccagcttaaagtggttaatcctcaggagtattcaagcaactgcacagagccctttccgaattctaccaacctgctcccaactgaaatatctcagtctttactgtatcgcggcccagtggacccggccaattggttcggggtgcgaaaaggctttcccaatctgggctatatccaaaaccatctccaggtgctgctgctcctggtgtttgaagctattgtctacagaagacaggaacattacagacgacagcaccagcttgctcccctgcctgcccaggcggtgtttgcctctggcacgcggcagcagctggatcaagacctgctcggatgcctgaagtactttatcaatttctttttctacaaatttggcttagaaatctgctttttgatggctgtcaacgtgattgggcagcgtatgaactttctggtgactctccatggctgctggctggtggccatacttacccggcgccaccgccaggctatcgcgaggctttggccaaactactgcttattcctagctctgttcctgctataccagtatctgctgtgcctgggaatgcccccagctctgtgcattgattatccatggaggtggtccagggccgttcccatgaattccgcgttaatcaagtggctctaccttcctgatttcttcagagcgcccaatagcactaatctgattagcgatttcctactgctgctctgcgcctctcaacagtggcaggtgttctcagccgagcgcactgaagaatggcagagaatggcaggagttaacactgaccgcttagagcccctccgtggcgagcccaatcccgtaccgaacttcattcattgccggagttacctggacatgttgaaggtggctgtgttcaggtatctgttttggttggtcttggtagtggtgttcgtaacaggagccactcgcatctccatatttgggcttgggtaccttcttgcttgtttttacctgctgctgttcggaaccgcattgctgcagcgtgatactagagcgagactcgttctgtgggattgtcttatcctatacaatgtgacagtgatcatctccaaaaatatgctatctctcctggcatgcgtcttcgttgaacagatgcagacagggttctgttgggtaattcaactgttctccctggtttgcaccgtcaaggggtactacgaccccaaggagatgatggatagagaccaagattgcctgctgccagttgaggaagctggcattatatgggactctgtctgcttctttttcctcctgctgcagcgacgagttttccttagtcactattatttgcacgtgagggctgacctccaagcgactgcactgctggccagccgaggattcgccttgtataacgctgctaacctgaagagcatcgattttcatcgtcggatcgaagagaagagcctggcccaacttaaacgacaaatggagcggatcagagccaagcaggagaagcatagacaaggaagagtagaccggtctcggcctcaggataccctgggccccaaggatcccgggctggagcccggccccgatagccctggtggctctagtccaccacggcgtcagtggtggaggccatggctcgaccacgctactgtgattcattctggggattactttctgttcgaatccgactccgaggaggaggaggaagcagtgcccgaggacccacgcccaagcgcccaatcggctttccagctggcataccaggcatgggtgaccaacgctcaggctgtgctgcgcaggcggcagcaggaacaggagcaggctagacaggaacaggctgggcagctcccaacaggcggtggccccagccaggaagtcgagcccgccgaagggccagaggaggctgccgccgggcggagccacgtggtgcagcgcgtgctgtccacggcccagtttctgtggatgctgggccaggcgctggtcgatgaattaacccgttggttgcaggagtttaccagacatcacggtactatgtccgacgtactaagagccgagcgatatttgctcacccaagagctgctccagggcggcgaggtccaccgcggagtgctggaccagttatacacttcccaagccgaagcaacactccccggcccaaccgaagcacctaacgctccttccaccgtttctagtggcctgggcgcagaggagccgctgagttctatgacggacgatatgggctctcccctctccactggttaccatacgcgctccggcagcgaagaagccgtgactgatccaggtgagagagaagctggggcaagcctgtaccagggcctaatgagaaccgcaagcgagctgttattggataggcgcctaagaattccagaactggaagaagctgaactgtttgcggaggggcagggaagggctttgcgcttactgagggcagtgtatcagtgcgttgcagcgcatagtgaactcttgtgctacttcatcatcatcctgaatcacatggtcaccgcttccgccgggtcgcttgtgctgcccgtactggtgtttctttgggccatgctatcgatccctaggccctcgaagagattttggatgactgcaatcgtttttacggagattgccgtggtcgtcaagtacttgttccaatttggcttctttccatggaactcccacgtggtgctacgccgatacgagaacaagccctactttcccccccgaatcctggggctggagaagaccgatggctatatcaaatacgatctggtgcagcttatggccctcttcttccatcgctcccagctattgtgctacggactgtgggaccacgaggaggacagccctagtaaggagcatgacaagagcggcgaagaggaacagggagcagaagaagggcctggtgtgcctgccgcgaccaccgaagatcacatccaggtcgaagcaagggtgggacccacggacggaactccggagccccaggtagagctccgtcctagggatactcgccgcatatccctgcgcttccgacgtcgcaagaaggaagggccagcccggaagggcgccgccgctattgaagctgaagatagagaggaagaggagggcgaggaagagaaggaggcccctaccggcagggagaagaggccaagtagaagcgggggccgggtacgagcagccgggaggaggctccaaggattttgcctttcactcgcccaaggcacctatcgccctctccgtcgcttctttcatgacattttacatacgaaatacagagccgccacagacgtgtacgccttgatgtttctcgcagatgtcgtcgactttataataataatttttggattttgggcttttggaaaacatagcgccgctaccgatatcacgtccagtctgagtgatgatcaggtgccagaagccttcttagtgatgctgctgattcagttctcaaccatggtggtggatagggccctgtacctccggaagacagtactcgggaagttggcttttcaagtggctttagtcctcgcaatacatttgtggatgttctttatattgccagccgtcactgagagaatgtttaaccagaacgtcgtggcacagctctggtactttgtaaagtgtatctacttcgccctaagcgcatatcagatccggtgtgggtaccccacgcgcattctgggcaacttccttaccaaaaagtacaatcacctgaacttattccttttccaagggttccggctggtcccttttctggtagaactgagggccgttatggactgggtatggactgacaccaccctaagtcttagtagctggatgtgcgtggaggacatctatgccaacattttcattattaagtgctctcgggaaacagaaaagaaataccctcagcccaagggacagaagaagaaaaaaattgtcaagtatggtatgggaggtttgatcatactgtttctgatcgccatcatatggtttcctctcttattcatgagtctggtgaggtctgtggtgggcgtcgtgaaccagcccatagatgtcaccgtcacacttaagttgggaggctacgagcccctctttacgatgagtgcacagcagccatctatcattccttttactgcccaggcctacgaggaattgagccgccagttcgaccctcagccactggctatgcaattcattagccagtattctccagaggatatcgtcactgctcagattgaaggctccagcggggctttgtggcggatcagtccaccatccagagcccagatgaaaagggagctttacaatggcaccgccgacattactctccggtttacttggaacttccaaagggatttagcaaaaggcgggacagtcgaatatgcgaacgaaaaacatatgttggctctcgcacccaacagcacagcccgccgtcagctggccagtttgctggagggaacaagcgatcagtccgtggttattcctaatctatttccaaagtatatccgagcccctaacgggcccgaggcaaacccggtgaagcagctgcagccaaacgaagaggcagattatctgggggtgcggattcagctacgtagggaacagggcgccggagctactggattcctcgaatggtgggttatagaattgcaggaatgtcgaaccgattgtaatttactcccgatggtgatcttctcggacaaagtgagtcctccttccctcggcttcttagccggatatggcatcatgggactttatgtgagcatagttctcgttattggaaaattcgttcgtgggtttttttccgaaatctcccactctattatgttcgaagagttgccgtgtgtggataggattctgaaactgtgccaagatatatttttagtacgggagactagagaactggaacttgaggaagagctgtacgcgaagctgatcttcctctatagatcccctgagaccatgattaagtggactagggaaaaagaatag

SEQ ID NO: 54827 - DNA, 1122 bp, Artificial Sequence
  derived and/or modified sequence
atgaaaatctgtcctttttcatcaaagagtagcattgtgctcgcccttaagttcaggtccctcattcacttcgagaaatacccacagcccaaggggcagaagaaaaaaaaaatagtgaaatatggaatggggggcctgattattctattcctgatcgctattatttggttccctctgctttttatgtccctcgttagatccgttgtgggagtggtaaaccagccgatcgacgtgaccgttacactgaaactgggaggctatgaaccactgttcacaatgagcgctcagcagccttcgatcatcccttttacggcgcaggcctatgaggagctcagcagacagttcgatccccagcccctcgctatgcagttcatttcacagtacagccctgaggatatcgttactgcacagatagagggctcttcaggtgccttatggcgtattagtccaccatccagggctcaaatgaaacgggaactctataacggcactgcagatattacccttaggttcacatggaacttccagagggatctggcaaagggtggcactgtggaatatgccaacgaaaagcatatgctggctttggccccaaactcaactgcccgaaggcaactcgcaagcttgctggaaggtacctccgatcagagcgtcgtcataccgaatctgttccctaaatatatccgtgctcctaatgggcctgaggccaatccagtgaagcaactccaacccaacgaggaggccgattatttgggggtgcgtatacaactgcgccgcgagcagggagccggagcaaccgggttcctcgagtggtgggtgatcgaactgcaggagtgccgcacagattgcaacctcctgccaatggttatttttagcgacaaacaccatggggcagtgagagttcatagagctggacacagacaggtccgagctagaatccttcagagggatctcgctctacactacgtcagaggggccgcagtccgaggaccacatccccaggcgctaccgggccacctacccggtgcaggggacagcggtgccggcgccggggggggtgtggtgcgccaggcccacttgcctcttcccctgacaggcgatcacgaccaagtggactcctag

SEQ ID NO: 54828 - DNA, 7404 bp, Artificial Sequence
  derived and/or modified sequence
tgaaccggacggcttttgcgcgctctgcttgggctgagtcttttatttctggttgctcacttagctctgcagatttgtttgcacatcgttccccggctggaccaactgcttggccccagttgtagtcgctgggagacactgtctcgccacatcggggtcacccgcctggatctgaaagacatccctaacgccatcaggctggtggcccccgatctgggcatcctggtcgtcagcagtgtgtgtctcggcatctgtggccgactggcgaggaatactaggcaatccccacaccctcgagaactggatgacgacgagcgagatgtggatgccagccccacagcagggttgcaagaagctgccacgttagctccaacccggcgtagcagactggctgcgaggttccgagtcactgcccattggctcctcgtcgccgccggtcgagttctggcagtaactctgctggccctggcaggaatagctcacccgagcgcactttccagtgtttatttactcctcttcttggccctctgcacctggtgggcgtgtcactttcccatctctacgcgcggattttcacgcctgtgcgtggctgtcggatgcttcggtgccggtcatctcatctgtctgtattgttaccagatgccattggctcaggctctgctgcctcccgccggaatctgggcaagggttcttggcctaaaagacttcgtcggtcccacgaattgcagctctccgcacgcccttgtcttgaacacaggtttggattggcctgtttatgcgagcccaggggtgttgttgttactatgttacgctactgccagcttacggaagctccgggcctatcggccctcaggccagaggaaggaggccgctaagggttatgaagccagagaattggaactcgcagagctggaccagtggcctcaggaacgcgagagcgaccagcacgtggtccccacagctcctgacacggaggctgataactgtatcgtgcacgaactgaccggacaatcaagtgtgctgagacgccccgtgagacctaagagagctgaacctcgcgaagcctcgccacttcacagcctaggccacctcatcatggaccagtcctatgtctgtgccctgatcgccatgatggtatggtccattacataccatagttggttgacattcgtgctgttattatgggcgtgcctaatttggacagtccggagccgacatcaactggcaatgctctgttctccatgcatcttgctctatgggatgactctatgttgtctgcgatacgtatgggcaatggatctgcgacctgaactgcctaccaccttggggcccgtgtcactccggcagctgggccttgaacacacccgatatccatgcttagaccttggggctatgcttctctacacactgactttttggcttttgctaaggcaatttgtgaaagaaaagctgttaaaatgggctgaatctccggccgcgctcaccgaagtcacagtggccgacacagaacctacacgcactcaaaccctcctgcaatcactcggagaacttgtgaaaggagtctatgcaaaatactggatctatgtgtgcgctggaatgtttatcgtggtgtcttttgccgggcggctggtggtttacaagatcgtctatatgtttctcttcttactctgcttgactttattccaggtatattacagcctttggagaaagctgctgaaagcattctggtggcttgtggtggcctacacgatgttggtgttaattgcggtgtacacattccagtttcaggattttccagcttactggcggaatctcacgggatttacggatgaacagcttggggacctgggactggagcagttttccgtctctgaactgttctccagcatcctggtgccaggattcttcttgctagcctgcattctccagcttcattacttccatagaccttttatgcagttaactgacatggagcacgtttcattgccaggaacccgactgcctcgatgggcccatcgacaggatgccgttagcggcacaccactcctgagggaagagcagcaggaacatcaacaacaacagcaggaggaagaggaagaagaagaggattccagggacgagggtttaggggtggctacaccacaccaggcgactcaagtgcctgaaggggcagctaagtggggtcttgtggccgagaggctcctagaactcgctgcggggttctccgacgtgctgtctcgcgtccaggtctttttgcgcagactactggaattgcatgttttcaaactagtcgccttatatactgtatgggtggcgctcaaagaagtgtcagttatgaacttgctgctagtggtactgtgggcatttgctctgccttatcctagattcaggcctatggccagttgtctttcaaccgtctggacatgtgttatcatcgtctgtaaaatgctataccagcttaaagtggttaacccacaggaatactcatctaattgcaccgagccattccctaattccaccaatcttctgccaactgaaatcagtcagtcactgctatatagaggtcctgttgaccccgctaattggttcggggtgagaaaaggatttcctaacctggggtatattcagaatcaccttcaggtgctgttgctcttagtttttgaggctatagtgtaccgccgtcaggagcactacagacggcaacatcaacttgcccccctgcccgcccaggcagtcttcgcctcggggaccaggcaacagctggaccaggacctgctggggtgtcttaagtattttattaacttttttttctacaaatttgggctggaaatctgctttttaatggctgtgaatgtgatcggtcagcgtatgaatttcttggtgactctccatggctgttggctggtggccatactcacaagacgccaccgccaggcaattgcacgcctgtggccgaactactgtctgttccttgccctctttctgctttatcagtacctattgtgtctgggcatgccaccagctctttgcatagattatccatggcgctggagcagagcagtgcctatgaactccgccctgattaagtggctgtacctacccgattttttcagggcacctaactccaccaacctcatctcagattttcttctcttactgtgcgcatctcagcagtggcaagttttctccgccgagcgaacggaagaatggcagaggatggccggagttaacactgacaggctggagccacttaggggcgaacccaacccagtgccgaactttatacattgccggagctatctggacatgcttaaagtagcagtcttccgctatcttttctggcttgtgctggttgtcgtcttcgtcacgggcgcaacccggatcagcatatttggacttggatacttactggcctgtttctacttactgctctttggaactgctttgttgcaaagggataccagagccagacttgtgctctgggattgcttgattttgtacaacgtgacagtcataatcagcaaaaacatgctgagtctactggcctgcgtgttcgtggagcaaatgcaaacaggattttgttgggtgattcagttgttctcgttggtttgcaccgttaagggctactacgatcctaaagaaatgatggaccgcgaccaggattgcctgctgccagttgaggaggcaggaataatctgggacagcgtctgtttcttcttcctcctattacagcgccgggtgttcctgtctcactattacctccatgtgagggccgacctgcaggcaacagctttacttgcctctcggggatttgctctgtataacgccgcgaaccttaagagcatcgatttccatcgacggatagaggaaaagagcctggcgcagctgaagcgccagatggagaggatcagagcaaagcaggagaaacatcgccaagggcgggttgatcggagtcggccccaggacactctgggcccaaaggacccaggtctggaacccggacccgattcaccaggcggcagctccccaccccgtcggcagtggtggaggccctggctggaccacgccacagtgatccatagcggcgactactttctgttcgaatctgacagcgaggaggaagaagaggccgtccctgaggacccaaggccttctgcacagtctgcgttccaacttgcataccaggcgtgggttaccaacgcacaagctgtgctgaggaggaggcaacaggaacaagaacaggcacgtcaggagcaggccggccagttgcctaccggcgggggcccaagccaggaagtggagccggcagaggggccagaagaggccgcggcggggcgctctcacgtggtacagagagttctttccactgcccagttcttgtggatgctgggtcaggccctcgtggacgaattaaccaggtggctccaggagtttacgcgacatcacgggaccatgtccgacgtgctgcgtgctgagcggtatttgctgacacaagaattgctgcagggaggggaagtgcatcgtggcgttctcgaccagctttacacgtctcaggcagaagcaaccttaccagggcctaccgaggctcccaatgctccgagcacagtaagcagcggactcggagcagaggagcccctatcaagcatgaccgacgacatgggcagtcctctgtcaaccgggtatcacacccggtccgggtcggaggaagcagtgacggatcctggagaacgggaggcaggagcttcactttaccaagggctgatgcggacagcgtctgaacttctgctcgatcgcagacttaggatacccgagctggaggaagctgaattatttgctgaggggcagggacgggccctgcggttgcttcgcgcagtctaccagtgtgtggcagcccattccgagctcttgtgttatttcattattattctaaaccacatggttactgccagtgccggtagcctggtactgccagtgttagtgttcctctgggctatgctaagcattcctaggccatcaaaacgcttttggatgactgctatcgtgtttacagagatcgctgtagttgtcaagtacctgtttcagtttgggttcttcccttggaacagccacgtggtcctgcgcagatatgaaaacaagccttatttccccccccggatcctggggcttgagaaaactgacgggtatatcaagtacgatcttgtacagctgatggccttgtttttccacagatcccaattgctttgctatgggttgtgggatcacgaggaagatagcccatctaaggagcatgacaagtcaggagaggaggagcagggtgccgaggaaggccccggcgttcccgccgctacaacggaagaccatatccaagtagaagcgagggtcgggccaactgatggaaccccggagccacaagtggagctccgcccaagagatacacggaggatttcccttcgatttcggcgtagaaagaaggagggtccagcgcgcaagggagctgccgctatcgaggcagaggatagagaggaggaggaaggcgaggaagaaaaagaggcccccacagggagggagaaacgcccctcaagaagtggcggcagggtgagagccgcaggtaggcgcctgcagggtttctgcctaagtctggcacagggaacctaccgcccactgaggcgcttttttcatgatatcctccacaccaaataccgcgcagctacagacgtgtacgccctcatgtttctggcggatgtggtggacttcatcataattattttcggcttctgggctttcgggaagcatagcgcagccacggatattacatcatcactctcggacgaccaggttccagaggctttccttgtcatgctgcttattcagttctccacgatggtcgtcgaccgagccctctacctacggaagaccgtcttaggaaagctggccttccaagtggccctcgtcttagcgattcatctgtggatgttcttcattctgcctgctgtaaccgagaggatgtttaaccagaacgttgtggcacagctgtggtactttgtcaagtgtatctattttgcactttcagcttaccaaatcaggtgcggctatccaacccggattttagggaacttcttgacaaaaaaatataaccacctgaatcttttcctgtttcagggttttcggttggttccctttctggtggagctgagagccgtgatggactgggtttggaccgatactacgttgtctctgtcatcatggatgtgcgttgaagatatctacgccaacatttttatcataaaatgtagccgggaaaccgagaagaagtaccctcagcctaaaggtcagaagaagaagaagatagtgaagtatggtatgggaggactgatcatacttttcctgatcgccattatttggtttccactgctgttcatgtcattggtaaggagcgtggtgggcgttgtcaaccagcccatcgacgtgaccgtgaccctgaaattaggtggatatgagccgctcttcactatgtcagctcagcaaccttccatcattcctttcacggctcaggcatatgaggagttgtcccgccaattcgatccgcaacctttggctatgcaattcatctctcagtactctcccgaagatattgtgactgcccagatcgagggatcatccggcgccttgtggcgcatatctcctccctccagggcccaaatgaagagggagctgtataacggcaccgccgatataaccctgcggttcacctggaatttccagagggatcttgccaagggaggcacggtggagtacgccaatgaaaaacacatgttggcgttggccccgaatagtacggcccggcggcagctggcttcattgttagaaggaacctcagaccagtctgttgttattcctaatctgttccctaaatatattagggcccccaacggccccgaagccaatcccgttaaacaactccagcccaacgaggaggccgattatctcggtgtccgcatccagctcagacgggagcaaggagctggggccaccggattcctcgagtggtgggtcatcgagttacaggaatgtagaaccgactgtaatttgctaccaatggtgattttctccgataaggtctcccccccttccctggggtttctggctgggtacggcatcatggggctttacgttagcattgtgttggtaattggtaagttcgtcaggggcttctttagcgagatctcgcatagcattatgtttgaagagctgccatgtgtagatcgaatccttaagctgtgccaggatatttttctcgtccgggaaacacgcgagctggaactcgaagaagaactgtacgccaagctgatattcctatacaggtccccagagacgatgatcaaatggaccagagagaaggagtag

SEQ ID NO: 54829 - DNA, 7566 bp, Artificial Sequence
  derived and/or modified sequence
atggagccccacgtgctgggcgctgtgctgtactggctgctgctgccctgtgccctgctggccgcctgcctgctgcgcttcagcggcctgagcctggtgtacctgctcttcctgctgctgctgccctggttccctggccccacccgctgtggcctgcagggccacacaggccgcctgctgcgggccctgctgggcctgagcctgctcttcctggtggcccacctggccctgcagatctgcctgcacatcgtgccccggctggaccagctgctgggccccagctgcagccgctgggagaccctgagccgccacatcggcgtgacccggctggacctgaaggacatccccaatgccatccggctggtggccccagacctgggcatcctggtggtgtcctctgtgtgcctgggcatctgtggccgcctggccaggaacacccggcagagcccccacccccgggagctggatgatgatgaaagagatgtggatgccagccccacagctggcctgcaggaggccgccaccctggcccccacccggcgcagccggctggccgcccgcttccgggtgacagcccactggctgctggtggccgccggccgggtgctggccgtgaccctgctggccctggccggcatcgcccaccccagcgccctgagctctgtgtacctgctgctcttcctggccctgtgcacctggtgggcctgccacttccccatcagcacccggggcttcagccggctgtgtgtggccgtgggctgctttggagctggccacctgatctgcctgtactgctaccagatgcccctggcccaggccctgctgcccccagctggcatctgggcccgggtgctgggcctgaaggactttgtgggccccaccaactgcagcagcccccacgccctggtgctgaacacaggcctggactggcctgtgtatgccagccctggggtgctgctgctgctgtgctacgccacagccagcctgaggaagctgcgggcctaccggcccagcggccagaggaaggaggccgccaagggctatgaggcccgggagctggagctggccgagctggaccagtggccccaggagcgggagagtgaccagcacgtggtgcccacagccccagacacagaggccgacaactgcatcgtgcatgagctgaccggccagagctctgtgctgcggcggcctgtgcggcccaagagagctgagccccgggaggccagccccctgcacagcctgggccacctgatcatggaccagagctatgtgtgtgccctgattgccatgatggtgtggagcatcacctaccacagctggctgacctttgtgctgctgctgtgggcctgcctgatctggacagtgcgcagccgccaccagctggccatgctgtgcagcccctgcatcctgctgtatggcatgaccctgtgctgcctgcgctacgtgtgggccatggacctgcggcctgagctgcccaccaccctgggccctgtgtccctgcggcagctgggcctggagcacacccgctacccctgcctggacctgggcgccatgctgctgtacaccctgaccttctggctgctgctgcggcagtttgtgaaggagaagctgctgaagtgggccgagagccctgctgccctgacagaggtgacagtggccgacacagagcccaccaggacccagaccctgctgcagagcctgggggagctggtgaagggcgtgtatgccaagtactggatctacgtgtgtgccggcatgtttattgtggtgtcctttgctggccgcctggtggtgtacaagatcgtgtacatgttcctgttcctgctgtgcctgaccctcttccaggtgtactacagcctgtggaggaagctgctgaaggccttctggtggctggtggtggcctacaccatgctggtgctgattgctgtgtacaccttccagttccaggacttccctgcctactggaggaacctgaccggcttcacagatgagcagctgggggacctgggcctggagcagttctctgtgtctgagctgttcagcagcatcctggtgcccggcttcttcctgctggcctgcatcctgcagctgcactacttccaccggcccttcatgcagctgacagacatggagcacgtgtccctgcccggcacccggctgccccgctgggcccaccggcaggatgctgtgtctggcacccccctgctgcgggaggagcagcaggagcaccagcagcagcagcaggaggaggaggaggaggaggaggacagcagagatgagggcctgggcgtggccaccccccaccaggccacccaggtgcctgagggcgccgccaagtggggcctggtggccgagcggctgctggagctggccgccggcttcagtgatgtgctgagccgggtgcaggtgttcctgcggcggctgctggagctgcacgtgttcaagctggtggccctgtacacagtgtgggtggccctgaaggaggtgtctgtgatgaacctgctgctggtggtgctgtgggcctttgccctgccctacccccgcttccggcccatggccagctgcctgagcacagtgtggacctgtgtgatcatcgtgtgcaagatgctgtaccagctgaaggtggtgaacccccaggagtacagcagcaactgcacagagcccttccccaacagcaccaacctgctgcccacagagatcagccagagcctgctgtaccggggccctgtggaccctgccaactggtttggagtgaggaagggcttccccaacctgggctacatccagaaccacctgcaggtgctgctgctgctggtgtttgaggccatcgtgtaccgccggcaggagcactaccgccggcagcaccagctggcccccctgcctgcccaggccgtgtttgccagcggcacccggcagcagctggaccaggacctgctgggctgcctgaagtacttcatcaacttcttcttctacaagtttggcctggagatctgcttcctgatggctgtgaatgtgattggccagaggatgaacttcctggtgaccctgcacggctgctggctggtggccatcctgacccggcggcaccggcaggccatcgcccggctgtggcccaactactgcctcttcctggccctcttcctgctgtaccagtacctgctgtgcctgggcatgcccccagccctgtgcatcgactacccctggcgctggagcagagctgtgcccatgaacagcgccctgatcaagtggctgtacctgcctgacttcttccgggcccccaacagcaccaacctgatcagtgacttcctgctgctgctgtgtgccagccagcagtggcaggtgttttctgctgagaggacagaggagtggcagaggatggccggcgtgaacacagaccggctggagcccctgcggggggagcccaaccctgtgcccaacttcatccactgccgcagctacctggacatgctgaaggtggccgtgttccgctacctgttctggctggtgctggtggtggtgtttgtgactggagccacccgcatcagcatcttcggcctgggctacctgctggcctgcttctacctgctgctgtttggaacagccctgctgcagagggacacccgggcccggctggtgctgtgggactgcctgatcctgtacaacgtgaccgtcatcatcagcaagaacatgctgagcctgctggcctgtgtgtttgtggagcagatgcagacaggcttctgctgggtgatccagctgttcagcctggtgtgcaccgtgaagggctactatgaccccaaggagatgatggaccgggaccaggactgcctgctgcctgtggaggaggccggcatcatctgggacagcgtgtgcttcttcttcctgctgctgcagaggagggtcttcctgagccactactacctgcacgtgcgggctgacctgcaggccacagccctgctggccagccggggctttgccctgtacaatgctgccaacctgaagagcattgacttccaccggcgcatcgaggagaagagcctggcccagctgaagaggcagatggagcgcatccgggccaagcaggagaagcaccggcagggccgggtggacaggagccggccccaggacaccctgggccccaaggaccccggcctggagcccggccctgacagccctgggggcagcagccccccccggcggcagtggtggaggccctggctggaccacgccaccgtcatccacagcggggactacttcctgtttgaaagtgacagcgaggaggaggaggaggccgtgcctgaggacccccggcccagcgcccagagcgccttccagctggcctaccaggcctgggtgaccaatgcccaggccgtgctgcggcggcggcagcaggagcaggagcaggcccggcaggagcaggccggccagctgcccactggaggcggccccagccaggaggtggagcctgctgagggccctgaggaggccgccgccggccgcagccacgtggtgcagagggtgctgagcacagcccagttcctgtggatgctgggccaggccctggtggatgagctgacccgctggctgcaggagttcaccaggcaccacggcaccatgtctgatgtgctgcgggcagagcgctacctgctgacccaggagctgctgcagggcggggaggtgcacagaggagtgctggaccagctgtacaccagccaggccgaggccaccctgcccggccccacagaggccccaaatgcccccagcacagtgagcagcggcctgggcgctgaggagcccctgagctccatgacagatgacatgggcagccccctgagcacaggctaccacaccaggagcggcagcgaggaggccgtgacagaccccggggagcgggaggccggggccagcctgtaccagggcctgatgaggacagccagcgagctgctgctggaccggcggctgcgcatccctgagctggaggaggccgagctgtttgctgagggccagggccgggccctgcggctgctgcgggctgtgtaccagtgtgtggccgcccacagcgagctgctgtgctacttcatcatcatcctgaaccacatggtgacagccagcgctggcagcctggtgctgcctgtgctggtgttcctgtgggccatgctgagcatcccccggcccagcaagcgcttctggatgacagccatcgtgttcacagaaattgctgtggtggtgaagtacctgttccagtttggcttcttcccctggaacagccacgtggtgctgcggcgctatgagaacaagccctacttccccccacgcatcctgggcctggagaagacagatggctacatcaagtatgacctggtgcagctgatggccctcttcttccacaggagccagctgctgtgctacggcctgtgggaccacgaggaggacagccccagcaaggagcatgacaagagcggggaggaggagcagggcgctgaggagggccctggggtgcctgctgccaccacagaggaccacatccaggtggaggcccgggtgggccccacagatggcaccccagagccccaggtggagctgcggccccgggacacccggcgcatcagcctgcgcttcagaagaaggaagaaggagggccctgccaggaaaggagctgctgccattgaagctgaggaccgggaggaggaggagggggaggaggagaaggaggcccccaccggccgggagaagaggcccagccgcagcggcggccgggtgcgggctgctggaagaaggctgcagggcttctgcctgagcctggcccagggcacctaccggcccctgcggcgcttcttccatgacatcctgcacaccaagtaccgggccgccacagatgtgtatgccctgatgttcctggctgatgtggtggacttcatcatcatcatcttcggcttctgggccttcggcaagcacagcgctgccacagacatcaccagcagcctgagtgatgaccaggtgcctgaggccttcctggtgatgctgctgatccagttcagcaccatggtggtggaccgggccctgtacctgaggaagacagtgctgggcaagctggccttccaggtggccctggtgctggccatccacctgtggatgttcttcatcctgcctgctgtgacagagaggatgttcaaccagaatgtggtggcccagctgtggtactttgtgaagtgcatctactttgccctgagcgcctaccagatccgctgtggctaccccacccgcatcctgggcaacttcctgaccaagaagtacaaccacctgaacctcttcctgttccagggcttccggctggtgcccttcctggtggagctgcgggctgtgatggactgggtgtggacagacaccaccctgagcctgagctcctggatgtgtgtggaggacatctatgccaacatcttcatcatcaagtgcagccgggagacagagaagaagtacccccagcccaagggccagaagaagaagaagatcgtgaagtatggcatgggcggcctcatcatcctcttcctgattgccatcatctggttccccctgctcttcatgagcctggtgcgctctgtggtgggcgtggtgaaccagcccattgatgtgacagtgaccctgaagctgggcggctatgagcccctcttcaccatgtctgcccagcagcccagcatcatccccttcaccgcccaggcctatgaggagctgagccggcagtttgacccccagcccctggccatgcagttcatcagccagtacagcccagaagatattgtgacagcccagatcgagggcagcagcggggccctgtggaggatcagcccccccagccgggcccagatgaagcgggagctgtacaacggcacagctgacatcaccctgcgcttcacctggaacttccagagggacctggccaagggcggcaccgtggagtatgccaatgagaagcacatgctggccctggcccccaacagcacagcccggcggcagctggccagcctgctggagggcaccagtgaccagagcgtggtgatccccaacctcttccccaagtacatccgggcccccaacggccctgaggccaaccctgtgaagcagctgcagcccaatgaggaggccgactacctgggcgtgcgcatccagctgcggcgggagcagggcgctggggccaccggcttcctggagtggtgggtgattgagctgcaggagtgcaggacagactgcaacctgctgcccatggtgatcttcagtgacaaggtgtccccacccagcctgggcttcctggccggctacggcatcatgggcctgtatgtgtccatcgtgctggtgattggcaagtttgtgcggggcttcttcagcgagatcagccacagcatcatgtttgaggagctgccctgtgtggaccgcatcctgaagctgtgccaggacatcttcctggtgcgggagacccgggagctggagctggaggaggagctgtatgccaagctgatcttcctgtaccgcagccctgagaccatgatcaagtggacccgggagaaggagtag

SEQ ID NO: 54830 - DNA, 1122 bp, Artificial Sequence
  derived and/or modified sequence
atgaagatctgccccttcagcagcaagagcagcatcgtgctggccctgaagttccgcagcctcatccactttgagaagtacccccagcccaagggccagaagaagaagaagatcgtgaagtatggcatgggcggcctcatcatcctcttcctgattgccatcatctggttccccctgctcttcatgagcctggtgcgctctgtggtgggcgtggtgaaccagcccattgatgtgacagtgaccctgaagctgggcggctatgagcccctcttcaccatgtctgcccagcagcccagcatcatccccttcaccgcccaggcctatgaggagctgagccggcagtttgacccccagcccctggccatgcagttcatcagccagtacagcccagaagatattgtgacagcccagatcgagggcagcagcggggccctgtggaggatcagcccccccagccgggcccagatgaagcgggagctgtacaacggcacagctgacatcaccctgcgcttcacctggaacttccagagggacctggccaagggcggcaccgtggagtatgccaatgagaagcacatgctggccctggcccccaacagcacagcccggcggcagctggccagcctgctggagggcaccagtgaccagagcgtggtgatccccaacctcttccccaagtacatccgggcccccaacggccctgaggccaaccctgtgaagcagctgcagcccaatgaggaggccgactacctgggcgtgcgcatccagctgcggcgggagcagggcgctggggccaccggcttcctggagtggtgggtgattgagctgcaggagtgcaggacagactgcaacctgctgcccatggtgatcttcagtgacaagcaccacggggctgtgcgggtgcaccgggccggccaccggcaggtgcgggcccgcatcctgcagagggacctggccctgcactacgtgagaggagctgctgtgcggggcccccacccccaggccctgcccggccacctgcctggagctggggacagcggggccggggccggcggcggcgtggtgcggcaggcccacctgcccctgcccctgactggagaccatgaccaggtggacagctag

SEQ ID NO: 54831 - DNA, 7404 bp, Artificial Sequence
  derived and/or modified sequence
tgaacaggccgcctgctgcgggccctgctgggcctgagcctgctcttcctggtggcccacctggccctgcagatctgcctgcacatcgtgccccggctggaccagctgctgggccccagctgcagccgctgggagaccctgagccgccacatcggcgtgacccggctggacctgaaggacatccccaatgccatccggctggtggccccagacctgggcatcctggtggtgtcctctgtgtgcctgggcatctgtggccgcctggccaggaacacccggcagagcccccacccccgggagctggatgatgatgaaagagatgtggatgccagccccacagctggcctgcaggaggccgccaccctggcccccacccggcgcagccggctggccgcccgcttccgggtgacagcccactggctgctggtggccgccggccgggtgctggccgtgaccctgctggccctggccggcatcgcccaccccagcgccctgagctctgtgtacctgctgctcttcctggccctgtgcacctggtgggcctgccacttccccatcagcacccggggcttcagccggctgtgtgtggccgtgggctgctttggagctggccacctgatctgcctgtactgctaccagatgcccctggcccaggccctgctgcccccagctggcatctgggcccgggtgctgggcctgaaggactttgtgggccccaccaactgcagcagcccccacgccctggtgctgaacacaggcctggactggcctgtgtatgccagccctggggtgctgctgctgctgtgctacgccacagccagcctgaggaagctgcgggcctaccggcccagcggccagaggaaggaggccgccaagggctatgaggcccgggagctggagctggccgagctggaccagtggccccaggagcgggagagtgaccagcacgtggtgcccacagccccagacacagaggccgacaactgcatcgtgcatgagctgaccggccagagctctgtgctgcggcggcctgtgcggcccaagagagctgagccccgggaggccagccccctgcacagcctgggccacctgatcatggaccagagctatgtgtgtgccctgattgccatgatggtgtggagcatcacctaccacagctggctgacctttgtgctgctgctgtgggcctgcctgatctggacagtgcgcagccgccaccagctggccatgctgtgcagcccctgcatcctgctgtatggcatgaccctgtgctgcctgcgctacgtgtgggccatggacctgcggcctgagctgcccaccaccctgggccctgtgtccctgcggcagctgggcctggagcacacccgctacccctgcctggacctgggcgccatgctgctgtacaccctgaccttctggctgctgctgcggcagtttgtgaaggagaagctgctgaagtgggccgagagccctgctgccctgacagaggtgacagtggccgacacagagcccaccaggacccagaccctgctgcagagcctgggggagctggtgaagggcgtgtatgccaagtactggatctacgtgtgtgccggcatgtttattgtggtgtcctttgctggccgcctggtggtgtacaagatcgtgtacatgttcctgttcctgctgtgcctgaccctcttccaggtgtactacagcctgtggaggaagctgctgaaggccttctggtggctggtggtggcctacaccatgctggtgctgattgctgtgtacaccttccagttccaggacttccctgcctactggaggaacctgaccggcttcacagatgagcagctgggggacctgggcctggagcagttctctgtgtctgagctgttcagcagcatcctggtgcccggcttcttcctgctggcctgcatcctgcagctgcactacttccaccggcccttcatgcagctgacagacatggagcacgtgtccctgcccggcacccggctgccccgctgggcccaccggcaggatgctgtgtctggcacccccctgctgcgggaggagcagcaggagcaccagcagcagcagcaggaggaggaggaggaggaggaggacagcagagatgagggcctgggcgtggccaccccccaccaggccacccaggtgcctgagggcgccgccaagtggggcctggtggccgagcggctgctggagctggccgccggcttcagtgatgtgctgagccgggtgcaggtgttcctgcggcggctgctggagctgcacgtgttcaagctggtggccctgtacacagtgtgggtggccctgaaggaggtgtctgtgatgaacctgctgctggtggtgctgtgggcctttgccctgccctacccccgcttccggcccatggccagctgcctgagcacagtgtggacctgtgtgatcatcgtgtgcaagatgctgtaccagctgaaggtggtgaacccccaggagtacagcagcaactgcacagagcccttccccaacagcaccaacctgctgcccacagagatcagccagagcctgctgtaccggggccctgtggaccctgccaactggtttggagtgaggaagggcttccccaacctgggctacatccagaaccacctgcaggtgctgctgctgctggtgtttgaggccatcgtgtaccgccggcaggagcactaccgccggcagcaccagctggcccccctgcctgcccaggccgtgtttgccagcggcacccggcagcagctggaccaggacctgctgggctgcctgaagtacttcatcaacttcttcttctacaagtttggcctggagatctgcttcctgatggctgtgaatgtgattggccagaggatgaacttcctggtgaccctgcacggctgctggctggtggccatcctgacccggcggcaccggcaggccatcgcccggctgtggcccaactactgcctcttcctggccctcttcctgctgtaccagtacctgctgtgcctgggcatgcccccagccctgtgcatcgactacccctggcgctggagcagagctgtgcccatgaacagcgccctgatcaagtggctgtacctgcctgacttcttccgggcccccaacagcaccaacctgatcagtgacttcctgctgctgctgtgtgccagccagcagtggcaggtgttttctgctgagaggacagaggagtggcagaggatggccggcgtgaacacagaccggctggagcccctgcggggggagcccaaccctgtgcccaacttcatccactgccgcagctacctggacatgctgaaggtggccgtgttccgctacctgttctggctggtgctggtggtggtgtttgtgactggagccacccgcatcagcatcttcggcctgggctacctgctggcctgcttctacctgctgctgtttggaacagccctgctgcagagggacacccgggcccggctggtgctgtgggactgcctgatcctgtacaacgtgaccgtcatcatcagcaagaacatgctgagcctgctggcctgtgtgtttgtggagcagatgcagacaggcttctgctgggtgatccagctgttcagcctggtgtgcaccgtgaagggctactatgaccccaaggagatgatggaccgggaccaggactgcctgctgcctgtggaggaggccggcatcatctgggacagcgtgtgcttcttcttcctgctgctgcagaggagggtcttcctgagccactactacctgcacgtgcgggctgacctgcaggccacagccctgctggccagccggggctttgccctgtacaatgctgccaacctgaagagcattgacttccaccggcgcatcgaggagaagagcctggcccagctgaagaggcagatggagcgcatccgggccaagcaggagaagcaccggcagggccgggtggacaggagccggccccaggacaccctgggccccaaggaccccggcctggagcccggccctgacagccctgggggcagcagccccccccggcggcagtggtggaggccctggctggaccacgccaccgtcatccacagcggggactacttcctgtttgaaagtgacagcgaggaggaggaggaggccgtgcctgaggacccccggcccagcgcccagagcgccttccagctggcctaccaggcctgggtgaccaatgcccaggccgtgctgcggcggcggcagcaggagcaggagcaggcccggcaggagcaggccggccagctgcccactggaggcggccccagccaggaggtggagcctgctgagggccctgaggaggccgccgccggccgcagccacgtggtgcagagggtgctgagcacagcccagttcctgtggatgctgggccaggccctggtggatgagctgacccgctggctgcaggagttcaccaggcaccacggcaccatgtctgatgtgctgcgggcagagcgctacctgctgacccaggagctgctgcagggcggggaggtgcacagaggagtgctggaccagctgtacaccagccaggccgaggccaccctgcccggccccacagaggccccaaatgcccccagcacagtgagcagcggcctgggcgctgaggagcccctgagctccatgacagatgacatgggcagccccctgagcacaggctaccacaccaggagcggcagcgaggaggccgtgacagaccccggggagcgggaggccggggccagcctgtaccagggcctgatgaggacagccagcgagctgctgctggaccggcggctgcgcatccctgagctggaggaggccgagctgtttgctgagggccagggccgggccctgcggctgctgcgggctgtgtaccagtgtgtggccgcccacagcgagctgctgtgctacttcatcatcatcctgaaccacatggtgacagccagcgctggcagcctggtgctgcctgtgctggtgttcctgtgggccatgctgagcatcccccggcccagcaagcgcttctggatgacagccatcgtgttcacagaaattgctgtggtggtgaagtacctgttccagtttggcttcttcccctggaacagccacgtggtgctgcggcgctatgagaacaagccctacttccccccacgcatcctgggcctggagaagacagatggctacatcaagtatgacctggtgcagctgatggccctcttcttccacaggagccagctgctgtgctacggcctgtgggaccacgaggaggacagccccagcaaggagcatgacaagagcggggaggaggagcagggcgctgaggagggccctggggtgcctgctgccaccacagaggaccacatccaggtggaggcccgggtgggccccacagatggcaccccagagccccaggtggagctgcggccccgggacacccggcgcatcagcctgcgcttcagaagaaggaagaaggagggccctgccaggaaaggagctgctgccattgaagctgaggaccgggaggaggaggagggggaggaggagaaggaggcccccaccggccgggagaagaggcccagccgcagcggcggccgggtgcgggctgctggaagaaggctgcagggcttctgcctgagcctggcccagggcacctaccggcccctgcggcgcttcttccatgacatcctgcacaccaagtaccgggccgccacagatgtgtatgccctgatgttcctggctgatgtggtggacttcatcatcatcatcttcggcttctgggccttcggcaagcacagcgctgccacagacatcaccagcagcctgagtgatgaccaggtgcctgaggccttcctggtgatgctgctgatccagttcagcaccatggtggtggaccgggccctgtacctgaggaagacagtgctgggcaagctggccttccaggtggccctggtgctggccatccacctgtggatgttcttcatcctgcctgctgtgacagagaggatgttcaaccagaatgtggtggcccagctgtggtactttgtgaagtgcatctactttgccctgagcgcctaccagatccgctgtggctaccccacccgcatcctgggcaacttcctgaccaagaagtacaaccacctgaacctcttcctgttccagggcttccggctggtgcccttcctggtggagctgcgggctgtgatggactgggtgtggacagacaccaccctgagcctgagctcctggatgtgtgtggaggacatctatgccaacatcttcatcatcaagtgcagccgggagacagagaagaagtacccccagcccaagggccagaagaagaagaagatcgtgaagtatggcatgggcggcctcatcatcctcttcctgattgccatcatctggttccccctgctcttcatgagcctggtgcgctctgtggtgggcgtggtgaaccagcccattgatgtgacagtgaccctgaagctgggcggctatgagcccctcttcaccatgtctgcccagcagcccagcatcatccccttcaccgcccaggcctatgaggagctgagccggcagtttgacccccagcccctggccatgcagttcatcagccagtacagcccagaagatattgtgacagcccagatcgagggcagcagcggggccctgtggaggatcagcccccccagccgggcccagatgaagcgggagctgtacaacggcacagctgacatcaccctgcgcttcacctggaacttccagagggacctggccaagggcggcaccgtggagtatgccaatgagaagcacatgctggccctggcccccaacagcacagcccggcggcagctggccagcctgctggagggcaccagtgaccagagcgtggtgatccccaacctcttccccaagtacatccgggcccccaacggccctgaggccaaccctgtgaagcagctgcagcccaatgaggaggccgactacctgggcgtgcgcatccagctgcggcgggagcagggcgctggggccaccggcttcctggagtggtgggtgattgagctgcaggagtgcaggacagactgcaacctgctgcccatggtgatcttcagtgacaaggtgtccccacccagcctgggcttcctggccggctacggcatcatgggcctgtatgtgtccatcgtgctggtgattggcaagtttgtgcggggcttcttcagcgagatcagccacagcatcatgtttgaggagctgccctgtgtggaccgcatcctgaagctgtgccaggacatcttcctggtgcgggagacccgggagctggagctggaggaggagctgtatgccaagctgatcttcctgtaccgcagccctgagaccatgatcaagtggacccgggagaaggagtag

SEQ ID NO: 54832 - DNA, 7566 bp, Artificial Sequence
  derived and/or modified sequence
atggagccccacgtgctgggcgccgtgctgtactggctgctgctgccctgtgccctgctcgcagcatgcttgctgagattcagtggcttatccctggtttatctcctgttcctcctccttctcccttggttcccggggcccaccaggtgcggtcttcaggggcacaccggacgcctcttgcgcgcactgcttggccttagcctgctatttttggttgctcacctggcattgcagatttgcctacacattgtgcctcgcctggatcagttgctgggcccttcctgtagccgctgggagacgctaagtcggcacataggcgtgaccaggttggatctgaaggacatcccaaacgctatccggctcgtagcaccagatctaggtatactcgtggtgtcttccgtctgtctgggaatctgcggtaggctcgccaggaacacccgccagagtccacacccacgggaactggatgacgacgaacgggatgtggacgcaagcccaacggcgggcctccaggaagcagccaccctagctcccacaagacgctcccggctggcggcccgcttcagggtcacagcccattggctcttagtagctgccggacgcgtgttggccgtgaccctgctagcgctggcagggatagcacacccatccgcactgtccagtgtatatctgttactttttttggctctttgtacatggtgggcgtgtcatttcccaatctccactagaggcttctctagactttgtgtggccgtggggtgttttggagcagggcatctcatctgtctgtactgctaccaaatgccgcttgctcaggctctgctacccccggctggcatctgggctagggtgctcggtctgaaggacttcgtcgggccaacgaactgctcaagtccacatgctctcgtcctaaatacaggcctcgattggcccgtttatgcatcccccggagtgctgctgctgttgtgttacgccaccgcctccctgcgcaaactgcgtgcctacagaccatccgggcagagaaaggaagccgcaaaaggatatgaggcacgggagctcgagctagcagaactggatcaatggccacaggagagggagtccgatcagcacgtggtaccgaccgcaccagataccgaggcagataattgcatagtgcatgagctgaccggccaaagctctgtactccggcggcccgtcaggcccaaaagggccgagcctcgggaagcaagtcccctgcatagcctcggtcaccttatcatggaccagtcatatgtgtgcgcactgatcgcaatgatggtgtggtctatcacctaccactcttggctgacattcgtactgctcctttgggcatgtttaatctggacggtgagatcccgtcaccagttggccatgctgtgtagcccgtgcattctgctgtatggcatgaccctttgttgcctccgctacgtgtgggccatggacctccgccccgagcttcccacaacacttggtcccgtatcacttcgtcaactgggattggaacacacgcgttacccttgcctggacctaggtgccatgcttctgtacaccctgacattttggctactgctccgacagtttgtaaaagaaaaactgttaaaatgggccgaatcccccgctgcgttaacggaagtgacagtcgctgatactgaaccaacaagaacccagacacttctacagagcctgggcgagctcgtcaaaggcgtgtacgccaagtactggatctatgtctgtgcaggcatgtttattgttgtcagtttcgcaggacgacttgtggtgtataagattgtgtatatgttccttttcctcttgtgtcttactcttttccaggtctattactcactgtggagaaaacttcttaaagccttttggtggctcgttgtggcctacactatgctggtgctcatcgctgtttacacatttcagttccaggactttcccgcttattggaggaacttgacaggctttactgatgaacagttgggtgacttaggcctagagcagttttccgtgtcagaacttttttcctccattttagttccaggcttttttttgctggcgtgcattcttcagctgcactattttcataggccctttatgcagctgaccgatatggaacatgtatccttgcccggcacaaggctgccccggtgggcacacagacaagacgcagtcagtggtaccccactgcttcgggaagaacagcaggagcatcagcagcagcagcaggaagaggaggaggaggaagaggactccagggacgagggcctgggggtagctactccacaccaggctacccaggtgcctgagggagcagctaagtggggcctcgtggccgagaggttacttgagctcgcagctggcttttcagatgtgctcagccgagtgcaggtttttctaaggaggctgctggaactgcatgtgttcaaattagtcgcactctatacagtctgggtggccttaaaggaagtgtccgtgatgaatttactacttgtcgtcctgtgggcgttcgccctgccttacccaaggttcaggcccatggcttcttgcttatccactgtttggacttgtgtgatcattgtgtgtaaaatgctctaccagctgaaggtcgtgaatccacaggagtactcgtcaaattgcacagaaccattccctaattccacgaatttgctgcctacagagatatctcagtccttgctctaccggggacccgtcgacccagcaaactggttcggggttcgcaaagggtttcccaatctgggttatattcaaaaccacctgcaggttctcctgttattggtctttgaagcaatcgtgtacaggaggcaggagcactaccgcagacagcaccagctggccccccttccggcccaagccgttttcgcatcagggactcggcagcaactggaccaggacctgctggggtgcctcaagtatttcattaattttttcttctacaagttcggcctcgaaatctgttttttgatggctgtgaacgttatcgggcagcggatgaactttttggtgacattgcacgggtgttggctcgtcgctattctgactcgcaggcatagacaggcaattgcgcgactgtggcccaattattgtctgttcctagcactcttcttactttatcagtatctgctctgtcttggcatgccccccgccctatgcattgactacccttggagatggagccgagcagtgcctatgaactcagcactgatcaagtggctgtacttgcccgattttttcagggccccgaacagcaccaacctgatttcggattttctgctcctcctctgcgcctcccagcagtggcaggtgtttagtgctgaacgaacagaggagtggcagaggatggccggggtgaatactgatcgtttagagcccctcagaggcgagcccaaccccgtgcccaattttatacactgtcggtcttatctggacatgttaaaggtcgccgtctttcgctatcttttctggttagttctggtggttgtctttgtcaccggtgccaccagaattagtattttcggcctgggctatctcttggcctgtttttacttgctgctctttggtacggctctgctccagcgagatacgcgagctcgactggtactgtgggattgtcttatcctctataatgtgacggtgattatatccaagaatatgctaagtctgctggcctgtgtcttcgtggaacagatgcaaaccggcttttgttgggttatacagctctttagtctcgtctgcacggtgaaggggtattatgatcctaaagagatgatggaccgggaccaggactgcttgctgccagtcgaggaggctggtattatatgggacagtgtgtgttttttctttctccttcttcagcgtagagtcttcctgtcccactactacctacatgtccgcgccgatctgcaggccaccgccctactggcctctcgtgggttcgcgctgtataacgcggcaaatcttaaatccattgacttccataggcggattgaggaaaagagtctcgcacagttaaaacggcagatggaaaggattcgcgccaagcaggaaaagcatagacagggcagggtggatcgctcaagacctcaggacaccctggggcccaaggaccctggactcgaaccagggccagacagtcccggcgggtcatcccctccgcgcaggcagtggtggaggccctggctggaccacgcaacagtaattcattccggcgactacttcttgtttgaatctgattcagaggaggaggaggaggccgtgcctgaggaccctagacccagcgcccagagcgcattccagctcgcctaccaggcttgggtcactaatgcccaggctgtcttaaggagacggcagcaagagcaagaacaggccaggcaggaacaggccgggcagcttccgaccggcggaggaccaagccaagaggtggaacccgcggaggggcctgaggaggcagcagctggaaggagccacgtggtccaacgggtactgtccactgcccagttcctttggatgctgggccaggcactggtggacgaactgactagatggttgcaggaatttacaagacaccatggcacaatgtctgatgtcttaagagctgagaggtatttgttgacacaagagctgttgcagggaggggaagtacacaggggggtgctggatcagctgtacacatcccaggctgaggccacgctcccgggcccaacagaggctccaaatgctcccagcaccgtgtcctccggcctaggagcggaggaaccgctgtcttccatgacggacgacatgggatctcccctcagcactggctatcatacaagatctggcagtgaggaagcagtgacagaccctggggaacgcgaggctggcgcatcactgtaccaagggctaatgagaacagcatcagaattgctgctggacaggcggctaaggattcctgagctggaggaggcagaactctttgccgaagggcaggggcgcgcgctccgcctgctcagagctgtgtatcagtgcgttgcggcccactcagagctgctgtgttattttatcatcatcctgaatcacatggtgactgcttccgccggcagccttgtactcccggtgctggtgttcctgtgggctatgctctcaattccccggccgagcaaaagattttggatgacagcaattgtgtttactgagatcgcagtcgtcgtgaagtaccttttccagtttggatttttcccatggaatagccacgtggtcttgcggagatacgagaataaaccatacttcccgcctagaatcttggggttggagaagacggacggatatattaaatacgatctggtccagctaatggcgctgttcttccaccgctcccagctgctatgctatggtttatgggaccatgaggaggactctccgagtaaggagcacgataaaagcggtgaagaggagcagggcgctgaggaaggcccaggggtgccagcagcaactaccgaagatcatatccaagtggaggccagggtcggtcctaccgacgggacccctgagccacaggtcgagctccgacccagggacacaagacgtatttctttacgtttcagaagacggaagaaggagggcccggctagaaagggagctgcagctatcgaggcagaggaccgggaggaggaggagggtgaagaggagaaggaggcccctacaggccgcgaaaaaaggccatctcgcagcggaggaagagtgcgagccgctggccgtaggctgcagggcttttgcttgtccttggcccagggaacctaccggcccctcaggcgctttttccatgacatcctccataccaagtaccgcgcagccacggatgtttacgccctgatgtttttggcggacgttgttgatttcataatcattatattcggcttttgggccttcggcaaacacagcgctgccacggacattacgtcctctctgtcagatgatcaggtgcccgaagcctttttggtgatgctcctgatccagttttcaaccatggtcgttgacagagctctctatctcaggaaaacggtgctcggcaagctggcctttcaggtagcacttgtgttggctatacatctatggatgttctttatcctgccagcagtgaccgaacggatgttcaaccagaacgtggtcgcccaactgtggtattttgtgaaatgtatttactttgccctgagcgcctatcaaattagatgtggctaccctacacggattctgggcaacttcctgacgaaaaaatacaaccatcttaacctgttcctgttccagggctttcgcttggtgccgtttctcgtggaactgcgagcggtcatggactgggtttggacagacacaacactgtccctgagcagctggatgtgtgttgaggacatctatgccaatattttcataatcaagtgttccagagagaccgagaaaaaatatccacagcctaagggccaaaaaaaaaaaaaaattgttaaatacgggatgggtggcctgatcattctgttcttaatagcaattatttggttccctctgctcttcatgagtctcgtgagaagcgtcgtgggggtcgtaaatcagcctattgatgttactgtgacacttaaacttggaggctacgagccactattcactatgagcgcacagcagccctccatcatcccctttactgcccaggcatatgaggaactgagccgccagttcgaccctcaacccctggccatgcagtttatcagccagtacagcccagaggatatagtgaccgctcagatagaaggcagttcaggggctctttggcggatctcccccccctccagggcccagatgaaacgggagctgtacaacgggacggccgacattacactgcgcttcacatggaattttcagcgggacctggccaagggcgggactgtggaatatgctaacgaaaaacacatgctggctctggcccccaattctactgcccgacggcagctagcctctctgctggaaggtaccagtgaccagtctgttgtgataccaaacctgttccccaaatatatccgggcccctaatggtcccgaggccaatcccgttaagcagcttcagccgaatgaggaagcagattacttaggggtcaggatacagctacgccgcgagcagggcgctggggcaactggctttcttgagtggtgggtcattgagttacaagagtgtaggaccgattgtaacttacttccgatggtcatattttctgacaaagtgtctccgccatccctcggattcttagccgggtacggtatcatgggactgtacgtgtccattgttcttgtcatcggaaagtttgtccggggatttttttcagagatatctcatagcatcatgtttgaggaattgccttgtgttgacaggatcttgaagctatgtcaggatatcttcctggtgagggagacccgcgagctggagctggaagaggagctctacgcgaagcttattttcttgtatagatctccggaaaccatgatcaagtggacccgggagaaggagtag

SEQ ID NO: 54833 - DNA, 1122 bp, Artificial Sequence
  derived and/or modified sequence
atgaagatctgccccttcagcagcaagagcagcatcgtgctggccctcaagtttcgttcgctgatacacttcgagaagtacccccaacccaaagggcagaagaagaagaaaatcgtcaagtacggaatgggtggcctgattatcctgtttctgatagccattatctggttccccctgttgtttatgagcctcgtgcgaagtgtcgttggtgtcgtgaaccagccaattgacgtcacagtcacacttaaactgggaggctatgagccactttttaccatgagtgcccaacagccttcaatcatcccctttaccgcccaggcgtatgaagaactctccagacagttcgaccctcagccgctcgcgatgcagtttattagtcagtatagtccagaagatatcgtgaccgcacagattgagggatctagcggcgcactatggcggatctctccaccgagtcgggcacagatgaaaagagagctctacaatggaactgctgacatcacgctgcggtttacgtggaacttccagcgggatctggctaagggcggcaccgttgagtacgccaatgagaagcacatgctggcactggcaccaaacagcaccgccaggcgccagcttgcaagtttgttagagggtacatctgatcagtcggtggtgatccccaatctcttcccgaaatacatccgggcacctaacggccccgaggcaaaccctgttaaacagctacaaccaaacgaggaggcggattatttgggcgtccggattcaactgcggcgagagcagggtgcaggggccacgggcttcctcgagtggtgggttatagaacttcaagaatgccgcaccgactgcaacttactccctatggtgatcttctcggataagcatcatggcgcagtgcgcgtgcaccgggccgggcacaggcaggtgagagctcgcatcctccaacgtgacctcgcattacactacgtgcgaggggcagctgtaaggggcccccacccccaggccctccctggccaccttccaggggctggagattccggagcgggagccgggggcggcgtagtacgtcaggcccatctgcccctgcctctgaccggagatcatgatcaagtggattcctag

SEQ ID NO: 54834 - DNA, 7404 bp, Artificial Sequence
  derived and/or modified sequence
tgaaccggccggctgctgcgggccctgctgggcctgagcctgctgttcctggtggcccacctggcactgcaaatttgtctgcacattgtgccccgccttgaccaacttctgggcccttcatgctcccgatgggaaacactgtcaagacacatcggcgtgacacgacttgacctgaaggacattcccaacgccattaggctggtagctccagaccttggaatcttggtggtaagtagtgtctgccttgggatctgtggacggctggcaagaaatacgaggcagtccccccatcccagagaactggatgatgatgagcgagatgtcgacgcatctccaaccgcaggccttcaggaagccgcaactttggcccctactcgccgcagcaggttggcggccaggtttcgggtcactgcacattggctgctcgtggcggctggaagggttctggccgtcacactgcttgcactggcgggaatcgcacacccgagcgccctgtctagcgtgtatctgctcctttttcttgccctgtgcacttggtgggcttgccacttccccataagcaccaggggcttctcccgtctgtgtgttgctgttggctgctttggtgctggccaccttatatgcctttactgctaccagatgcctctggcgcaggctcttctccctcccgccggtatctgggcgagagttcttgggttgaaggacttcgtgggaccaactaattgcagttcaccgcatgcgctggtgctgaataccgggctcgattggcccgtctatgcctcgcccggcgtattactgctgttatgttacgctacggcctctttaagaaagcttcgcgcataccggccgtcagggcaacgaaaagaagctgccaaagggtatgaagcccgcgagcttgagctggccgagctggaccagtggcctcaggaacgtgaatcagatcagcatgtagtccccaccgcaccagatactgaagccgataactgtatagttcacgagttaacaggacaaagtagcgttctgcggcgtcctgtgcggccaaagagggccgagccccgggaggcatctcctctgcattctctcggacatctgataatggaccagagctacgtctgcgccttgatcgccatgatggtgtggagcattacctaccactcttggttaacgttcgtgcttctgttgtgggcatgcctcatttggacagtgagatcacgtcatcagctggcgatgctgtgttccccctgcattctgctgtatggcatgaccctgtgctgtctgcggtatgtctgggccatggacttacgacccgaactgccaacaacacttgggccagtttctcttaggcaacttggccttgagcatacacggtacccatgcttggatctcggtgcaatgctcctgtacaccctgacattttggctcctgttgcggcagtttgttaaggaaaaactgttaaaatgggccgagtcccctgccgcactgaccgaggtgacagtggcagacaccgagcccacccgcacacagactctacttcagtccctcggggaactggtgaagggagtttacgcaaaatattggatctatgtgtgcgccggaatgttcatagtcgtttcattcgccggccgcctggtcgtctacaaaattgtatatatgttcctcttccttctgtgtctgacactctttcaggtatattactctttatggcggaagctgttaaaagctttctggtggttagttgtggcttacactatgctcgtcctgatagcagtctacactttccagtttcaggacttccccgcttattggaggaatctcaccggtttcacagatgaacagttgggtgacctcggcctggaacagtttagcgtcagcgagctgttttcctccatcctggtgcctgggttcttccttctggcatgcatcctgcagttacactactttcataggccattcatgcaactcaccgatatggagcatgtttcactccccggaacgcggctcccccgctgggctcatcggcaggatgcagtcagcggtaccccattactgcgcgaggaacagcaggagcatcaacaacagcagcaggaggaagaagaggaagaggaagattcccgtgacgagggtcttggcgtagctacccctcatcaggcgacccaagtgcccgagggggctgccaagtggggtcttgtcgcggagaggctgctggaactggcagctggttttagcgatgtcctctccagggtccaagtattcctgcgccgactgctcgagctacatgtatttaagctagtcgctctgtacaccgtgtgggtcgctctgaaagaggtctctgtgatgaacctgcttttggtggtgctttgggccttcgcacttccctaccctcggtttaggccaatggcttcatgcctttctaccgtgtggacatgtgtgattatcgtctgcaaaatgctctaccagctgaaagtcgtgaacccacaggagtattcttcaaactgtactgagcccttcccaaattcaactaacctactacccaccgagatcagccagagcctgctgtacaggggtcccgtcgatcctgcaaactggtttggcgtaaggaaaggctttcccaacctggggtacatccagaaccatctgcaggtcctgttacttcttgtattcgaagcaatcgtgtaccggaggcaagagcattatcggaggcaacaccagctagcaccccttccagcccaggcagtgtttgccagcgggacgcggcagcagctggatcaagatctgctgggctgtctgaaatattttatcaacttcttcttttataagtttggactcgagatttgcttcctaatggctgtgaatgtgatcggacaacggatgaattttttagtcaccctgcacggatgctggttagtagctatcctaacgcgaagacacagacaagccatcgcaagattgtggccgaactactgcctgtttctggccctttttcttctgtatcagtacctcctctgcttaggcatgcctccggcgctttgtatagactacccgtggcgctggagtagggccgtaccaatgaactccgccctgataaagtggctgtatttgccagatttcttccgtgcacctaattcaacaaatcttattagcgattttcttctgttgctttgtgcctcgcagcagtggcaagtttttagtgcggagaggaccgaggaatggcagagaatggccggtgtcaataccgacagactggaaccactccgaggagagcccaatccagtgcctaacttcattcactgccggagttatttggatatgctgaaggttgctgtttttagataccttttctggctggtccttgtggtcgtctttgtaactggagcaacaaggatcagcatctttgggttaggttatctgctggcatgcttctacctgctgctgttcggcacagccctccttcaacgggacactagggccagactagtgttgtgggactgcctgattctgtacaacgttaccgtgattatctccaaaaatatgttgtccctgctggcttgtgtcttcgttgaacagatgcagaccggattctgttgggttatccaacttttttcactggtttgcaccgtcaaaggatactacgaccctaaagaaatgatggaccgcgatcaggactgccttctaccagtggaagaggctgggatcatttgggactccgtgtgcttctttttcctcctgttgcagaggcgggttttccttagccattactacctccacgtgagagccgatttacaggccactgccctcttggcctcaaggggtttcgctctttacaacgcagctaatttgaagtccattgatttccaccggcgaattgaggagaaatccctggcgcagctgaagcggcaaatggagaggattcgagcgaaacaggaaaaacaccggcaaggacgggtggacaggtctcgaccccaagataccctcgggcccaaggatcccggcctggaaccaggcccagactctcctgggggcagctcacccccgcggcgccagtggtggcgcccatggttagaccacgcaactgtgatccatagtggtgactactttttgtttgagtcagactccgaggaggaggaggaggccgttccagaggacccccgccccagtgctcagtcggctttccaactggcatatcaggcttgggttacaaatgcccaagcggtgctgcgccggaggcagcaggagcaggagcaagccaggcaggaacaagctggtcagctgcctactggcggcgggccttcccaggaagtagaacccgctgaaggacccgaggaggccgccgcaggccgatcccacgtcgtacagagggtgctctcaacagctcagttcttgtggatgctgggccaggccttggtagacgaactcaccaggtggcttcaggaattcacacgacaccacggaacaatgagtgatgtgctcagagccgaacggtacctgctgacccaggaactgttgcaaggtggtgaggtgcaccgaggggtgcttgatcaactttacaccagccaggccgaggcaaccctgcccggtccaacagaggctcctaatgccccatccactgttagttccgggctgggcgcagaagaaccactctcctcaatgacggatgatatgggcagccccctgagtaccggatatcacacacggtctggctccgaagaagcagttactgatcccggagagcgagaggccggtgcgtccctgtaccaggggttaatgaggaccgccagcgaattactcctcgaccgacgcctgagaatcccggaactcgaagaagcagaactgttcgccgagggacagggtagagcgctgcggctgctccgggccgtataccagtgtgtagccgcacactctgaactgttgtgctacttcatcattatactcaatcacatggtaacagcatccgctggtagcttagtgctgccagtgctggttttcctgtgggccatgctgtctatcccccggcccagcaagaggttctggatgacggccattgtcttcaccgaaatcgctgtcgtcgtcaagtatcttttccagtttgggttcttcccctggaattcccacgtggtgctgagacgctacgagaataaaccgtatttccctccgcggatacttggattggagaagaccgacgggtatataaagtatgatctcgtgcagctgatggccctgttcttccatagatcccaactgctgtgttacggactctgggatcatgaagaggactcaccctcaaaggaacatgacaaatcaggagaggaggaacaaggggcggaagagggcccaggggtacccgccgcaaccactgaagaccacatccaagtggaagccagagtcgggcctacagatgggacccctgaacctcaggtggaactgaggccccgggatacccgaagaattagcttgcgctttaggcgccgcaaaaaggagggcccagcaaggaagggtgccgctgccattgaggcagaagacagagaggaagaagagggcgaggaggagaaggaggccccaacagggcgggaaaagaggccctctagatctggcgggcgcgtacgggccgctggtcggaggctccagggcttctgcctgtcccttgctcagggaacttacagaccacttaggaggttttttcacgacatcctgcacacaaaatatagagcagcgacggacgtctacgctctcatgttcctggccgacgtcgtcgattttatcataatcatctttggtttttgggccttcggaaagcactcagcggcaaccgacataacaagctcgctgagcgatgaccaagtgcctgaggctttccttgttatgttgctcatacaattctctactatggtggtggacagagccctgtacctgagaaaaaccgttctgggaaagctagcattccaggtggcactggtccttgccattcacttgtggatgttctttatcctgcccgcggtgacagagcgcatgttcaaccagaacgtagtagctcagctatggtacttcgtaaagtgtatttattttgctttatctgcataccagattagatgtgggtatccaacaaggatcctcgggaatttcctcaccaagaaatacaatcacctaaacctgttcctgttccaggggtttcggctggtaccttttctggtggaactgcgggcagttatggactgggtatggactgacacgacactgtctctgagctcatggatgtgcgtggaggatatatacgcgaacatttttatcattaagtgttccagagagactgagaagaagtaccctcaaccaaagggccagaaaaagaagaagattgtcaaatatgggatggggggactgatcattctattcctcatcgccattatctggttcccactcttgtttatgtctctggtccgatcagttgtgggtgtcgtgaaccagccaatcgatgtgactgtgacactgaaactcggtggatatgagccccttttcacaatgtctgcgcagcagccttctattattccttttacagcgcaggcatacgaagagctcagtcggcagtttgacccccagcctctagccatgcaattcatcagtcagtattcaccagaggatatcgtcacagctcagatcgagggatcatccggcgccctctggagaatctctcccccttcccgcgcacagatgaaacgcgagctgtataacgggacagccgatatcaccctccgcttcacctggaatttccaacgggacctcgccaagggcggcaccgtggagtatgctaacgaaaagcatatgctcgctcttgcaccgaactcaaccgctcgccgacagttagcctccctgttggaggggaccagcgatcaaagcgtcgtgatccctaatctcttccctaaatatattagagcccccaacggccccgaagccaacccagtaaagcagctccagccaaatgaggaagccgattacttgggcgtacgcatccagctgcgccgagagcagggtgccggcgctaccggtttccttgagtggtgggtcatcgagttgcaggagtgccgaacggactgcaatctgctccctatggtcattttcagtgataaagtgtcgccaccttcactaggctttctggcgggatatggcatcatggggctatacgtcagtatcgtgctggtgatcggtaagttcgtccgagggtttttctcggagattagtcacagcataatgttcgaggaattgccctgcgtggaccggatcctgaagctgtgtcaggatattttcctcgttcgagaaactcgggagttagaattagaggaagagctctacgccaaactgatcttcctgtacaggagcccagagacaatgataaagtggacaagggagaaggaatag

SEQ ID NO: 54835 - DNA, 7833 bp, Artificial Sequence
  derived and/or modified sequence
atggagccgcacgtgctcggcgcggtcctgtactggctgctgctgccctgcgcgctgctggctgcctgcctgctccgcttcagcggactctcgctggtctacctgctcttcctgctgctgctgccctggttccccggccccacccgatgcggcctccaaggtcacacaggccgcctcctgcgggcattgctgggcctcagcctgctcttcctggtggcccatctcgccctccagatctgcctgcatattgtgccccgcctggaccagctcctgggacccagctgcagccgctgggagaccctctcgcgacacataggggtcacaaggctggacctgaaggacatccccaacgccatccggctggtggcccctgacctgggcatcttggtggtctcctctgtctgcctcggcatctgcgggcgccttgcaaggaacacccggcagagcccacatccacgggagctggatgatgatgagagggatgtggatgccagcccgacggcagggctgcaggaagcagcaacgctggcccctacacggaggtcacggctggccgctcgtttccgagtcacggcccactggctgctggtggcggctgggcgggtcctggccgtaacactgcttgcactggcaggcatcgcccacccctcggccctctccagtgtctacctgctgctcttcctggccctctgcacctggtgggcctgccactttcccatcagcactcggggcttcagcagactctgcgtcgcggtggggtgcttcggcgccggccatctcatctgcctctactgctaccagatgcccttggcacaggctctgctcccgcctgccggcatctgggctagggtgctgggtctcaaggacttcgtgggtcccaccaactgctccagcccccacgcgctggtcctcaacaccggcctggactggcctgtgtatgccagccccggcgtcctcctgctgctgtgctacgccacggcctctctgcgcaagctccgcgcgtaccgcccctccggccagaggaaggaggcggcaaaggggtatgaggctcgggagctggagctagcagagctggaccagtggccccaggaacgggagtctgaccagcacgtggtgcccacagcacccgacaccgaggctgataactgcatcgtgcacgagctgaccggccagagctccgtcctgcggcggcctgtgcggcccaagcgggctgagcccagggaggcgtctccgctccacagcctgggccacctcatcatggaccagagctatgtgtgcgcgctcattgccatgatggtatggagcatcacctaccacagctggctgaccttcgtactgctgctctgggcctgcctcatctggacggtgcgcagccgccaccaactggccatgctgtgctcgccctgcatcctgctgtatgggatgacgctgtgctgcctacgctacgtgtgggccatggacctgcgccctgagctgcccaccaccctgggccccgtcagcctgcgccagctggggctggagcacacccgctacccctgtctggaccttggtgccatgttgctctacaccctgaccttctggctcctgctgcgccagtttgtgaaagagaagctgctgaagtgggcagagtctccagctgcgctgacggaggtcaccgtggcagacacagagcccacgcggacgcagacgctgttgcagagcctgggggagctggtgaagggcgtgtacgccaagtactggatctatgtgtgtgctggcatgttcatcgtggtcagcttcgccggccgcctcgtggtctacaagattgtctacatgttcctcttcctgctctgcctcaccctcttccaggtctactacagcctgtggcggaagctgctcaaggccttctggtggctcgtggtggcctacaccatgctggtcctcatcgccgtctacaccttccagttccaggacttccctgcctactggcgcaacctcactggcttcaccgacgagcagctgggggacctgggcctggagcagttcagcgtgtccgagctcttctccagcatcctggtgcccggcttcttcctcctggcctgcatcctgcagctgcactacttccacaggcccttcatgcagctcaccgacatggagcacgtgtccctgcctggcacgcgcctcccgcgctgggctcacaggcaggatgcagtgagtgggaccccactgctgcgggaggagcagcaggagcatcagcagcagcagcaggaggaggaggaggaggaggaggactccagggacgaggggctgggcgtggccactccccaccaggccacgcaggtgcctgaaggggcagccaagtggggcctggtggctgagcggctgctggagctggcagccggcttctcggacgtcctctcacgcgtgcaggtgttcctgcggcggctgctggagcttcacgttttcaagctggtggccctgtacaccgtctgggtggccctgaaggaggtgtcggtgatgaacctgctgctggtggtgctgtgggccttcgccctgccctacccacgcttccggcccatggcctcctgcctgtccaccgtgtggacctgcgtcatcatcgtgtgtaagatgctgtaccagctcaaggttgtcaacccccaggagtattccagcaactgcaccgagcccttccccaacagcaccaacttgctgcccacggagatcagccagtccctgctgtaccgggggcccgtggaccctgccaactggtttggggtgcggaaagggttccccaacctgggctacatccagaaccacctgcaagtgctgctgctgctggtattcgaggccatcgtgtaccggcgccaggagcactaccgccggcagcaccagctggccccgctgcctgcccaggccgtgtttgccagcggcacccgccagcagctggaccaggatctgctcggctgcctcaagtacttcatcaacttcttcttctacaaattcgggctggagatctgcttcctgatggccgtgaacgtgatcgggcagcgcatgaactttctggtgaccctgcacggttgctggctggtggccatcctcacccgcaggcaccgccaggccattgcccgcctctggcccaactactgcctcttcctggcgctgttcctgctgtaccagtacctgctgtgcctggggatgcccccggccctgtgcattgattatccctggcgctggagccgggccgtccccatgaactccgcactcatcaagtggctgtacctgcctgatttcttccgggcccccaactccaccaacctcatcagcgactttctcctgctgctgtgcgcctcccagcagtggcaggtgttctcagctgagcgcacagaggagtggcagcgcatggctggcgtcaacaccgaccgcctggagccgctgcggggggagcccaaccccgtgcccaactttatccactgcaggtcctaccttgacatgctgaaggtggccgtcttccgatacctgttctggctggtgctggtggtggtgtttgtcacgggggccacccgcatcagcatcttcgggctgggctacctgctggcctgcttctacctgctgctcttcggcacggccctgctgcagagggacacacgggcccgcctcgtgctgtgggactgcctcattctgtacaacgtcaccgtcatcatctccaagaacatgctgtcgctcctggcctgcgtcttcgtggagcagatgcagaccggcttctgctgggtcatccagctcttcagccttgtatgcaccgtcaagggctactatgaccccaaggagatgatggacagagaccaggactgcctgctgcctgtggaggaggctggcatcatctgggacagcgtctgcttcttcttcctgctgctgcagcgccgcgtcttccttagccattactacctgcacgtcagggccgacctccaggccaccgccctgctagcctccaggggcttcgccctctacaacgctgccaacctcaagagcattgactttcaccgcaggatagaggagaagtccctggcccagctgaaaagacagatggagcgtatccgtgccaagcaggagaagcacaggcagggccgggtggaccgcagtcgcccccaggacaccctgggccccaaggaccccggcctggagccagggcccgacagtccagggggctcctccccgccacggaggcagtggtggcggccctggctggaccacgccacagtcatccactccggggactacttcctgtttgagtccgacagtgaggaagaggaggaggctgttcctgaagacccgaggccgtcggcacagagtgccttccagctggcgtaccaggcatgggtgaccaacgcccaggcggtgctgaggcggcggcagcaggagcaggagcaggcaaggcaggaacaggcaggacagctacccacaggaggtggtcccagccaggaggtggagccagcagagggccccgaggaggcagcggcaggccggagccatgtggtgcagagggtgctgagcacggcgcagttcctgtggatgctggggcaggcgctagtggatgagctgacacgctggctgcaggagttcacccggcaccacggcaccatgagcgacgtgctgcgggcagagcgctacctcctcacacaggagctcctgcagggcggcgaagtgcacaggggcgtgctggatcagctgtacacaagccaggccgaggccacgctgccaggccccaccgaggcccccaatgccccaagcaccgtgtccagtgggctgggcgcggaggagccactcagcagcatgacagacgacatgggcagccccctgagcaccggctaccacacgcgcagtggcagtgaggaggcagtcaccgaccccggggagcgtgaggctggtgcctctctgtaccagggactgatgcggacggccagcgagctgctcctggacaggcgcctgcgcatcccagagctggaggaggcagagctgtttgcggaggggcagggccgggcgctgcggctgctgcgggccgtgtaccagtgtgtggccgcccactcggagctgctctgctacttcatcatcatcctcaaccacatggtcacggcctccgccggctcgctggtgctgcccgtgctcgtcttcctgtgggccatgctgtcgatcccgaggcccagcaagcgcttctggatgacggccatcgtcttcaccgagatcgcggtggtcgtcaagtacctgttccagtttgggttcttcccctggaacagccacgtggtgctgcggcgctacgagaacaagccctacttcccgccccgcatcctgggcctggagaagactgacggctacatcaagtacgacctggtgcagctcatggcccttttcttccaccgctcccagctgctgtgctatggcctctgggaccatgaggaggactcaccatccaaggagcatgacaagagcggcgaggaggagcagggagccgaggaggggccaggggtgcctgcggccaccaccgaagaccacattcaggtggaagccagggtcggacccacggacgggaccccagaaccccaagtggagctcaggccccgtgatacgaggcgcatcagtctacgttttagaagaaggaagaaggagggcccagcacggaaaggagcggcagccatcgaagctgaggacagggaggaagaagagggggaggaagagaaagaggcccccacggggagagagaagaggccaagccgctctggaggaagagtaagggcggccgggcggcggctgcagggcttctgcctgtccctggcccagggcacatatcggccgctacggcgcttcttccacgacatcctgcacaccaagtaccgcgcagccaccgacgtctatgccctcatgttcctggctgatgttgtcgacttcatcatcatcatttttggcttctgggcctttgggaagcactcggcggccacagacatcacgtcctccctatcagacgaccaggtacccgaggctttcctggtcatgctgctgatccagttcagtaccatggtggttgaccgcgccctctacctgcgcaagaccgtgctgggcaagctggccttccaggtggcgctggtgctggccatccacctatggatgttcttcatcctgcccgccgtcactgagaggatgttcaaccagaatgtggtggcccagctctggtacttcgtgaagtgcatctacttcgccctgtccgcctaccagatccgctgcggctaccccacccgcatcctcggcaacttcctcaccaagaagtacaatcatctcaacctcttcctcttccaggggttccggctggtgccgttcctggtggagctgcgggcagtgatggactgggtgtggacggacaccacgctgtccctgtccagctggatgtgtgtggaggacatctatgccaacatcttcatcatcaaatgcagccgagagacagagaagaaatacccgcagcccaaagggcagaagaagaagaagatcgtcaagtacggcatgggtggcctcatcatcctcttcctcatcgccatcatctggttcccactgctcttcatgtcgctggtgcgctccgtggttggggttgtcaaccagcccatcgatgtcaccgtcaccctgaagctgggcggctatgagccgctgttcaccatgagcgcccagcagccgtccatcatccccttcacggcccaggcctatgaggagctgtcccggcagtttgacccccagccgctggccatgcagttcatcagccagtacagccctgaggacatcgtcacggcgcagattgagggcagctccggggcgctgtggcgcatcagtccccccagccgtgcccagatgaagcgggagctctacaacggcacggccgacatcaccctgcgcttcacctggaacttccagagggacctggcgaagggaggcactgtggagtatgccaacgagaagcacatgctggccctggcccccaacagcactgcacggcggcagctggccagcctgctcgagggcacctcggaccagtctgtggtcatccctaatctcttccccaagtacatccgtgcccccaacgggcccgaagccaaccctgtgaagcagctgcagcccaatgaggaggccgactacctcggcgtgcgtatccagctgcggagggagcagggtgcgggggccaccggcttcctcgaatggtgggtcatcgagctgcaggagtgccggaccgactgcaacctgctgcccatggtcattttcagtgacaaggtcagcccaccgagcctcggcttcctggctggctacggcatcatggggctgtacgtgtccatcgtgctggtcatcggcaagttcgtgcgcggattcttcagcgagatctcgcactccattatgttcgaggagctgccgtgcgtggaccgcatcctcaagctctgccaggacatcttcctggtgcgggagactcgggagctggagctggaggaggagttgtacgccaagctcatcttcctctaccgctcaccggagaccatgatcaagtggactcgtgagaaggagtaggagctgctgctggcgcccgagagggaaggagccggcctgctgggcagcgtggccacaaggggcggcactcctcaggccgggggagccactgccccgtccaaggccgccagctgtgatgcatcctcccggcctgcctgagccctgatgctgctgtcagagaaggacactgcgtccccacggcctgcgtggcgctgccgtcccccacgtgtactgtagagttttttttttaattaaaaaatgttttatttatacaaatggacaatcaga

SEQ ID NO: 54836 - DNA, 1631 bp, Artificial Sequence
  derived and/or modified sequence
taccagatccgctgcggctaccccacccgcatcctcggcaacttcctcaccaagaagtacaatcatctcaacctcttcctcttccaggggttccggctggtgccgttcctggtggagctgcgggcagtgatggactgggtgtggacggacaccacgctgtccctgtccagctggatgtgtgtggaggacatctatgccaacatcttcatcatcaaatgcagccgagagacagagaaggttcatgaagatttgcccgttttcttctaaaagttctatagttttagctctgaagtttcgctctttgatccactttgagaaatacccgcagcccaaagggcagaagaagaagaagatcgtcaagtacggcatgggtggcctcatcatcctcttcctcatcgccatcatctggttcccactgctcttcatgtcgctggtgcgctccgtggttggggttgtcaaccagcccatcgatgtcaccgtcaccctgaagctgggcggctatgagccgctgttcaccatgagcgcccagcagccgtccatcatccccttcacggcccaggcctatgaggagctgtcccggcagtttgacccccagccgctggccatgcagttcatcagccagtacagccctgaggacatcgtcacggcgcagattgagggcagctccggggcgctgtggcgcatcagtccccccagccgtgcccagatgaagcgggagctctacaacggcacggccgacatcaccctgcgcttcacctggaacttccagagggacctggcgaagggaggcactgtggagtatgccaacgagaagcacatgctggccctggcccccaacagcactgcacggcggcagctggccagcctgctcgagggcacctcggaccagtctgtggtcatccctaatctcttccccaagtacatccgtgcccccaacgggcccgaagccaaccctgtgaagcagctgcagcccaatgaggaggccgactacctcggcgtgcgtatccagctgcggagggagcagggtgcgggggccaccggcttcctcgaatggtgggtcatcgagctgcaggagtgccggaccgactgcaacctgctgcccatggtcattttcagtgacaagcatcatggggctgtacgtgtccatcgtgctggtcatcggcaagttcgtgcgcggattcttcagcgagatctcgcactccattatgttcgaggagctgccgtgcgtggaccgcatcctcaagctctgccaggacatcttcctggtgcgggagactcgggagctggagctggaggaggagttgtacgccaagctcatcttcctctaccgctcaccggagaccatgatcaagtggactcgtgagaaggagtaggagctgctgctggcgcccgagagggaaggagccggcctgctgggcagcgtggccacaaggggcggcactcctcaggccgggggagccactgccccgtccaaggccgccagctgtgatgcatcctcccggcctgcctgagccctgatgctgctgtcagagaaggacactgcgtccccacggcctgcgtggcgctgccgtcccccacgtgtactgtagagttttttttttaattaaaaaatgttttatttatacaaatgg

SEQ ID NO: 54837 - DNA, 7661 bp, Artificial Sequence
  derived and/or modified sequence
cacaggccgcctcctgcgggcattgctgggcctcagcctgctcttcctggtggcccatctcgccctccagatctgcctgcatattgtgccccgcctggaccagctcctgggacccagctgcagccgctgggagaccctctcgcgacacataggggtcacaaggctggacctgaaggacatccccaacgccatccggctggtggcccctgacctgggcatcttggtggtctcctctgtctgcctcggcatctgcgggcgccttgcaaggaacacccggcagagcccacatccacgggagctggatgatgatgagagggatgtggatgccagcccgacggcagggctgcaggaagcagcaacgctggcccctacacggaggtcacggctggccgctcgtttccgagtcacggcccactggctgctggtggcggctgggcgggtcctggccgtaacactgcttgcactggcaggcatcgcccacccctcggccctctccagtgtctacctgctgctcttcctggccctctgcacctggtgggcctgccactttcccatcagcactcggggcttcagcagactctgcgtcgcggtggggtgcttcggcgccggccatctcatctgcctctactgctaccagatgcccttggcacaggctctgctcccgcctgccggcatctgggctagggtgctgggtctcaaggacttcgtgggtcccaccaactgctccagcccccacgcgctggtcctcaacaccggcctggactggcctgtgtatgccagccccggcgtcctcctgctgctgtgctacgccacggcctctctgcgcaagctccgcgcgtaccgcccctccggccagaggaaggaggcggcaaaggggtatgaggctcgggagctggagctagcagagctggaccagtggccccaggaacgggagtctgaccagcacgtggtgcccacagcacccgacaccgaggctgataactgcatcgtgcacgagctgaccggccagagctccgtcctgcggcggcctgtgcggcccaagcgggctgagcccagggaggcgtctccgctccacagcctgggccacctcatcatggaccagagctatgtgtgcgcgctcattgccatgatggtatggagcatcacctaccacagctggctgaccttcgtactgctgctctgggcctgcctcatctggacggtgcgcagccgccaccaactggccatgctgtgctcgccctgcatcctgctgtatgggatgacgctgtgctgcctacgctacgtgtgggccatggacctgcgccctgagctgcccaccaccctgggccccgtcagcctgcgccagctggggctggagcacacccgctacccctgtctggaccttggtgccatgttgctctacaccctgaccttctggctcctgctgcgccagtttgtgaaagagaagctgctgaagtgggcagagtctccagctgcgctgacggaggtcaccgtggcagacacagagcccacgcggacgcagacgctgttgcagagcctgggggagctggtgaagggcgtgtacgccaagtactggatctatgtgtgtgctggcatgttcatcgtggtcagcttcgccggccgcctcgtggtctacaagattgtctacatgttcctcttcctgctctgcctcaccctcttccaggtctactacagcctgtggcggaagctgctcaaggccttctggtggctcgtggtggcctacaccatgctggtcctcatcgccgtctacaccttccagttccaggacttccctgcctactggcgcaacctcactggcttcaccgacgagcagctgggggacctgggcctggagcagttcagcgtgtccgagctcttctccagcatcctggtgcccggcttcttcctcctggcctgcatcctgcagctgcactacttccacaggcccttcatgcagctcaccgacatggagcacgtgtccctgcctggcacgcgcctcccgcgctgggctcacaggcaggatgcagtgagtgggaccccactgctgcgggaggagcagcaggagcatcagcagcagcagcaggaggaggaggaggaggaggaggactccagggacgaggggctgggcgtggccactccccaccaggccacgcaggtgcctgaaggggcagccaagtggggcctggtggctgagcggctgctggagctggcagccggcttctcggacgtcctctcacgcgtgcaggtgttcctgcggcggctgctggagcttcacgttttcaagctggtggccctgtacaccgtctgggtggccctgaaggaggtgtcggtgatgaacctgctgctggtggtgctgtgggccttcgccctgccctacccacgcttccggcccatggcctcctgcctgtccaccgtgtggacctgcgtcatcatcgtgtgtaagatgctgtaccagctcaaggttgtcaacccccaggagtattccagcaactgcaccgagcccttccccaacagcaccaacttgctgcccacggagatcagccagtccctgctgtaccgggggcccgtggaccctgccaactggtttggggtgcggaaagggttccccaacctgggctacatccagaaccacctgcaagtgctgctgctgctggtattcgaggccatcgtgtaccggcgccaggagcactaccgccggcagcaccagctggccccgctgcctgcccaggccgtgtttgccagcggcacccgccagcagctggaccaggatctgctcggctgcctcaagtacttcatcaacttcttcttctacaaattcgggctggagatctgcttcctgatggccgtgaacgtgatcgggcagcgcatgaactttctggtgaccctgcacggttgctggctggtggccatcctcacccgcaggcaccgccaggccattgcccgcctctggcccaactactgcctcttcctggcgctgttcctgctgtaccagtacctgctgtgcctggggatgcccccggccctgtgcattgattatccctggcgctggagccgggccgtccccatgaactccgcactcatcaagtggctgtacctgcctgatttcttccgggcccccaactccaccaacctcatcagcgactttctcctgctgctgtgcgcctcccagcagtggcaggtgttctcagctgagcgcacagaggagtggcagcgcatggctggcgtcaacaccgaccgcctggagccgctgcggggggagcccaaccccgtgcccaactttatccactgcaggtcctaccttgacatgctgaaggtggccgtcttccgatacctgttctggctggtgctggtggtggtgtttgtcacgggggccacccgcatcagcatcttcgggctgggctacctgctggcctgcttctacctgctgctcttcggcacggccctgctgcagagggacacacgggcccgcctcgtgctgtgggactgcctcattctgtacaacgtcaccgtcatcatctccaagaacatgctgtcgctcctggcctgcgtcttcgtggagcagatgcagaccggcttctgctgggtcatccagctcttcagccttgtatgcaccgtcaagggctactatgaccccaaggagatgatggacagagaccaggactgcctgctgcctgtggaggaggctggcatcatctgggacagcgtctgcttcttcttcctgctgctgcagcgccgcgtcttccttagccattactacctgcacgtcagggccgacctccaggccaccgccctgctagcctccaggggcttcgccctctacaacgctgccaacctcaagagcattgactttcaccgcaggatagaggagaagtccctggcccagctgaaaagacagatggagcgtatccgtgccaagcaggagaagcacaggcagggccgggtggaccgcagtcgcccccaggacaccctgggccccaaggaccccggcctggagccagggcccgacagtccagggggctcctccccgccacggaggcagtggtggcggccctggctggaccacgccacagtcatccactccggggactacttcctgtttgagtccgacagtgaggaagaggaggaggctgttcctgaagacccgaggccgtcggcacagagtgccttccagctggcgtaccaggcatgggtgaccaacgcccaggcggtgctgaggcggcggcagcaggagcaggagcaggcaaggcaggaacaggcaggacagctacccacaggaggtggtcccagccaggaggtggagccagcagagggccccgaggaggcagcggcaggccggagccatgtggtgcagagggtgctgagcacggcgcagttcctgtggatgctggggcaggcgctagtggatgagctgacacgctggctgcaggagttcacccggcaccacggcaccatgagcgacgtgctgcgggcagagcgctacctcctcacacaggagctcctgcagggcggcgaagtgcacaggggcgtgctggatcagctgtacacaagccaggccgaggccacgctgccaggccccaccgaggcccccaatgccccaagcaccgtgtccagtgggctgggcgcggaggagccactcagcagcatgacagacgacatgggcagccccctgagcaccggctaccacacgcgcagtggcagtgaggaggcagtcaccgaccccggggagcgtgaggctggtgcctctctgtaccagggactgatgcggacggccagcgagctgctcctggacaggcgcctgcgcatcccagagctggaggaggcagagctgtttgcggaggggcagggccgggcgctgcggctgctgcgggccgtgtaccagtgtgtggccgcccactcggagctgctctgctacttcatcatcatcctcaaccacatggtcacggcctccgccggctcgctggtgctgcccgtgctcgtcttcctgtgggccatgctgtcgatcccgaggcccagcaagcgcttctggatgacggccatcgtcttcaccgagatcgcggtggtcgtcaagtacctgttccagtttgggttcttcccctggaacagccacgtggtgctgcggcgctacgagaacaagccctacttcccgccccgcatcctgggcctggagaagactgacggctacatcaagtacgacctggtgcagctcatggcccttttcttccaccgctcccagctgctgtgctatggcctctgggaccatgaggaggactcaccatccaaggagcatgacaagagcggcgaggaggagcagggagccgaggaggggccaggggtgcctgcggccaccaccgaagaccacattcaggtggaagccagggtcggacccacggacgggaccccagaaccccaagtggagctcaggccccgtgatacgaggcgcatcagtctacgttttagaagaaggaagaaggagggcccagcacggaaaggagcggcagccatcgaagctgaggacagggaggaagaagagggggaggaagagaaagaggcccccacggggagagagaagaggccaagccgctctggaggaagagtaagggcggccgggcggcggctgcagggcttctgcctgtccctggcccagggcacatatcggccgctacggcgcttcttccacgacatcctgcacaccaagtaccgcgcagccaccgacgtctatgccctcatgttcctggctgatgttgtcgacttcatcatcatcatttttggcttctgggcctttgggaagcactcggcggccacagacatcacgtcctccctatcagacgaccaggtacccgaggctttcctggtcatgctgctgatccagttcagtaccatggtggttgaccgcgccctctacctgcgcaagaccgtgctgggcaagctggccttccaggtggcgctggtgctggccatccacctatggatgttcttcatcctgcccgccgtcactgagaggatgttcaaccagaatgtggtggcccagctctggtacttcgtgaagtgcatctacttcgccctgtccgcctaccagatccgctgcggctaccccacccgcatcctcggcaacttcctcaccaagaagtacaatcatctcaacctcttcctcttccaggggttccggctggtgccgttcctggtggagctgcgggcagtgatggactgggtgtggacggacaccacgctgtccctgtccagctggatgtgtgtggaggacatctatgccaacatcttcatcatcaaatgcagccgagagacagagaagaaatacccgcagcccaaagggcagaagaagaagaagatcgtcaagtacggcatgggtggcctcatcatcctcttcctcatcgccatcatctggttcccactgctcttcatgtcgctggtgcgctccgtggttggggttgtcaaccagcccatcgatgtcaccgtcaccctgaagctgggcggctatgagccgctgttcaccatgagcgcccagcagccgtccatcatccccttcacggcccaggcctatgaggagctgtcccggcagtttgacccccagccgctggccatgcagttcatcagccagtacagccctgaggacatcgtcacggcgcagattgagggcagctccggggcgctgtggcgcatcagtccccccagccgtgcccagatgaagcgggagctctacaacggcacggccgacatcaccctgcgcttcacctggaacttccagagggacctggcgaagggaggcactgtggagtatgccaacgagaagcacatgctggccctggcccccaacagcactgcacggcggcagctggccagcctgctcgagggcacctcggaccagtctgtggtcatccctaatctcttccccaagtacatccgtgcccccaacgggcccgaagccaaccctgtgaagcagctgcagcccaatgaggaggccgactacctcggcgtgcgtatccagctgcggagggagcagggtgcgggggccaccggcttcctcgaatggtgggtcatcgagctgcaggagtgccggaccgactgcaacctgctgcccatggtcattttcagtgacaaggtcagcccaccgagcctcggcttcctggctggctacggcatcatggggctgtacgtgtccatcgtgctggtcatcggcaagttcgtgcgcggattcttcagcgagatctcgcactccattatgttcgaggagctgccgtgcgtggaccgcatcctcaagctctgccaggacatcttcctggtgcgggagactcgggagctggagctggaggaggagttgtacgccaagctcatcttcctctaccgctcaccggagaccatgatcaagtggactcgtgagaaggagtaggagctgctgctggcgcccgagagggaaggagccggcctgctgggcagcgtggccacaaggggcggcactcctcaggccgggggagccactgccccgtccaaggccgccagctgtgatgcatcctcccggcctgcctgagccctgatgctgctgtcagagaaggacactgcgtccccacggcctgcgtggcgctgccgtcccccacgtgtactgtagagttttttttttaattaaaaaatgttttatttatacaaatgga

SEQ ID NO: 54838 - DNA, 7565 bp, Artificial Sequence
  derived and/or modified sequence
atggagccccacgttctcggagcagttctgtactggctgctcctgccctgtgcccttcttgccgcatgtctgttgaggttctctggccttagtctggtgtatttgttgtttctcctgctgctgccctggttcccaggacccactaggtgtgggctgcagggccatactgggaggctgctgcgcgctctacttggcctgtcactactttttctggtggcccacttggctctccaaatctgtctgcacatcgtgcctcgactggaccagcttctgggaccatcatgcagcagatgggaaacgttatcccgccatataggtgtcactcggctcgatctaaaggacatcccgaacgcaatccggctggtggcgccagatctgggtattttggttgtgtcttctgtctgtcttggaatctgcggaaggctggcccgtaatacgcgtcaatccccacaccccagagagctggatgatgacgagagagatgtggatgcaagtcctaccgccggactccaagaagctgcaactctagcccctactaggcggtcaagactcgcggctcgatttagggtgacggcccactggcttctcgtcgctgccggtagggtgcttgccgttacactgctggctctcgccggaatcgcccatccttcggcactgagcagcgtgtacctcctgcttttcctggccctgtgcacgtggtgggcctgccatttccccattagtacccggggtttctccagactgtgcgtcgctgtggggtgcttcggcgcaggacacctaatatgcctgtactgttatcagatgccactggcacaggctctgctgcctcccgcaggaatctgggccagagtgttagggctgaaagactttgtaggcccaactaattgctcctctccccatgcactagttttaaataccggcctggactggcccgtgtacgcctcccccggagtcctgttgctgctgtgctacgccaccgcctcattgcgaaagctgcgggcttacagaccttcagggcaaagaaaagaagccgctaaaggatacgaggccagggaactggaactggccgagctggaccagtggcctcaggagcgcgagtccgaccagcatgtggtacctaccgctcccgatacggaggccgataattgcatagtgcacgagctgacaggccagtcttcggtacttcgacgacctgtgcggccaaaacgcgcagagccacgcgaggcttctcccctgcactcactgggccaccttattatggatcaaagctacgtttgcgcactgatcgccatgatggtgtggagtattacataccattcttggctgaccttcgtgttgttattgtgggcctgccttatctggacagtgcgatctagacaccagcttgcgatgctgtgctcgccttgtatcttgctttatggcatgaccctgtgctgtctgaggtatgtgtgggctatggatcttcgccctgaactccctacgaccctgggtccagtgtccctaaggcagctggggctagaacacacccggtatccttgcttggatctcggtgccatgctcttgtatactctgactttctggctcctcctccgtcaattcgtcaaggaaaagctgcttaaatgggccgaatccccagctgcgctgaccgaggtgaccgtcgctgacacagagcctactcgcacacagactctccttcaaagtttgggcgagctcgttaagggggtgtacgccaaatactggatttatgtgtgtgcagggatgtttattgtggtctcattcgccggacgattggtggtgtacaagatcgtttacatgtttctctttttgctttgcctgaccctttttcaggtgtactacagcttgtggagaaaactccttaaagccttttggtggctagtggttgcgtacactatgctcgtactaatcgccgtgtatactttccagttccaggattttcctgcttactggagaaacctcaccggctttactgatgaacagcttggcgacctaggattggaacagtttagtgtgtcggaactctttagttccatcctcgtacccggatttttcctgctcgcctgcatcctacagctgcattacttccaccggcctttcatgcagctcacagacatggagcacgtatccctcccaggtactagactgccaagatgggcccaccggcaagacgccgtcagcggcacccccctcctaagagaagaacagcaggagcatcagcagcagcaacaagaagaggaagaagaggaggaagacagcagagatgaagggcttggagtggccactccccatcaggctacccaggttccggagggggcagctaaatggggactagtggccgagcgtctcctggagctcgccgcaggtttttctgacgtgctgagtagagtgcaggtctttctgcgcagactgttggaactccacgtattcaagctggttgccctgtacaccgtttgggtcgccttgaaagaggtatccgtgatgaatctactcctggtcgtgctatgggcttttgccctgccttaccctagattccgccctatggcctcttgtcttagcactgtgtggacctgtgtcataatcgtctgcaaaatgctgtatcagctgaaagttgttaacccccaggagtactctagcaattgtacggagcccttcccaaactccacaaatttattgccgaccgagatatcccagtctctcctctataggggaccggtggaccccgcaaattggttcggtgtgcgtaaggggttcccaaacctgggatacatacagaaccatctgcaggtattactcctgctggtgttcgaagcaattgtttatcggagacaagagcattatcggcgacaacaccagctggctccattgcccgcacaggccgtgttcgctagcggaacccgccagcaacttgaccaggacttgctgggatgcttgaagtacttcatcaacttcttcttttacaagttcggtttagagatctgctttctgatggctgtcaatgtaatcggacagcggatgaactttctggtaacattgcatggatgttggctggtggccatcttaacccgcaggcacagacaggccatagctagattgtggcctaattactgtctgtttctggctctgttcctgctgtatcagtatttattatgtcttggaatgccacccgctttatgtatcgactacccatggcggtggtcccgtgcagttcctatgaattccgcactcataaaatggttgtacctccccgacttcttccgcgctcctaatagcaccaacctgattagcgacttcttgcttctgttgtgtgcctctcagcagtggcaagtgttctcggccgaacggacagaagaatggcagaggatggccggtgttaacaccgataggctcgaacctctgagaggggaacctaaccccgtccctaattttattcactgccgctcctatctggacatgttaaaagtggccgtgttcagatacctattttggctggtgctggtggtggtattcgtaacgggcgctacgcggatctctattttcggcttggggtatctcctggcctgcttctacctgttgcttttcgggaccgccttgttacaacgtgatacgagagctcggctcgtgctatgggattgtttaattctatacaatgtgacagtcatcatttcaaagaacatgctaagcctgttggcatgcgtgttcgtggaacaaatgcagacaggtttctgctgggtgatacaactgttctccctcgtatgcacagtgaaggggtactatgaccccaaagaaatgatggatagggatcaagactgcctgctcccagtggaggaggcaggcattatatgggactcagtgtgcttcttctttctgctgctgcaaaggcgagtctttttgtctcattactacctgcacgtgcgggctgacttgcaagccacagcattgttggcatcccggggttttgcactgtacaacgctgctaacttaaagtctatcgatttccaccggagaatagaggaaaaatctctcgctcagctgaagcgccagatggagcggatcagggctaagcaggagaagcatcgccagggcagggttgacagaagtagaccccaggatactcttggaccaaaagaccctgggcttgagccagggcctgactcacccggaggcagttctcccccaagaaggcaatggtggcgcccttggttggatcacgccacagtgattcacagtggcgattactttctgtttgagtctgactctgaagaagaggaggaagcagtcccagaggacccacgcccatcggcccaatctgcctttcagctggcttatcaggcttgggttaccaacgcccaggctgttctccgtcgtcgtcagcaggagcaggaacaagccaggcaggagcaggccggacagctccccactggcggaggaccatcccaggaagtggagcctgccgagggcccagaagaagccgctgccggacgctctcatgtggtgcaaagagtactgtccacagctcagttcctgtggatgctgggacaggctctagttgatgagctcacacgatggctccaagagttcacgcggcatcacggcactatgtctgatgtgctaagggctgagcgttatcttctaacacaagaacttctgcaagggggtgaagttcatagaggagtgctggatcagttatatacctctcaggcggaagcgaccctcccgggtcccacagaagctcccaacgccccatccactgtatctagcgggctcggagccgaggagccactaagtagtatgactgacgatatgggtagtcctctttcaacaggttatcacaccagaagcgggagcgaggaggccgtgaccgaccctggggagcgcgaggccggtgctagtttgtaccagggccttatgagaaccgcatcggaacttttgttggaccggaggcttaggatcccagagctcgaggaggccgagctgttcgcagaaggccagggtagggcactccgcctgctccgcgcagtgtaccagtgcgtcgccgctcactccgagcttctctgctatttcatcattatattgaatcatatggtgacagcttcagccggtagcctcgtgctgcctgtgcttgttttcctctgggctatgctgtccattccccgtccctccaaacgtttctggatgaccgcgatcgtgttcaccgaaattgcagtggtggttaagtacctgttccagttcgggtttttcccatggaattcccatgtggtgcttagacggtatgagaataagccctattttcctccaaggattctcgggctcgaaaagacagacggttacattaagtatgatctggtgcaactgatggcactcttttttcacagaagccaactcctgtgttacggcctctgggatcacgaggaggatagtccttctaaagaacacgacaaaagcggcgaagaggaacaaggggcagaggaaggtcctggcgttccagcggctacaaccgaggaccatattcaggtggaagcaagggtcggcccaactgatggaacccccgagccccaggtcgagctgaggcccagggacacccgcagaattagcctgaggttccgccgtcgcaaaaaggagggaccggcaaggaagggggctgcagcaatagaggcggaggatcgggaggaggaggagggcgaggaagaaaaagaggccccaactgggagagagaaaagaccaagccgctccgggggacgggtccgggctgcaggcagaaggctgcagggattttgtctttcactagcccaggggacatatagacccctgcggaggttttttcacgacattttacacactaagtatcgcgcagcgactgatgtgtatgccctgatgtttctggcagacgttgtggatttcataattatcatcttcggcttctgggcctttggaaagcactctgcagccacagacataacatcctccctgagcgatgatcaggtccctgaggccttcttagtgatgttgctcatacagttttcaaccatggtggtggatcgggcactttaccttagaaagactgtgcttggaaaactcgcattccaggtggccctggtgctggcaatccacttatggatgtttttcattttaccggctgtgacagagcgtatgtttaatcagaatgtcgtggcgcaactatggtacttcgtcaagtgcatctactttgcactgtctgcctatcaaatccgatgcggctaccctacaagaattttgggaaacttcctcacaaaaaagtataatcacctgaacctgttcttgtttcagggctttagactagtcccctttctggtcgagctccgagccgtcatggattgggtgtggacagacacaacgctgtctttgtcctcctggatgtgtgttgaggatatctatgccaacatttttataatcaaatgcagccgcgaaactgaaaaaaagtaccctcagcccaaagggcaaaaaaagaaaaaaatagtgaaatacggcatggggggtctcattatcctgtttctgatagccatcatctggtttccactcctcttcatgtctctcgtcaggtcagtcgtgggagtcgtgaaccagcctattgatgtgaccgtgaccctcaaactgggcggatatgaaccactgtttacgatgagtgcccaacagccatctataattcccttcacagctcaggcgtacgaggagctgtcccgacagtttgacccccagcccctcgcgatgcaatttattagccagtactctccagaggacatcgttactgctcagattgaggggagcagcggtgctctttggaggatttctccaccttctcgcgcacaaatgaagcgtgagctgtacaatggaaccgcagacatcacactgagatttacatggaacttccagcgcgacctggccaagggtggaaccgttgagtacgctaatgagaaacatatgttggctctagcacctaacagcaccgcaaggcgtcaactggcgtccctgcttgaaggtaccagtgatcagtccgtggtgatccctaatctgttcccaaaatatatccgtgcacccaatgggccagaagccaatcccgtaaagcagttgcagccaaatgaagaggcagactatctcggggtgcggatccaattgcgaagagagcagggggcaggagcaaccgggttcctagagtggtgggtcatcgagctccaggaatgcaggacagactgtaatcttctgcccatggttattttttcagacaaagtgtcaccgccaagtcttggcttcttagccggttacggtataatgggactgtatgtgagtatagtgttggtgattggtaaattcgtgaggggctttttctcagagataagccattccatcatgtttgaggaactcccatgcgttgatcggattctaaagctgtgccaggacattttccttgtccgggagaccagagagctcgagctggaagaagaactctatgccaaactcattttcctgtatagatcgcccgaaaccatgatcaagtggactagagagaaagagta

SEQ ID NO: 54839 - DNA, 1122 bp, Artificial Sequence
  derived and/or modified sequence
atgaagatttgccccttttcaagcaagagcagcattgtcctggcactgaagtttcgatctttgattcattttgagaagtacccccagccaaaggggcagaagaaaaagaaaatcgtgaagtatggcatgggagggctgatcattctgtttctcatcgctataatttggtttcccctgctgttcatgtctcttgtcaggtccgtcgtgggcgtggtgaatcagcccatcgacgtgaccgtgacattgaagctgggaggatacgaaccgttatttacaatgtctgcacaacagccttctataattccttttacagcacaagcttacgaagagttatcaagacagtttgatccgcaacctctggccatgcaattcatatcacagtactcgcctgaagatatcgtaaccgctcagatcgagggcagtagtggcgctctttggcggattagtccgccatccagagcccagatgaagagggaactctataatggtacagctgatatcactctgcgctttacgtggaattttcagcgcgacttagctaagggcggaactgtcgagtacgccaatgagaaacatatgctcgcactggcacccaactccaccgctaggcgacagctggcttcgctgttagaaggcacaagcgatcagagcgtggtaataccaaacttgttccctaaatacatcagagctccgaatgggcctgaggctaaccctgtgaagcaactccagccaaacgaggaggcagattacctgggcgtgaggatccagctgagaagagaacagggagccggagctaccgggtttctggaatggtgggtgatcgagttgcaggaatgcagaactgattgtaacctgctgcctatggttattttttccgataaacaccacggagccgtgagagtgcacagagctgggcaccgccaggtgagagcacgcattctgcagcgagaccttgcactgcactatgtacgcggagctgctgtacgcggacctcatccacaggccctgccaggacacctgcccggagctggtgattccggagcaggcgctgggggtggagtagtgaggcaggcccacctccctttgccgctgacaggcgaccacgatcaggttgatagctag

SEQ ID NO: 54840 - DNA, 7403 bp, Artificial Sequence
  derived and/or modified sequence
tagacaggcaggttgctacgagcactgctcgggctctcactgctgttccttgtggctcacctagctctgcagatctgccttcacatagttccaagactggaccagttgctgggaccatcttgcagccggtgggagaccttatcccggcacatcggagtgactcggctggatctcaaggacatccctaacgctatccgattggtcgctcctgatctaggtatccttgtggtttccagcgtgtgcctggggatttgtggtcgactagcaaggaacacccggcagagcccccatccacgcgagttagacgacgacgagcgtgacgtcgatgcaagtcctaccgccggactgcaggaggcagctacactagcgccaacgcgcaggtcgcggctggcggcaaggttcagagtgacagcccattggctcctggtcgctgctggtcgcgtgttggctgtcacgctcctggccttggcaggcatcgcacaccctagtgccctgtcctctgtctacctgcttctgtttctcgctttgtgtacctggtgggcctgccactttcctatctccacaaggggcttctcgcggctgtgcgtggctgtgggttgctttggagccggacatctgatctgcctctactgttaccagatgcctctggcccaggctttgctccccccagcaggtatttgggcgagggtgctgggcctgaaagattttgtagggccaacaaattgcagctcaccccatgcactggttttaaacactggtctggactggcccgtgtatgcctcacccggtgtgttattgctgctgtgctatgctaccgcatctttgcgaaagcttagggcctaccgaccgtccggccagcggaaagaagccgctaaaggctatgaggcccgagagcttgagctggctgagctggaccagtggcctcaggaaagagagtctgaccaacatgtggtccctaccgcccctgacacagaggcagacaactgtattgtgcacgagctcacaggacaaagttcagttctccggagacctgtccggcctaagagagcagagccacgagaagcctcccctctgcactctctcggccatcttatcatggaccaatcgtacgtctgtgccctgatagcaatgatggtgtggagtatcacttaccactcgtggctcacttttgtgctcctgctctgggcctgcttaatctggacggtgaggtcaagacatcagcttgctatgctgtgtagcccatgcatcttattatacggcatgaccctgtgttgcctgcgttacgtttgggcgatggatctgcgacccgagctgccgacaactttaggccctgtctccctacgccagctgggtctggaacatactcgatatccgtgccttgatttgggcgcaatgttgctctatacactgaccttctggcttttacttcgccagtttgtgaaggagaagctgctcaaatgggctgaatcacccgctgccttgaccgaggttaccgtcgcagatacggagccaaccagaacacagacgctgcttcagagcctgggtgagctggttaagggagtttatgctaagtattggatatatgtatgtgcaggcatgttcattgtggtgtccttcgccggaagactagtcgtgtacaagatcgtttatatgtttctgtttctgttgtgcctgactcttttccaggtgtattactctctgtggcgtaaactactgaaggctttctggtggctagtcgttgcttacacaatgcttgtcctcattgctgtgtacacattccaatttcaggattttcctgcctattggcggaatcttactggattcactgacgaacagctgggagatttagggcttgagcagtttagtgtcagcgaattgttttcttcaatcttggtgccaggctttttccttctggcttgcatacttcagttacactactttcacagacccttcatgcagctgactgacatggagcatgtgtcactgcctggaacaagactgcctcgctgggcccaccgtcaggatgccgtgtcagggacacctttactaagagaagaacagcaggagcatcagcagcagcagcaggaagaagaggaggaagaagaggatagccgggacgagggcctgggggttgctaccccacaccaggcaactcaggttcccgagggcgctgccaagtggggacttgttgctgaaaggctcctagagcttgccgctggattttccgacgtgttgagccgggtccaggtctttctgcgccgactgctggagcttcatgtgtttaaactcgttgccttgtataccgtgtgggtggccctgaaggaagtgtcagtgatgaacctcctgcttgttgttctgtgggccttcgccttgccttatccgcgtttcagacctatggcatcgtgtttgtccacagtttggacttgtgtcataattgtttgcaagatgttgtaccagctgaaggttgtcaatccccaggagtattcctcgaactgcactgagcctttcccaaactccactaacctgcttccgactgagatttctcaatctctgttgtaccggggacccgtggacccggctaattggtttggggtgcggaagggttttcctaatctgggatatattcagaaccaccttcaggttctccttctccttgtgttcgaggctattgtataccgccgtcaggagcactaccgacgccaacatcaactggctcctctgccggcacaagccgtattcgctagcggtaccagacagcaattagatcaggacctgctgggatgtttgaaatacttcatcaactttttcttctacaagttcggtctggaaatctgtttcctcatggcagtgaatgtcattggacagcggatgaattttctggtgacactgcacggatgctggctagtggccatcctcacccgacgccaccggcaggcgattgcacgactctggcccaattactgtctgttcctggcactctttcttttataccagtatttgttgtgtctgggaatgccgccagcattgtgtatcgattatccctggaggtggagcagagccgttccaatgaattctgctctgataaagtggctctatctccccgattttttccgcgctcccaacagtactaatctgatttctgatttccttctgctgctttgcgcttcccagcaatggcaagtgttctctgctgaacggacagaggaatggcaacgcatggccggagttaacaccgatcggctggagccactgcgcggagagcccaacccagtgcctaacttcatccactgccggagctatctggacatgctgaaagtcgcagtgtttaggtatctcttctggttagtgctggttgttgttttcgtcactggtgcgactagaatcagcattttcggcttaggctacctgctggcctgtttctacctcctgctgtttggcacagccctgctccagcgggatacccgcgctcgactggtcctgtgggactgtcttatcctgtataatgtaaccgtcattatcagcaagaatatgttgtcactgctcgcttgtgttttcgtggagcagatgcagaccggattttgctgggtcatccaactcttcagcctcgtatgcacagtgaaagggtactatgaccctaaagaaatgatggatcgcgaccaggactgcctgctgcctgtggaggaggcgggaatcatttgggacagcgtctgctttttcttcctccttttacagcgtcgggtgtttctcagccattattacttgcacgtgagagccgatctacaggccacagctctactggcgagcagaggcttcgccttgtacaatgccgctaaccttaagtctattgacttccaccggcgaatcgaagagaaaagcctagcccaattgaagaggcagatggagagaataagagctaagcaggagaagcacaggcagggaagagtcgaccggtcccggccacaggacacactgggaccgaaagaccccggactcgagcccggaccagactccccgggtgggagcagcccacctaggcgtcagtggtggcgaccctggttagaccacgcaactgtgatacactcgggtgattatttcctgttcgaaagtgattccgaggaggaagaggaggcggtgccagaggaccccagaccatccgcccagtctgccttccagctcgcttaccaggcctgggtcactaatgcgcaggctgtccttagaaggcgacagcaggaacaggagcaggccagacaagaacaagctgggcaattaccgacaggaggagggccttcacaagaggtggagccagcagagggtcccgaagaagccgcagccggacgatcccacgttgtccaacgtgtgctaagtacagcccaattcctttggatgctgggtcaggctctggtggacgagctcactcgatggctgcaggaatttacgcggcaccacggcactatgtcagacgtgctgcgggcagaaaggtacctcctaacccaggagttgctgcagggaggagaggtccacaggggagtgcttgatcaactgtacacctcacaggctgaggctacactcccaggcccaactgaggcccctaatgccccaagtacagtgagttcagggctaggggctgaggaacccctgagtagcatgacggacgatatgggcagtcctctctctacaggctaccataccaggtctggtagtgaagaagcggtcacggacccaggggagcgggaggccggagccagcctgtaccaaggcttgatgcggactgctagcgagttactacttgatcgcagactgaggatacctgagctagaagaagctgaattgttcgctgaaggccaggggagggccttacgcctgttgagagcagtttaccagtgtgtggctgcacattccgagctcctgtgctattttatcataatacttaatcatatggtgacggcctccgctgggtcccttgtactgccagttcttgtgttcctttgggcaatgctgtctataccaaggcccagtaagcgattttggatgacggctatcgtgttcacagagattgcagtagtggttaaatatctttttcagttcggatttttcccctggaacagtcatgtggtcctgagacgctatgaaaacaaaccatatttccctcccaggatcttagggttggaaaagacagacgggtacatcaaatatgacctggttcaattaatggccctcttcttccaccgttcgcaactgctgtgttacggtctctgggaccatgaagaggacagcccatccaaggagcatgataagtctggggaagaggaacagggtgccgaggaggggccaggggtccctgccgcaaccaccgaggaccatattcaagttgaggcgagagtcggtcccaccgacgggactcctgaacctcaagtggaactcaggcccagagacactcgacgtatcagtttaaggtttagaaggcggaagaaggagggcccagcccgaaaaggcgcagccgcaatcgaagccgaggaccgcgaggaggaggaaggagaagaagaaaaagaggcaccaacaggaagggaaaagcggccaagtcgatctggcggtagggtaagggccgctggccgaagacttcagggcttttgcctgtcgcttgcacaaggtacatacaggccgctccgtcgctttttccacgacatccttcatacgaagtatagagccgcaactgacgtgtacgccctgatgttcctcgccgacgtcgtcgacttcattataatcatctttgggttctgggcttttgggaaacacagtgccgcaacggatattacatcctctcttagcgatgatcaggtccccgaggccttcctggttatgttgctcatccaattttctacaatggtcgtggaccgcgcattgtatctcaggaaaactgtcttgggcaagctggcctttcaggtcgccctggtcttagcaatacacctgtggatgtttttcatcctgccagccgttaccgaacgcatgttcaatcagaatgtcgtggctcagctgtggtactttgtaaagtgcatctactttgcattaagtgcctatcaaatacgttgcgggtatcccacacggatcctgggtaatttcctaactaagaaatacaaccacctgaacttgttcctgttccaggggtttcgactggtcccgttcctcgtagaacttagagccgttatggattgggtgtggacggacaccacactaagccttagttcctggatgtgcgtggaagatatctacgccaacatctttatcattaaatgctcccgagagactgagaagaaatatccccagcccaagggccagaaaaagaagaaaatcgtgaaatacgggatggggggtttgatcattctctttctaatcgccatcatttggttccccctgttattcatgtctttagtgcgttccgtggtgggagttgtgaatcaaccaattgacgtcacagtgaccctgaagctcgggggttatgaaccactgttcaccatgtccgcacagcagccctctattatccccttcaccgctcaggcttatgaagagctcagtcggcagtttgatccacagcctctggcaatgcaattcatatcccagtatagtcccgaggatatcgtgactgcccagatcgagggaagtagtggcgcactctggaggatttccccacccagcagagctcagatgaagcgtgagttgtacaacggcactgctgacattaccttgaggtttacatggaacttccagcgggacttggccaaaggaggcacggtggagtacgccaatgaaaagcacatgttggccctggccccaaattcgacagcccgtcggcagcttgcctctctgttggaggggactagtgatcaaagcgtagtgattcctaacttgttccctaagtacatacgagctcccaacggcccagaagctaaccccgttaaacaacttcagcctaatgaagaggcagattatctaggtgtgcggatccaactccggagggaacagggggcaggggcaaccgggttcctggaatggtgggtaatcgagttacaggaatgccgcaccgattgcaaccttctgccaatggtgatcttttcggataaggtatctcctccaagtctggggtttttagctggttacggcatcatggggctgtatgttagtattgtgctggtgatagggaagttcgtacgcggttttttttccgaaatttcccattctataatgttcgaagaactgccttgcgtcgatagaattttgaaactgtgtcaggacatttttctggtgcgagaaacccgcgagctcgagctggaagaggaattgtatgctaaattgatattcctgtatagatcaccggagaccatgattaaatggactagggaaaaggagta

SEQ ID NO: 54841 - protein, 410 aa, Artificial Sequence
  derived and/or modified sequence
MVVQNSADAGDMRAGVQLEPFLHQVGGHMSVMKYDEHTVCKPLVSREQRFYESLPLAMKRFTPQYKGTVTVHLWKDSTGHLSLVANPVKESQEPFKVSTESAAVAIWQTLQQTTGSNGSDCTLAQWPHAQLARSPKESPAKALLRSEPHLNTPAFSLVEDTNGNQVERKSFNPWGLQCHQAHLTRLCSEYPENKRHRFLLLENVVSQYTHPCVLDLKMGTRQHGDDASEEKKARHMRKCAQSTSACLGVRICGMQVYQTDKKYFLCKDKYYGRKLSVEGFRQALYQFLHNGSHLRRELLEPILHQLRALLSVIRSQSSYRFYSSSLLVIYDGQEPPERAPGSPHPHEAPQAAHGSSPGGLTKVDIRMIDFAHTTYKGYWNEHTTYDGPDPGYIFGLENLIRILQDIQEGE

SEQ ID NO: 54842 - DNA, 1233 bp, Artificial Sequence
  derived and/or modified sequence
atggttgtgcaaaattcagcggacgctggggacatgagagccggagtccagcttgagccctttctccaccaagttggaggccacatgagtgtcatgaagtacgacgaacatacagtttgcaaaccattggtatcgagagagcagcggttctacgaatcccttccccttgccatgaagcggtttaccccgcaatacaagggcacagtcaccgtgcatctatggaaagactctactgggcatctctctctggtggccaatcccgtaaaggagtctcaggaacctttcaaggtgagcaccgaatccgccgcggtggccatatggcagacgctgcagcaaactaccggttctaatggttccgactgtacactcgctcaatggccacatgcgcaactcgccagaagcccaaaggagtccccagccaaggctctgttgcgctctgaacctcaccttaatacccctgctttctctctggtggaggacactaatggtaaccaggtggagcgaaagtcctttaacccatgggggcttcagtgccatcaggcccatctcactagactgtgctccgagtaccctgagaacaagcggcatcgcttccttcttctggaaaacgtagtgtctcagtatactcatccgtgtgtgctcgacctaaagatgggcacgcgtcagcatggcgacgatgcgtcagaggagaagaaggcacgtcatatgcgaaaatgtgcccagagcacaagcgcgtgtctgggggtccggatatgcggaatgcaggtgtaccagaccgacaaaaaatactttttgtgtaaagacaaatactacgggaggaaactgagcgtcgagggtttccgccaagcactgtatcagttcctccataatggcagccatctccgtagggagctgcttgaacccattctccatcagttaagggccctgctatctgtgatcagatcccagtcaagctacagattctattcatcatccctgctggtgatctacgacgggcaggaaccccccgagcgcgcaccaggctccccccatcctcatgaggccccgcaggccgctcacggctcctcccccgggggcctcactaaggtggacattagaatgattgacttcgcgcacactacatataagggctactggaatgaacacaccacttacgacggccctgaccccgggtatatcttcggactagaaaatctcatccgaatcttgcaagacatccaggagggagagtag

SEQ ID NO: 54843 - DNA, 1233 bp, Artificial Sequence
  derived and/or modified sequence
atggtggttcagaatagcgccgatgctggcgatatgagggcaggtgttcagcttgaaccatttctccaccaggttgggggacatatgagtgttatgaagtatgacgagcataccgtgtgcaagccactcgtatctcgcgaacagagattctatgagagtctgccattggccatgaaacgtttcacaccgcagtacaaaggtaccgtgactgtccatctgtggaaggattcaacaggccacttgtccctggtagcaaatccagttaaggagagtcaggagcctttcaaagtcagcactgaatctgctgctgtggccatctggcagaccctacagcaaaccactggctctaacgggagcgactgtacactggcccagtggcctcacgcacagcttgccaggtccccaaaggagagccctgccaaggccctattaagatcagagcctcaccttaacactccagccttcagtctcgttgaagacactaacggaaaccaggttgagcggaagagcttcaacccttggggcttacagtgtcaccaggctcatcttacgcgtctctgttcggaatatcctgagaacaaacgacacagattcttgctgcttgaaaatgtcgtgagccagtatactcatccgtgcgttcttgacttgaaaatgggaaccaggcagcacggtgatgatgctagcgaggaaaaaaaggctaggcacatgcggaagtgcgctcagagcacctctgcttgtctcggagtacggatctgtggtatgcaggtttatcaaacagataagaagtacttcttgtgcaaggacaagtactatggccggaagctgtctgtcgaaggcttcagacaggcactttatcaattcctccataatggctcacacctgcggcgagaattgctagagcctatcctccaccagcttcgggcattactgtctgtgattcgcagccagagctcctatagattctattcatcttcactgctggtaatctacgatggccaggagccacctgagagggccccagggagcccacatcctcacgaggccccacaggccgctcacgggtcctctcccgggggcctaaccaaagtggacattcgaatgattgattttgcccataccacatacaaaggatattggaatgagcacacgacgtacgacggccctgatcccgggtatatcttcggactggagaatttgattaggattcttcaagacatacaggagggtgagtag

SEQ ID NO: 54844 - DNA, 2610 bp, Artificial Sequence
  derived and/or modified sequence
agacctcccgcaccagggctctggtgaacagcaaatgctccacgctgggacgggccattgcctgatgcctgtacatggtgggcactgagagacaagattcctgggccctgccttccatacactccccacgatctcggaggaagctctgaggaccccgctgagaacccacagacaggaggacaactgcgctatgacagcaataaaggccaagaaggagaaagttgaggaccgctgacagccccgtgtgctgttgggagctgccctttctacttcaaaccttcctctagcagactgtgcagggaccccccaccaccaccatctgccgccatggttgtgcaaaacagcgcagacgccggggacatgagggcaggcgtgcagctggagcccttcctgcaccaggtcggggggcacatgagcgtgatgaagtatgacgagcatacggtgtgcaagcccctcgtctcccgggagcagaggttctatgaatccctgccgctggccatgaagcggttcaccccacagtacaaaggtaccgtcacagtgcacctctggaaagacagcacaggccatctcagcttggttgccaacccagtgaaggagagccaggagcccttcaaggtctccacagagtcggcggcggtggccatatggcagacgctccagcagaccaccggcagcaatggcagcgactgcacccttgcccagtggccgcatgcccagctggcacgctcacccaaggagagcccggccaaggctcttctgaggtccgagccccacctcaacactccagccttctcgctggtggaagacaccaacggaaaccaggttgagaggaagagcttcaacccgtggggcctgcaatgccaccaggcccacctgacccgcctgtgctccgagtacccagagaacaagcggcatcggttcttgttgctggaaaatgtagtgtcacagtacacgcatccctgtgtcctggatctgaagatggggacccggcagcacggcgatgatgcatcggaggagaagaaggcccgccacatgaggaagtgtgcgcagagcacctcagcctgcctgggtgtgcgcatctgcggcatgcaggtttatcaaacagataagaagtactttctctgcaaagacaagtactatggaagaaaactctcagtggaggggttcagacaagccctctatcagttcctacataatggaagccacctccggagggagctcctggagcccatcctgcaccagctccgggccctcctctctgtcattaggagccagagttcataccgcttctattccagctctctccttgtcatctatgatgggcaggaaccaccagaaagagccccaggcagcccgcatcctcacgaggctccccaggcagcccacggtagctctcccggtggtctcaccaaggttgacatccgcatgattgactttgctcataccacatacaagggctactggaatgagcacaccacctacgatggaccagaccctggctatatttttggcctggaaaacctcatcaggatcctgcaggatatccaagagggagaatgaaacttcctgggcttatctggattcttctgggctatagatctcaaatagagacctgttggttgctagggtagtccagacaccccttagatgtcttcataatagtcctatctaccttcaaaaaccatctctatatatggcagactatattaacagctgctgaacaaatcagctctggaggtgattccacatcccctggcattatgctctaatgctgctcatcggagaacagacagccaggataaagtggcaccttctggagtacactggagggggcagcccaagttagaggccagcattgctgacattctggaatatttgcatctaaaaatgtttactcgttgccatgctgcagtccgcacaagctgtgaggcagaaaacttgacttgaagcagccttgaagagtgagttcatgagctcatggtttttctccttgtatggactgctcgctccaagggcaggcagagctcatgaatgcctcttatcttcctaagcggagttttaggtgacacaggatgaagcagaagagatctacccatctcatctgctctgcacccagcttctaagtggacaaagccaagcccaggcatgagctctggcaaagcaagaccccagattctccatttttgcctgtggaaaggagggtccctttacaggcttttttttcctttttttcccccaaaatctcttaaaatgaggaatctcttagcagactttggagttccccattctgccacattctgaccatgagacgcggcttgcagtgggggtgaacgcacataaaaagggaccactgacgtcctgctctactctctgctttctatttatttattttgggggtgggttggggagtcagaagaacctggaggacggaggaaaccaggggcaatgtttacaagactggtggacaagtgtaaatatggaataagaacaaacagttctaattaattccttcttctgcagtatggaaacctattacgatgcccttgagtcaagcactgagatacgttacccaattagggaaataaatttgttaataaaattgctgaggtc

SEQ ID NO: 54845 - DNA, 2822 bp, Artificial Sequence
  derived and/or modified sequence
tgccagtccccaccagcccttccccagagggtcaggtgacccttccctccccaggccacggcagcccggccctcccgggcagacctcccgcaccagggctctggtgaacagcaaatgctccacgctgggacgggccattgcctgatgcctgtacatggtgggcactgagagacaagattcctgggccctgccttccatacactccccacgatctcggaggaagctctggctggctacctggtagacaatcgctgccaatccgtccaagtccaggggcaagggagtttccactgctgtgccacaggctgcactgaaggcccaggggtcttccctgctcacactgcgctctctgaggagaggaccccgctgagaacccacagacaggaggacaactgcgctatgacagcaataaaggccaagaaggagaaagttgaggaccgctgacagccccgtgtgctgttgggagctgccctttctacttcaaaccttcctctagcagactgtgcagggaccccccaccaccaccatctgccgccatggttgtgcaaaacagcgcagacgccggggacatgagggcaggcgtgcagctggagcccttcctgcaccaggtcggggggcacatgagcgtgatgaagtatgacgagcatacggtgtgcaagcccctcgtctcccgggagcagaggttctatgaatccctgccgctggccatgaagcggttcaccccacagtacaaaggtaccgtcacagtgcacctctggaaagacagcacaggccatctcagcttggttgccaacccagtgaaggagagccaggagcccttcaaggtctccacagagtcggcggcggtggccatatggcagacgctccagcagaccaccggcagcaatggcagcgactgcacccttgcccagtggccgcatgcccagctggcacgctcacccaaggagagcccggccaaggctcttctgaggtccgagccccacctcaacactccagccttctcgctggtggaagacaccaacggaaaccaggttgagaggaagagcttcaacccgtggggcctgcaatgccaccaggcccacctgacccgcctgtgctccgagtacccagagaacaagcggcatcggttcttgttgctggaaaatgtagtgtcacagtacacgcatccctgtgtcctggatctgaagatggggacccggcagcacggcgatgatgcatcggaggagaagaaggcccgccacatgaggaagtgtgcgcagagcacctcagcctgcctgggtgtgcgcatctgcggcatgcaggtttatcaaacagataagaagtactttctctgcaaagacaagtactatggaagaaaactctcagtggaggggttcagacaagccctctatcagttcctacataatggaagccacctccggagggagctcctggagcccatcctgcaccagctccgggccctcctctctgtcattaggagccagagttcataccgcttctattccagctctctccttgtcatctatgatgggcaggaaccaccagaaagagccccaggcagcccgcatcctcacgaggctccccaggcagcccacggtagctctcccggtggtctcaccaaggttgacatccgcatgattgactttgctcataccacatacaagggctactggaatgagcacaccacctacgatggaccagaccctggctatatttttggcctggaaaacctcatcaggatcctgcaggatatccaagagggagaatgaaacttcctgggcttatctggattcttctgggctatagatctcaaatagagacctgttggttgctagggtagtccagacaccccttagatgtcttcataatagtcctatctaccttcaaaaaccatctctatatatggcagactatattaacagctgctgaacaaatcagctctggaggtgattccacatcccctggcattatgctctaatgctgctcatcggagaacagacagccaggataaagtggcaccttctggagtacactggagggggcagcccaagttagaggccagcattgctgacattctggaatatttgcatctaaaaatgtttactcgttgccatgctgcagtccgcacaagctgtgaggcagaaaacttgacttgaagcagccttgaagagtgagttcatgagctcatggtttttctccttgtatggactgctcgctccaagggcaggcagagctcatgaatgcctcttatcttcctaagcggagttttaggtgacacaggatgaagcagaagagatctacccatctcatctgctctgcacccagcttctaagtggacaaagccaagcccaggcatgagctctggcaaagcaagaccccagattctccatttttgcctgtggaaaggagggtccctttacaggcttttttttcctttttttcccccaaaatctcttaaaatgaggaatctcttagcagactttggagttccccattctgccacattctgaccatgagacgcggcttgcagtgggggtgaacgcacataaaaagggaccactgacgtcctgctctactctctgctttctatttatttattttgggggtgggttggggagtcagaagaacctggaggacggaggaaaccaggggcaatgtttacaagactggtggacaagtgtaaatatggaataagaacaaacagttctaattaattccttcttctgcagtatggaaacctattacgatgcccttgagtcaagcactgagatacgttacccaattagggaaataaatttgttaataaaattgctgaggtcacc

SEQ ID NO: 54846 - DNA, 1233 bp, Artificial Sequence
  derived and/or modified sequence
atggtggtgcagaacagcgcagatgctggggacatgagagctggggtgcagctggagcccttcctgcaccaggtgggcggccacatgtctgtgatgaagtatgatgagcacacagtgtgcaagcccctggtgtcccgggagcagcgcttctatgagagcctgcccctggccatgaagcgcttcaccccccagtacaagggcaccgtgacagtgcacctgtggaaggacagcacaggccacctgagcctggtggccaaccctgtgaaggagagccaggagcccttcaaggtgtccacagaatctgctgctgtggccatctggcagaccctgcagcagaccaccggcagcaatggaagtgactgcaccctggcccagtggccccacgcccagctggcccggagccccaaggagagccctgccaaggccctgctgcggtctgagccccacctgaacaccccagccttcagcctggtggaggacaccaacggcaaccaggtggagaggaagagcttcaacccctggggcctgcagtgccaccaggcccacctgacccggctgtgcagcgagtacccagagaacaagaggcaccgcttcctgctgctggagaatgtggtgtcccagtacacccacccctgtgtgctggacctgaagatgggcacccggcagcacggagatgatgccagcgaggagaagaaggcccggcacatgaggaaatgtgcccagagcaccagcgcctgcctgggcgtgcgcatctgtggcatgcaggtgtaccagacagacaagaagtacttcctgtgcaaggacaagtactacggcaggaagctgtctgtggagggcttccggcaggccctgtaccagttcctgcacaacggcagccacctgcggcgggagctgctggagcccatcctgcaccagctgcgggccctgctgagcgtcatccgcagccagagcagctaccgcttctacagcagcagcctgctggtgatctatgatggccaggagcccccagagcgggcccctggcagcccccacccccatgaggccccccaggccgcccacggcagcagccctgggggcctgaccaaggtggacatccgcatgattgactttgcccacaccacctacaagggctactggaatgagcacaccacctatgatggccctgaccccggctacatcttcggcctggagaacctgatccgcatcctgcaggacatccaggagggggagtag

SEQ ID NO: 54847 - DNA, 1233 bp, Artificial Sequence
  derived and/or modified sequence
atggtggtgcagaacagcgccgacgccggcgacatgcgggccggcgtccagctggagcctttcctgcaccaggtcggaggccatatgtctgtaatgaaatatgacgagcacaccgtgtgtaaacccctggtgtctcgggagcagcgtttctatgaatccctccccctcgcgatgaaacgtttcaccccccaatataagggtactgtaacagtgcatctatggaaagacagtactggacatctatcactggtggctaatcctgtgaaggaatctcaagagccctttaaagtctccactgaatcagcagcagttgctatctggcagacactgcagcaaactaccggaagcaatggcagtgattgcacattggctcagtggccacacgcacagctcgccaggagcccaaaggagtcccctgcaaaggccctgttgcgttccgagcctcatctcaacacgcccgcgttttccctggttgaagataccaatgggaatcaggtcgaacgcaagtcctttaatccttggggtctgcagtgtcaccaggcgcacttgacacggctgtgctcagaataccctgaaaataagcgccaccggtttttgcttctggagaacgtcgtctctcagtatacgcatccctgcgtcctggacctcaagatgggcacacggcagcatggggatgacgcctcagaagagaagaaagcccgccatatgagaaagtgcgctcaatcgacatctgcctgcctcggagtacggatatgcgggatgcaggtttaccagaccgacaaaaagtacttcttatgcaaagataagtattatggtcggaagctctccgtggaaggatttcgccaggccctgtaccagtttctgcataatggttcccatctcaggcgggagctgttagagccaatcctacatcagttgagagcactgctcagtgtgattaggagtcaatcctcttatcgattctacagcagttctctgctggttatctacgacgggcaggagccacctgaaagagcccccggcagcccccatcctcatgaggctccacaggcggcacacggctcctctccaggaggcttaaccaaagtggatatacggatgatcgactttgcccacaccacatacaaaggctattggaacgagcacaccacttacgatggtccagacccgggttatattttcggactagaaaatctaattaggatcctccaggatatacaagagggagagtag

SEQ ID NO: 54848 - DNA, 1233 bp, Artificial Sequence
  derived and/or modified sequence
atggtggtgcagaacagcgccgacgccggcgacatgcgggccggcgtgcagctcgagcccttcttgcatcaggttggtggacacatgagcgtgatgaagtatgacgaacacacagtctgcaagccactggtatcgcgggaacagaggttttatgagtcgttaccccttgctatgaagcggttcacacctcagtataagggcaccgttactgtgcatctctggaaggacagcaccgggcacctatcattggtcgccaatccagtgaaggaaagccaggagccgtttaaagtttctacagaaagcgccgctgtcgccatctggcagaccttgcaacagactactggttcaaacgggtctgattgtaccttggctcagtggccacatgcacagttagctcgttctcccaaagagtctcccgcaaaagctctccttcggtccgaaccacatttgaacactccagcattttcactcgttgaagacaccaatggtaaccaagtggaaaggaagagctttaacccctgggggctgcagtgccaccaggcccacttaacaaggctctgctccgaatacccggagaataaacggcaccggttcctgctactggagaatgttgtctctcagtacacccacccttgtgtgctggaccttaaaatgggtacgagacagcacggcgatgatgcgtctgaagaaaaaaaagcccgacatatgcgcaagtgtgcccagtccacatccgcctgtcttggcgtgcgaatctgtgggatgcaggtatatcaaactgacaaaaagtattttctgtgtaaggacaagtactacggtagaaagctgtccgtggagggattccggcaagctctataccaattcctgcacaatggttcccatctgagaagagagctgctcgagcctatcttacaccagctgcgggcactcctgtccgttatccggtcccaaagttcctacagattttattcttccagtctcctggtcatttatgatggacaggagccccctgaacgggctccgggatctccacaccctcatgaggctccgcaggcggcgcacggtagctcccccgggggattgaccaaggtcgatattcgcatgatcgattttgcccataccacctacaaggggtattggaacgaacatacaacttacgacggtccagatccagggtatatattcggcttagaaaacttgattagaatcctgcaggatatacaagaaggtgaatag

SEQ ID NO: 54849 - DNA, 1233 bp, Artificial Sequence
  derived and/or modified sequence
atggttgttcaaaattccgccgacgccggagacatgcgtgcaggtgttcagcttgagccattcctgcatcaggttggtggccatatgtccgtgatgaagtacgacgaacacaccgtctgcaagccgcttgtcagccgcgaacaaagattctatgaatctctccctctggccatgaaacggttcactccacagtataaagggacggtcaccgtgcatttgtggaaagacagtacggggcacctgtcactggtggctaaccctgtgaaggaaagccaggagccttttaaggtaagcaccgagtcggcagctgtcgctatatggcaaaccctgcagcagacaaccggtagcaacggttcagattgcaccctggctcagtggccccatgcccagcttgcacggtccccgaaagagtcaccagcaaaggcgctcctcaggtccgagccccacctcaataccccagccttctcgctggttgaggacaccaacggaaatcaggtggagcggaagtccttcaacccctgggggctgcagtgccaccaggcacatctgactcgcctctgctcggaatacccggagaacaagaggcaccgattcctgctgctggagaatgtcgtgagccagtacacccacccatgcgtcctggacctgaaaatgggcactcgccagcatggtgacgacgctagtgaagagaagaaagctagacatatgcgtaagtgcgcccagagcacaagtgcatgtctgggcgtgagaatttgcggaatgcaggtatatcagacagacaaaaaatactttctctgcaaagataagtattatgggaggaaattatcggtggaaggttttagacaggccctgtatcagttccttcataatggcagccacctaagacgcgaactcctagagccgattctgcatcagttgcgggctttgctcagcgttatacgcagccaatcttcataccgtttttactccagtagcctgctggtcatctatgacgggcaggagccaccagagagagctcctggctctccccatccacatgaagcgcctcaggctgcccacggctctagcccaggcggtctgacaaaggtagacatccgtatgatcgacttcgcccacacgacgtataagggatactggaacgaacacaccacatatgacgggccagatcctggatacatttttgggctggagaatctcatccgcatactccaagatatccaggagggcgagtag

SEQ ID NO: 54850 - DNA, 1233 bp, Artificial Sequence
  derived and/or modified sequence
atggtggttcagaattccgctgacgctggtgatatgcgtgcaggggtccagttggagccatttctgcaccaggtgggcggacacatgagcgtcatgaaatatgatgagcatacagtgtgcaaacccctggttagtcgggagcagcggttttacgagagcctccctctcgctatgaaaaggtttactccccagtacaaaggcaccgtgactgtgcacctctggaaggactctaccggacatctttcactggtggccaatccagtgaaagagtcacaagagccatttaaggtcagtaccgagagcgccgcagtcgcaatctggcagaccctgcagcagactaccggatctaatggctccgactgcactctggcacagtggcctcacgcccaacttgctcggagccccaaagagtctccggcaaaagccctcttaaggagtgaacctcatctcaacacacctgcgttctccctcgtggaagatacgaacggaaaccaggtggagcggaaaagttttaacccatggggactgcaatgtcatcaggcccacttgacgaggctgtgttctgagtaccctgaaaacaaacggcacaggttcttgctcctggagaatgtggtcagccagtatacccacccttgcgtgttggacctgaaaatgggaacacggcagcacggcgacgatgcctccgaggaaaagaaagctaggcacatgcgaaagtgtgcacagagtacttcggcttgtctgggcgtcaggatatgtgggatgcaggtgtatcagaccgacaaaaaatactttctctgtaaggataagtactatgggagaaagctcagcgttgagggcttccgccaggctttatatcagttcctccataatggctctcacttgagacgcgagctgctggagccaattctccaccagctgcgggctctcctgtctgtcattcgaagtcagagctcctataggttctatagtagcagcctattggtcatctacgacggtcaggaaccgccagagagggccccaggctccccgcatccccatgaagcacctcaggccgctcacggcagttctcctgggggacttacgaaggtagatataagaatgatagattttgcccacactacttataagggttactggaacgagcacactacgtatgatggtcccgatcctgggtacatctttggactggagaatctgattcggatcctccaggacatccaagagggcgaatag

SEQ ID NO: 54851 - DNA, 1233 bp, Artificial Sequence
  derived and/or modified sequence
atggtggtgcagaacagcgccgacgccggcgacatgagagccggcgtgcagctggagcccttcctgcaccaggtgggcggccacatgagcgtgatgaagtacgacgagcacaccgtgtgcaagcccctggtgagcagagagcagagattctacgagagcctgcccctggccatgaagagattcaccccccagtacaagggcaccgtgaccgtgcacctgtggaaggacagcaccggccacctgagcctggtggccaaccccgtgaaggagagccaggagcccttcaaggtgagcaccgagagcgccgccgtggccatctggcagaccctgcagcagaccaccggcagcaacggcagcgactgcaccctggcccagtggccccacgcccagctggccagaagccccaaggagagccccgccaaggccctgctgagaagcgagccccacctgaacacccccgccttcagcctggtggaggacaccaacggcaaccaggtggagagaaagagcttcaacccctggggcctgcagtgccaccaggcccacctgaccagactgtgcagcgagtaccccgagaacaagagacacagattcctgctgctggagaacgtggtgagccagtacacccacccctgcgtgctggacctgaagatgggcaccagacagcacggcgacgacgccagcgaggagaagaaggccagacacatgagaaagtgcgcccagagcaccagcgcctgcctgggcgtgagaatctgcggcatgcaggtgtaccagaccgacaagaagtacttcctgtgcaaggacaagtactacggcagaaagctgagcgtggagggcttcagacaggccctgtaccagttcctgcacaacggcagccacctgagaagagagctgctggagcccatcctgcaccagctgagagccctgctgagcgtgatcagaagccagagcagctacagattctacagcagcagcctgctggtgatctacgacggccaggagccccccgagagagcccccggcagcccccacccccacgaggccccccaggccgcccacggcagcagccccggcggcctgaccaaggtggacatcagaatgatcgacttcgcccacaccacctacaagggctactggaacgagcacaccacctacgacggccccgaccccggctacatcttcggcctggagaacctgatcagaatcctgcaggacatccaggagggcgagtag

SEQ ID NO: 54852 - protein, 315 aa, Artificial Sequence
  derived and/or modified sequence
MALPFQKELEKYKNIDEDELLGKLSEEELKQLENVLDDLDPESAMLPAGFRQKDQTQKAATGPFDREHLLMYLEKEALEQKDREDFVPFTGEKKGRVFIPKEKPIETRKEEKVTLDPELEEALASASDTELYDLAAVLGVHNLLNNPKFDEETANNKGGKGPVRNVVKGEKVKPVFEEPPNPTNVEISLQQMKANDPSLQEVNLNNIKAFADMLKVNKTLTSLNIESNFITGTGILALVEALKENDTLTEIKIDNQRQQLGTAVEMEIAQMLEENSRILKFGYQFTKQGPRTRVAAAITKNNDLVRKKRVEADRR

SEQ ID NO: 54853 - DNA, 948 bp, Artificial Sequence
  derived and/or modified sequence
atggccctgcccttccagaaggagctggagaagtacaagaacatcgacgaggacgagctgctgggcaagctgagcgaggaggagctgaagcagctggagaacgtgctggacgacctggaccccgagagcgccatgctgcccgccggcttcagacagaaggaccagacccagaaggccgccaccggccccttcgacagagagcacctgctgatgtacctggagaaggaggccctggagcagaaggacagagaggacttcgtgcccttcaccggcgagaagaagggcagagtgttcatccccaaggagaagcccatcgagaccagaaaggaggagaaggtgaccctggaccccgagctggaggaggccctggccagcgccagcgacaccgagctgtacgacctggccgccgtgctgggcgtgcacaacctgctgaacaaccccaagttcgacgaggagaccgccaacaacaagggcggcaagggccccgtgagaaacgtggtgaagggcgagaaggtgaagcccgtgttcgaggagccccccaaccccaccaacgtggagatcagcctgcagcagatgaaggccaacgaccccagcctgcaggaggtgaacctgaacaacatcaaggccttcgccgacatgctgaaggtgaacaagaccctgaccagcctgaacatcgagagcaacttcatcaccggcaccggcatcctggccctggtggaggccctgaaggagaacgacaccctgaccgagatcaagatcgacaaccagagacagcagctgggcaccgccgtggagatggagatcgcccagatgctggaggagaacagcagaatcctgaagttcggctaccagttcaccaagcagggccccagaaccagagtggccgccgccatcaccaagaacaacgacctggtgagaaagaagagagtggaggccgacagaagatag

SEQ ID NO: 54854 - DNA, 948 bp, Artificial Sequence
  derived and/or modified sequence
atggccctgccttttcaaaaagagctagagaaatataaaaacatcgacgaggatgaacttttagggaagctatcagaggaggaattaaaacagctcgagaacgtcctcgacgacctcgaccctgagagcgcaatgttgcccgccgggtttcgacagaaagatcagacccagaaggccgctacggggccctttgatagggaacacttgttgatgtatctggaaaaagaggccctcgagcaaaaagaccgcgaggactttgttccctttactggggaaaagaagggccgagtatttatcccaaaggaaaagcccatcgagacccggaaagaagaaaaggtgacattggacccggagttggaagaagcattggcatccgccagtgataccgagctttacgatctagctgccgtgctaggagttcataatctactcaacaatccgaagttcgacgaggagactgcgaataataagggtggaaagggacccgttcggaacgtggttaagggcgagaaggtaaagccagtctttgaagaaccccctaaccctactaacgtcgagatctcgctgcagcaaatgaaggcaaacgaccctagcctccaggaggttaacttgaataacataaaggcctttgcggacatgctcaaggttaataaaacgcttacctctctgaacattgagtccaactttataacaggtactgggatccttgcactggtggaggccctgaaagaaaacgatacccttacagaaatcaaaattgacaaccagcgccagcagctggggactgccgtagagatggaaattgcacagatgttagaggagaacagtcggatcttgaaattcggatatcagtttacgaagcagggtcctcggaccagggttgccgccgctattacaaagaacaacgatctggtgcggaagaaaagggtagaggccgacaggcgatag

SEQ ID NO: 54855 - DNA, 948 bp, Artificial Sequence
  derived and/or modified sequence
atggccctgcccttccagaaggagctggagaagtacaagaacattgatgaagatgagctgctgggcaagctgtctgaggaggagctgaagcagctggagaatgtgctggatgacctggaccctgagagcgccatgctgcctgctggcttccggcagaaggaccagacccagaaggccgccaccggcccctttgaccgggagcacctgctgatgtacctggagaaggaggccctggagcagaaggaccgggaggactttgtgcccttcaccggggagaagaagggccgggtcttcatccccaaggagaagcccatcgagaccaggaaggaggagaaggtgaccctggaccctgagctggaggaggccctggccagcgccagtgacacagagctgtatgacctggccgctgtgctgggcgtgcacaacctgctgaacaaccccaagtttgatgaggagacagccaacaacaagggcggcaagggccctgtgagaaatgtggtgaagggggagaaggtgaagcctgtgtttgaggagccccccaaccccaccaacgtggagatcagcctgcagcagatgaaggccaatgaccccagcctgcaggaggtgaacctgaacaacatcaaggcctttgctgacatgctgaaggtgaacaagaccctgaccagcctgaacatcgagagcaacttcatcactggaacaggcatcctggccctggtggaggccctgaaggaaaatgacaccctgacagagatcaagattgacaaccagaggcagcagctgggcacagctgtggagatggagatcgcccagatgctggaggagaacagccgcatcctgaagtttggctaccagttcaccaagcagggccccaggaccagggtggccgccgccatcaccaagaacaatgacctggtgaggaagaagagggtggaggccgacagaagatag

SEQ ID NO: 54856 - DNA, 948 bp, Artificial Sequence
  derived and/or modified sequence
atggccctgcccttccagaaggagctggagaagtacaagaacatcgacgaggatgagcttcttggaaaactctcagaagaagaacttaagcaactggagaacgtactggatgatttagatccagaaagcgccatgctccccgccgggttcagacaaaaggatcagacacaaaaggcagccaccggtccatttgatcgcgagcacctcctcatgtatctggagaaggaagctcttgagcaaaaagatcgggaggattttgtgccgttcacaggcgaaaagaaaggcagggtgtttatccccaaggagaaacctattgagactcggaaagaggagaaggtaacactggaccctgaattggaagaggctttggcttccgcatctgatacagaactatacgatctggctgccgtgctgggcgttcacaacctcctgaacaatcccaagttcgacgaggaaaccgcaaataacaaaggcggcaaaggccctgtacggaacgttgttaagggggagaaggttaaacccgtgttcgaggaacccccaaacccaaccaatgttgaaatctctctgcagcagatgaaggccaatgacccaagcctgcaggaggtaaacctcaacaacataaaagcattcgcagatatgttgaaggtgaataagacgctaaccagcctgaatatcgagtccaactttattacaggcactggtatcttagccctcgtagaagcgcttaaggagaacgatacactaacagagatcaagatcgacaaccagagacagcaactgggaacagcagtcgagatggagatcgcgcagatgctggaggaaaacagccgaatcctgaagtttgggtaccaatttaccaagcaggggcccagaacacgagtcgcagctgccatcacaaagaacaacgacctggtcaggaagaaacgagttgaggctgaccggcgctag

SEQ ID NO: 54857 - DNA, 948 bp, Artificial Sequence
  derived and/or modified sequence
atggccctgccctttcagaaggaactggagaagtacaagaacatcgatgaagacgagttgctgggcaaactctccgaagaggaacttaaacagctcgaaaacgtcctagatgacctggatcccgaaagcgccatgctccccgcaggttttagacaaaaggatcagacacaaaaagcggcaacaggacctttcgacagagagcatctgttgatgtatctggaaaaggaggcactcgagcagaaggaccgcgaagacttcgtccctttcacgggtgaaaaaaaagggcgagtctttatccctaaagagaagccaattgaaacccgcaaggaagagaaagttaccctggatccagagctagaggaagccctggcctctgcctcggatactgagctatacgacctggcagccgtgctgggagttcataatttgctcaataatcccaagttcgacgaggaaacagccaataataagggcggaaagggacctgttcggaacgtggtgaagggggaaaaagtcaagcccgtgttcgaagagccaccaaaccccaccaatgtggagatcagcttgcagcagatgaaagctaatgatccctctttgcaagaggtaaatctgaataatatcaaggccttcgcagatatgctgaaggtgaataagaccttaactagcttgaacattgagtctaatttcataacagggaccgggattctcgctttagttgaggccctaaaggagaacgataccttgaccgagataaagattgataaccagcggcagcaacttgggacagcagtggagatggagattgcccagatgttagaagagaattctcgaattctgaaattcggttatcagtttacgaaacaggggcctagaactcgggtcgcggctgccattaccaaaaataatgacctcgtacgcaagaaaagagttgaggctgacaggagatag

SEQ ID NO: 54858 - DNA, 1490 bp, Artificial Sequence
  derived and/or modified sequence
ggactgacggccagcacagccggctccgggatgagcgcacggacggtattctgaagtctcaggaaactggaccatttaaatgtgcatggcccatgagaaaggcttataagaagccatggcactcccctttcaaaaagagctggagaaatacaagaacattgatgaagatgagcttcttggcaaactctcagaagaggaactgaaacagttggaaaatgttctagatgacctagatcctgagagtgccatgctgccagctggatttcgacagaaagaccagacacagaaggcagccaccggcccctttgaccgcgagcacctcctcatgtacctggagaaggaggctttggaacagaaagacagagaggactttgtgcccttcactggagaaaagaaagggagagtctttatccctaaagaaaagcctatagaaactcgtaaagaagaaaaagtgacccttgacccagaactggaagaagctttggccagtgcctctgacaccgaactctatgatcttgcagctgtccttggagtacacaatttgctcaacaatccaaagttcgatgaagaaacagccaacaataaaggtggcaaaggacctgtcagaaatgttgtcaaaggtgaaaaagtaaagccagtatttgaggaaccaccaaatcccacaaatgtggaaataagcctgcagcagatgaaagccaatgatcctagcttgcaagaagtcaacctcaacaacattaaggcttttgcagacatgctgaaagtaaacaagaccttgacaagtctaaacatagaatccaattttatcactggaactgggatcctggccctggtagaggcactgaaagaaaatgacaccttgacagaaatcaagattgacaaccagaggcagcagttgggaacagctgtagagatggaaattgcccagatgctggaggagaattcaaggatcctcaagtttggataccagtttaccaagcaagggccacgaacaagggtggcagctgccatcacaaagaataatgacctggttcgtaagaagagagttgaagcagaccgaaggtaaacttccttgaggagaagtgaagtttcactgtggtatggccattgaaaaacaaaaactcttcttcttccccatcaggaccattttatcaaagttcgttcatttccgttaaccacataactaataatttaattgttattcttttttagcactacttatttatcttggattttgtaatatatgcaattgttttatttgctcatgggcacttctggcaacttgacaaatggaccgatgcagattttagagagtgacgacatggaaaatgaatttaaccactttcttattgggttgtcttgctttcttacatgaacttgtttttttaatcactgaaaggaatttagtgtataatatgtgtttgtaactgtgattatgatagaggcctatctctgtttacatgcatagctttgagttaggctaaatacatcag

SEQ ID NO: 54859 - protein, 360 aa, Artificial Sequence
  derived and/or modified sequence
MPELVVTALLAPSRLSLKLLRAFMWSLVFSVALVAAAVYGCIALTHVLCRPRRGCCGRRRSASPACLSDPSLGEHGFLNLKSSGLRLHYVSAGRGNGPLMLFLHGFPENWFSWRYQLREFQSRFHVVAVDLRGYGPSDAPRDVDCYTIDLLLVDIKDVILGLGYSKCILVAHDWGALLAWHFSIYYPSLVERMVVVSGAPMSVYQDYSLHHISQFFRSHYMFLFQLPWLPEKLLSMSDFQILKTTLTHRKTGIPCLTPSELEAFLYNFSQPGGLTGPLNYYRNLFRNFPLEPQELTTPTLLLWGEKDTYLELGLVEAIGSRFVPGRLEAHILPGIGHWIPQSNPQEMHQYMWAFLQDLLD

SEQ ID NO: 54860 - DNA, 1083 bp, Artificial Sequence
  derived and/or modified sequence
atgcccgagctggtggtgaccgccctgctggcccccagcagactgagcctgaagctgctgagagccttcatgtggagcctggtgttcagcgtggccctggtggccgccgccgtgtacggctgcatcgccctgacccacgtgctgtgcagacccagaagaggctgctgcggcagaagaagaagcgccagccccgcctgcctgagcgaccccagcctgggcgagcacggcttcctgaacctgaagagcagcggcctgagactgcactacgtgagcgccggcagaggcaacggccccctgatgctgttcctgcacggcttccccgagaactggttcagctggagataccagctgagagagttccagagcagattccacgtggtggccgtggacctgagaggctacggccccagcgacgcccccagagacgtggactgctacaccatcgacctgctgctggtggacatcaaggacgtgatcctgggcctgggctacagcaagtgcatcctggtggcccacgactggggcgccctgctggcctggcacttcagcatctactaccccagcctggtggagagaatggtggtggtgagcggcgcccccatgagcgtgtaccaggactacagcctgcaccacatcagccagttcttcagaagccactacatgttcctgttccagctgccctggctgcccgagaagctgctgagcatgagcgacttccagatcctgaagaccaccctgacccacagaaagaccggcatcccctgcctgacccccagcgagctggaggccttcctgtacaacttcagccagcccggcggcctgaccggccccctgaactactacagaaacctgttcagaaacttccccctggagccccaggagctgaccacccccaccctgctgctgtggggcgagaaggacacctacctggagctgggcctggtggaggccatcggcagcagattcgtgcccggcagactggaggcccacatcctgcccggcatcggccactggatcccccagagcaacccccaggagatgcaccagtacatgtgggccttcctgcaggacctgctggactag

SEQ ID NO: 54861 - DNA, 1083 bp, Artificial Sequence
  derived and/or modified sequence
atgccggaattggtggtgacagctttattggcccccagccgcctaagcctgaaactgttgagggcctttatgtggagtttggttttctcggtggctctcgtggccgccgctgtctatggctgcattgcgctaacccatgtcttatgtagaccacgtcggggatgctgtggtagaagacggagcgcctcacccgcctgtttaagcgacccgtcgcttggcgagcacggtttccttaatctcaaatcttccggtcttaggctgcactatgttagtgcagggcggggaaatggtccgttaatgctgttcctccacggattccctgaaaattggttttcctggaggtatcagttgagagaattccagtcccgtttccacgttgtcgctgtggatctccgaggctatggcccctcagacgcgcctcgagatgttgattgctatacaatcgatttactgctagttgacatcaaagatgttatcctcgggctgggatatagtaagtgtatcctggtggctcatgattggggcgctctgcttgcctggcatttcagcatctactacccaagtctcgtcgaaagaatggtggtcgtatcaggagctcccatgagcgtgtatcaggactattccctccatcacataagccaattctttagatcccactatatgttcctgttccagctgccatggctgcctgagaagctgctctctatgtccgactttcagatcctgaagactacgctgactcacagaaagacaggaattccgtgtttgacgcccagtgagctggaggccttcctgtacaatttctcccagcctggtgggttgacaggtcctctcaactattaccggaatctctttcggaactttccactggagccacaggagctgacgactcccactctattactgtggggagaaaaagatacctaccttgagctcggtttagtagaggcgattggatctcggttcgtccccggtaggctggaggcacatatccttcccggtatcgggcattggattccccagtccaatccccaggagatgcaccagtacatgtgggcttttctccaggatctgctggattag

SEQ ID NO: 54862 - DNA, 1083 bp, Artificial Sequence
  derived and/or modified sequence
atgcctgagctggtggtgacagccctgctggcccccagccggctgagcctgaagctgctgcgggccttcatgtggagcctggtgttttctgtggccctggtggccgctgctgtgtatggctgcatcgccctgacccacgtgctgtgccggccccggcggggctgctgcggcagaagaagaagtgccagccctgcctgcctgagtgaccccagcctgggggagcacggcttcctgaacctgaagagcagcggcctgcggctgcactacgtgtctgctggaagaggaaatggccccctgatgctgttcctgcacggcttccctgagaactggttctcctggagataccagctgcgggagttccagagccgcttccacgtggtggccgtggacctgcggggctacggccccagtgatgcccccagagatgtggactgctacaccatcgacctgctgctggtggacatcaaggatgtgatcctgggcctgggctacagcaagtgcatcctggtggcccatgactggggcgccctgctggcctggcacttcagcatctactaccccagcctggtggagaggatggtggtggtgtctggggcccccatgtctgtgtaccaggactacagcctgcaccacatcagccagttcttccgcagccactacatgttcctgttccagctgccctggctgcctgagaagctgctgtccatgtctgacttccagatcctgaagaccaccctgacccacaggaagacaggcatcccctgcctgaccccatctgagctggaggccttcctgtacaacttcagccagcccggcggcctgaccggccccctgaactactacagaaacctcttcaggaacttccccctggagccccaggagctgaccacccccaccctgctgctgtggggcgagaaggacacctacctggagctgggcctggtggaggccatcggcagcagatttgtgcccggccgcctggaggcccacatcctgcccggcatcggccactggatcccccagagcaacccccaggagatgcaccagtacatgtgggccttcctgcaggacctgctggactag

SEQ ID NO: 54863 - DNA, 1083 bp, Artificial Sequence
  derived and/or modified sequence
atgcccgagctggtggtgaccgccctgctggcccccagccggctgagtctcaaattactcagggcattcatgtggtccctggtgtttagtgtggcactagtggctgccgctgtgtatggttgcatcgccctgacccatgtgctgtgtaggccgaggagaggatgctgcgggcgacgtagatccgccagccctgcctgtctttcagatccttctctcggagaacacggatttttaaacttgaagtcatcaggtctacgcctccactacgtgagcgctggtcgagggaacggacctctgatgctgttcctacatggtttccccgagaactggttcagttggcggtatcagctgcgagagttccagagcagattccatgtagttgcggttgacttaaggggatatggcccctccgacgctcctagagacgtggactgctacactatcgatttgctactggtggacatcaaagacgtgatattaggcctgggctactccaaatgcattttagtagcccacgattggggcgccctcttagcctggcatttttcaatatactaccctagcctcgtggaaagaatggtagtggtcagcggagccccaatgagtgtctatcaagattactccctccatcatatcagtcagttcttcaggtcacattatatgtttttgtttcaactcccatggcttccagaaaagctgctttctatgagtgatttccagattctcaaaaccactttaacgcaccggaagacagggatcccctgtctgaccccctctgagctcgaagccttcttgtacaatttttcccaacctgggggcctgactgggccactgaattactaccgaaatttgtttaggaactttcccttggagccccaggagctgaccactccaaccttgttactgtggggggaaaaggatacctacctcgaactgggactggtggaagctattggtagcagattcgttcccggccggcttgaagcccacatcctccccggcatcggccactggatcccccaatcaaacccccaggagatgcaccagtatatgtgggcgtttctgcaggacctgctggattag

SEQ ID NO: 54864 - DNA, 1083 bp, Artificial Sequence
  derived and/or modified sequence
atgcccgaactggtggtgactgccctattggcccctagcaggctcagcctgaaactgttgcgagcattcatgtggagcttagtgttctccgtggccttagtggctgccgctgtttatggctgcattgccctcacccacgttttgtgtcggcctaggcgcggatgttgtggtcgacggagaagcgccagccccgcatgcttaagtgaccccagtcttggggagcacggcttcctgaatctcaagtccagtgggcttcgattgcactatgtgagtgcaggaaggggaaatggcccactaatgttgtttctccatggtttccctgagaattggttcagttggcggtatcagctccgcgagtttcagagcaggttccatgtcgtcgccgtggacctcagaggatacggccctagtgacgcacctcgcgacgttgactgttatacgatagacctattactggtagacattaaggacgtcattctcgggctcggctactcgaaatgtatcttagttgctcatgactggggtgccctattggcctggcatttttcaatctattacccgtctctggtcgagcggatggtggtggtgtcgggagcacccatgtctgtatatcaggactactccctgcatcatattagccagtttttcaggtcccattacatgttcctcttccaattgccgtggctgccagagaagctattatctatgagcgactttcagattctgaaaactacactgacccatcggaagactgggatcccttgtctgaccccctccgagctggaggccttcctctacaacttcagccagcccggagggcttaccggccctctcaattactaccgaaatttattcagaaatttccctttggaaccccaagaactgaccacaccaactttattattgtggggggaaaaagacacatacctggagcttggactcgtcgaagctatcggctcacggttcgttccgggtcggttggaggcacacatcctgccgggtatcgggcattggatccctcagtccaacccccaggagatgcatcagtacatgtgggcttttttacaggatttgttggattag

SEQ ID NO: 54865 - DNA, 1083 bp, Artificial Sequence
  derived and/or modified sequence
atgcccgagctagtggtgactgcattgcttgctccaagtcgcctgtccctaaaattattgcgggcttttatgtggtctttggttttttccgtggctcttgtcgccgcagcagtctatggatgcatcgcgctgactcacgtactctgcaggccaagacgcggttgttgtggccggagaaggagtgcttcacctgcttgtctgtcagatcccagtctcggtgaacatggttttctgaacttaaaatcctccgggcttcgtctgcactacgtcagcgccggaagaggtaatgggccactcatgctatttctgcacggtttcccagaaaattggttctcctggcgataccagctccgtgaattccagagtaggtttcatgtcgtggctgtggacttaaggggctacggcccttcagacgctcctcgcgatgtcgactgttatactatagacctccttctggtcgacattaaggatgttattctaggactgggttatagcaagtgtattctggtcgcacacgactggggcgcactgttagcctggcacttttcgatttactatccttccctggttgaaagaatggtcgtcgtgagcggtgctccaatgagcgtctaccaggactactcactgcatcatatcagccaattttttagatcccattacatgtttctttttcagttaccatggctccccgaaaagctcctttcaatgtcggacttccaaattcttaagacaactttgactcatagaaagactggaatcccctgtctaacacctagcgagctcgaggccttcctttacaactttagtcagcctggtggcctcaccggaccactaaactactatcgcaatctattccgaaacttcccactggagcctcaagaactcacgacgccaacacttttactctggggcgaaaaggatacgtatctggagctggggctggtggaggctatcgggtcgcgatttgtgccggggcgtctcgaagctcatatattgcccggtattggtcactggatccctcagtccaatccacaggaaatgcatcagtatatgtgggcgttcctacaggatctactggactag

SEQ ID NO: 54866 - DNA, 1083 bp, Artificial Sequence
  derived and/or modified sequence
atgcccgagcttgtggttaccgcgttgcttgcgcccagccgcctatctttaaaactgctcagggcctttatgtggagcttagtattcagcgtcgcactggtcgcagctgccgtttatggctgtattgcacttacacacgtgctctgccggcctagacgcggttgttgtggtcggagacggtctgcttcaccagcttgcctctcagatccctcccttggtgaacatggatttcttaacctgaagagttcaggactgcgtctccattacgtgtctgcaggtcgcggcaatggccccctgatgctctttctgcatggtttccctgagaattggttcagttggaggtaccaactacgcgaatttcagtcccggtttcacgtggttgcagtggatttaagagggtacgggccaagtgatgcccctcgggatgtggactgttatacaatcgatctgctcttagttgatatcaaagatgtgatcctgggcctaggttattccaagtgtatcctggtggcccatgactggggagctttactggcgtggcacttcagtatttattacccttcccttgtcgagcgtatggtcgtggtgtcaggcgccccaatgtccgtttatcaggattatagcttacatcacatctcccagttttttagaagccattatatgttccttttccagctaccgtggttacctgagaaattattgtccatgtccgacttccagatccttaagaccaccttgacccaccgcaaaaccggaataccctgtctcacaccttctgagcttgaggcctttctctataattttagccaacccgggggactgaccggcccgctgaactactacaggaacctatttagaaactttcctttggagccacaggagctcacaacccctactctgctgttgtggggagaaaaggacacctatttagagctgggcctggtggaggctatcggaagtcgtttcgttccaggacgactggaagcacatattctgcccggcattggtcactggattccacagagtaatccacaagaaatgcatcagtacatgtgggccttcttgcaggatctgttagattag

SEQ ID NO: 54867 - DNA, 1083 bp, Artificial Sequence
  derived and/or modified sequence
atgcccgaattggttgtgacagccctccttgccccatctcgattatctctcaagctcctgagagccttcatgtggagcttggtattcagcgtggcgttggtggccgctgcagtgtatggctgcatagccttgacccatgttctgtgtagacccaggcggggatgttgcggccgtcgcagatctgcatccccagcctgtctctccgatcccagcctcggtgagcatggcttcctcaatctgaagtcgagcgggttacgcctgcattacgttagcgcgggtcggggtaatggcccattaatgctctttctccatggattcccagagaattggttttcatggcgttatcagctgcgcgagttccagtcccgctttcacgtggtggcggtggatctccgcggttatggcccttccgacgctccccgtgacgtcgactgctatactatcgacctactccttgtcgacattaaagatgtgatattgggcttaggctattcgaagtgtatcttagttgcccacgattggggggcattgcttgcatggcatttttcaatctattaccctagcctggttgagaggatggtagtggtctctggagctccaatgagtgtttatcaggattacagcctccatcatatcagccagttctttaggagtcattacatgtttcttttccaattgccctggctccccgaaaagttactgtctatgagcgattttcagattctgaaaaccaccctcacgcacagaaagacagggataccctgccttactccaagcgaattggaggcttttttatataacttttctcaacccggaggcctgaccggcccactgaactattatcgcaatttattccgcaactttccgttggagccacaggagctgactacacctactctgctcctgtggggcgagaaagacacttaccttgagctgggactcgtggaagccattggatctaggttcgtgcccggaagacttgaggcacatatcctccctgggatcggccattggatcccccaaagcaacccacaggaaatgcatcagtatatgtgggccttcctccaagacctgctggactag

SEQ ID NO: 54868 - DNA, 1771 bp, Artificial Sequence
  derived and/or modified sequence
ataagccaggcccaccattccaactctttctcctttttggcttgtaggccgcacctactctgcatatgccccgcccctcactccaggtgtcgcccacttaactgaagatccaggatcccctccttaaggtgcccctggccggcagcgccgccgtggtcccggagcgcggcgacatgccggagctggtggtgaccgcgctgctggcgccgtcgcgcctgtcgctgaagctgctgcgcgccttcatgtggagcctggtgttctcggtggcgctggtggccgcggcggtctacggctgcatagcgctcacgcacgtgctgtgccggccccggcgcggctgctgcgggcgccgtcggagcgcgtcccccgcctgcctgagcgacccctcgctgggtgagcacggtttcctgaacctcaagagctcgggcctgcgtctgcactatgtctcggctggacgaggtaacggacccctcatgctgtttctgcacggcttccctgagaactggttctcctggcgttaccagctccgggagttccagagccgcttccatgttgtggctgtggacttgcgaggctatggcccctcggatgcacctcgggatgtggactgctacacaatcgacctgctgctggtggacatcaaagatgtcatcctaggcctgggttactcgaagtgcatccttgtggcccatgactggggtgccctccttgcctggcatttctccatctactacccatccctggtcgagcggatggttgtggtcagtggtgcccccatgtcggtgtaccaagactattccctgcaccacatcagccagttcttccgttcccactacatgttcctgttccagctgccctggctgcccgagaagctgctgtctatgtctgactttcagattctgaagaccaccctcacccaccgcaagacaggcatcccatgcttgacccccagcgagctcgaggccttcctttataacttctcacagcctggtggcctcactgggcccctcaactactaccgaaacctcttcaggaacttccccctggaaccccaggagctgaccacacccacattgctgctgtggggggagaaggacacttacttggagctggggctggtggaagccatcggcagccgctttgtgccgggccgcttggaggcccacatcctgccaggcatagggcattggatcccacagagcaacccccaggagatgcaccagtacatgtgggccttcttgcaagacctgctggactagtggtccttgctggcctgcccaggaggcatggatactcaggaaggaacacacacccattatctgtgtgtgcctgggagtccatacaatgtccatacatgggtgaactcttgaatcgctcataggcatgggactcctggatcccacacaagcgcacctatgggtgcctcgggacacaccaacccctatactcacacacaggcatggatgcatgtgtgtgtaacaaacactttgaccctgggaactgggtatacctctcttccagtggagccagatgccgagaccgagtgtcccacctcctcccttcctggggcctcactctgcgctttgccaaagtcgcttctctgccatagctgcacagaccttaaaccctgaccttcctgtccctgccttcgacctcctgcctgggtcttcagctcagtgctactctgaatacaatactgctgaccacatttggctacttcagcttaaatgtatgttaattgaaatgaaatacaatgaaaatgcagtgctcagtc

SEQ ID NO: 54869 - DNA, 1083 bp, Artificial Sequence
  derived and/or modified sequence
atgcctgaattggtagtgaccgccctcttagctcctagcagattaagcctcaaactgttgagagcattcatgtggtcgttggtgtttagtgtcgcactggtggccgctgccgtgtacgggtgcatagccttgacccatgttctgtgtagaccgcgacgtgggtgctgcgggagaaggagatctgctagccctgcctgcctgagtgatcctagtctcggcgagcatggcttccttaacctcaagagctctggcttaagactccactatgtgtctgcgggccgaggcaacggtcctcttatgttgtttttacatggcttccctgagaattggttctcctggcggtatcagcttcgggaattccagtcccggttccacgtagtcgccgtggatttaaggggatacgggcccagcgatgcccctagagacgtcgattgttataccattgacctgctgctcgttgacataaaagacgtgattctgggtctcggctattcaaagtgtatactcgtcgcccatgattggggggctctcctggcctggcatttctcaatctactacccatctcttgttgaaagaatggtcgttgtcagcggcgctccaatgtccgtctaccaagactatagcttacatcacatatctcagttctttcgatctcattacatgttcctgtttcagctaccatggcttccagaaaagctgcttagcatgtccgattttcaaattctgaagacgactctgactcacaggaagaccgggatcccttgcctgaccccctccgaacttgaggccttcttgtataattttagtcagcccggaggactgactggtcccctaaattactacagaaacctatttcgcaacttcccattggaacctcaggaattgacaacacccaccctgttgctgtggggagagaaagatacctacctggagctcggtctggtcgaagcgattggtagcagatttgtcccgggccgcctggaagcacacatcctgcctggcatcggccactggatccctcaaagcaacccacaggagatgcaccagtatatgtgggctttccttcaagatctgttggattag

SEQ ID NO: 54870 - DNA, 1083 bp, Artificial Sequence
  derived and/or modified sequence
atgccagagttggtggtaactgctctcctcgctccttcaagacttagcctcaaattactgcgggcattcatgtggtccctagtgttcagtgtcgctctcgttgccgccgcggtttacggctgtatagcactgacacacgtactctgtaggcccaggagagggtgctgcggcaggcgtagatccgcatcgcctgcctgtcttagcgaccccagcttaggggagcatggttttttgaatctcaaatcctctggactccggctgcactacgtatccgctggacgcgggaatggacctctgatgttgtttttacatggcttccctgagaattggttctcctggcggtatcagcttcgggaattccagtcccggttccacgtagtcgccgtggatttaaggggatacgggcccagcgatgcccctagagacgtcgattgttataccattgacctgctgctcgttgacataaaagacgtgattctgggtctcggctattcaaagtgtatactcgtcgcccatgattggggggctctcctggcctggcatttctcaatctactacccatctcttgttgaaagaatggtcgttgtcagcggcgctccaatgtcagtctaccaagattattcgctccaccatataagccagttcttcagatcccactacatgttcctgtttcagctaccctggctccctgagaagctgctcagtatgtctgactttcagattttgaagacaaccctcacccatcgcaaaacgggcatcccctgcttgacaccctctgagctcgaagccttcctctataatttctctcagcccggtggactaaccggtccccttaattactaccgcaacttgtttcgcaattttccgctcgagccccaagaactaactactcccaccctgctattgtggggtgaaaaggatacttacttagagcttgggttggttgaggcgataggcagcagattcgtgcctggtagactggaagcccatatcctgcctggaatcggtcattggattccccagtcaaatccacaagaaatgcaccagtatatgtgggcctttctccaggatctgctcgactag

SEQ ID NO: 54871 - DNA, 1810 bp, Artificial Sequence
  derived and/or modified sequence
aggtgtttacctggcactcaggtgagtggtgcgctctggctgttttctgtcggagccgcccgcctcttccttcagcgcgtcccacaaatcccgacggcacggaggggccccaggccaagggcgatgggcccctgagccctgacaccgcttcgccgctgctgcaggtgcccctggccggcagcgccgccgtggtcccggagcgcggcgacatgccggagctggtggtgaccgcgctgctggcgccgtcgcgcctgtcgctgaagctgctgcgcgccttcatgtggagcctggtgttctcggtggcgctggtggccgcggcggtctacggctgcatagcgctcacgcacgtgctgtgccggccccggcgcggctgctgcgggcgccgtcggagcgcgtcccccgcctgcctgagcgacccctcgctgggtgagcacggtttcctgaacctcaagagctcgggcctgcgtctgcactatgtctcggctggacgaggtaacggacccctcatgctgtttctgcacggcttccctgagaactggttctcctggcgttaccagctccgggagttccagagccgcttccatgttgtggctgtggacttgcgaggctatggcccctcggatgcacctcgggatgtggactgctacacaatcgacctgctgctggtggacatcaaagatgtcatcctaggcctgggttactcgaagtgcatccttgtggcccatgactggggtgccctccttgcctggcatttctccatctactacccatccctggtcgagcggatggttgtggtcagtggtgcccccatgtcggtgtaccaagactattccctgcaccacatcagccagttcttccgttcccactacatgttcctgttccagctgccctggctgcccgagaagctgctgtctatgtctgactttcagattctgaagaccaccctcacccaccgcaagacaggcatcccatgcttgacccccagcgagctcgaggccttcctttataacttctcacagcctggtggcctcactgggcccctcaactactaccgaaacctcttcaggaacttccccctggaaccccaggagctgaccacacccacattgctgctgtggggggagaaggacacttacttggagctggggctggtggaagccatcggcagccgctttgtgccgggccgcttggaggcccacatcctgccaggcatagggcattggatcccacagagcaacccccaggagatgcaccagtacatgtgggccttcttgcaagacctgctggactagtggtccttgctggcctgcccaggaggcatggatactcaggaaggaacacacacccattatctgtgtgtgcctgggagtccatacaatgtccatacatgggtgaactcttgaatcgctcataggcatgggactcctggatcccacacaagcgcacctatgggtgcctcgggacacaccaacccctatactcacacacaggcatggatgcatgtgtgtgtaacaaacactttgaccctgggaactgggtatacctctcttccagtggagccagatgccgagaccgagtgtcccacctcctcccttcctggggcctcactctgcgctttgccaaagtcgcttctctgccatagctgcacagaccttaaaccctgaccttcctgtccctgccttcgacctcctgcctgggtcttcagctcagtgctactctgaatacaatactgctgaccacatttggctacttcagcttaaatgtatgttaattgaaatgaaatacaatgaaaatgcagtgctcagtccca

SEQ ID NO: 54872 - DNA, 1083 bp, Artificial Sequence
  derived and/or modified sequence
atgcctgagctggtggtgaccgccctcctggctccttcacggctcagcctgaagctgctgagagcctttatgtggtccctcgtgttctcagtggccctggtggccgccgctgtgtacggatgtattgctttgacacacgtactgtgtcgtcctagacgtggatgctgcggtcgtcggcggtctgcctctcccgcttgcctaagcgatcccagtctaggtgagcatggcttcttgaatctgaaatcaagtgggctgcgtcttcattacgtatccgctgggcgcgggaacggcccacttatgctctttctacatggattccctgagaactggttctcctggaggtatcagctgcgagaatttcaatcacgctttcatgttgtcgccgtcgacctgcgaggctatggaccaagcgacgctcctagggacgtggattgttacacaatcgacctactgctcgtggatattaaggatgtaatattggggctagggtactccaagtgcatcctcgtggctcacgattggggcgcgctgctcgcatggcacttttccatatattatccctccctagtggaaaggatggtggtagtctctggcgcacccatgtcagtgtatcaggactattccctccaccatatttctcagttcttccggtcgcactatatgtttctatttcagctgccctggcttcctgaaaaactcttgagtatgagcgactttcagattttgaaaactactctgacccatcggaagacgggcattccctgcctcactccctcagagctcgaggccttcctatacaatttctcacagcctggggggctgacaggaccgctgaactactatcggaacctgttcaggaacttccccttggaaccacaggagttgaccaccccaaccctgttgctgtggggtgaaaaggatacctacttagagcttggattagtggaagccattggctcccgctttgtaccaggccgtctcgaggcacatattctccctggcattgggcattggatcccacagagcaacccacaggagatgcatcaatatatgtgggcctttctgcaggatctgctcgattag

SEQ ID NO: 54873 - DNA, 1083 bp, Artificial Sequence
  derived and/or modified sequence
atgcccgagctggtggtgaccgccctgctggcccccagccggctgagtctgaagctattacgggcctttatgtggagtctagtattcagcgtagccctcgtggcagccgcagtttatgggtgtatagccctcacacatgtgctgtgcagaccccgtaggggatgttgcggccggaggcggtctgcatctccagcctgtctgtctgacccctcccttggtgagcatggattcctcaatttgaaatccagcggactgcgcctgcattacgtgtccgctgggaggggcaatggtccgctgatgctgttcctgcatggatttcccgagaattggttttcctggagataccagctgcgagagttccagtcaaggtttcatgtggtggctgtagatctgagagggtacgggccctctgatgctccacgagatgtggactgctatactatcgacctgctcctcgtcgacatcaaagacgtgatcttaggcctgggatacagtaaatgtattttggtggcccatgattggggcgccttgctggcttggcacttcagcatctattacccctctctcgtggaaaggatggtcgtcgtgagtggtgctccgatgagcgtgtaccaggactatagtctacaccatatatctcaattctttcggtcacactatatgtttctatttcagctgccgtggcttccggaaaagttattgtccatgagtgattttcagatattgaaaaccacactcacacatcgcaaaacagggataccctgcctgactccttcagagctggaggctttcttgtataacttcagtcagcccggcggtctcactggtcccttgaattactacagaaacctgtttcggaactttccccttgagcctcaggagcttaccacaccaacactcctgttgtggggggaaaaggacacctatctggaactaggcctggtggaagccatcgggagtaggttcgtgcctgggcgccttgaagcccatatactgcctggaatcggacattggatcccccagagtaaccctcaggaaatgcaccagtatatgtgggccttccttcaggacctgcttgactag

SEQ ID NO: 54874 - RNA, 1083 nt, Artificial Sequence
  derived and/or modified sequence
augcccgagcuaguggugacugcauugcuugcuccaagucgccugucccuaaaauuauugcgggcuuuuauguggucuuugguuuuuuccguggcucuugucgccgcagcagucuauggaugcaucgcgcugacucacguacucugcaggccaagacgcgguuguuguggccggagaaggagugcuucaccugcuugucugucagaucccagucucggugaacaugguuuucugaacuuaaaauccuccgggcuucgucugcacuacgucagcgccggaagagguaaugggccacucaugcuauuucugcacgguuucccagaaaauugguucuccuggcgauaccagcuccgugaauuccagaguagguuucaugucguggcuguggacuuaaggggcuacggcccuucagacgcuccucgcgaugucgacuguuauacuauagaccuccuucuggucgacauuaaggauguuauucuaggacuggguuauagcaaguguauucuggucgcacacgacuggggcgcacuguuagccuggcacuuuucgauuuacuauccuucccugguugaaagaauggucgucgugagcggugcuccaaugagcgucuaccaggacuacucacugcaucauaucagccaauuuuuuagaucccauuacauguuucuuuuucaguuaccauggcuccccgaaaagcuccuuucaaugucggacuuccaaauucuuaagacaacuuugacucauagaaagacuggaauccccugucuaacaccuagcgagcucgaggccuuccuuuacaacuuuagucagccugguggccucaccggaccacuaaacuacuaucgcaaucuauuccgaaacuucccacuggagccucaagaacucacgacgccaacacuuuuacucuggggcgaaaaggauacguaucuggagcuggggcugguggaggcuaucgggucgcgauuugugccggggcgucucgaagcucauauauugcccgguauuggucacuggaucccucaguccaauccacaggaaaugcaucaguauaugugggcguuccuacaggaucuacuggacuag

SEQ ID NO: 54875 - RNA, 1083 nt, Artificial Sequence
  derived and/or modified sequence
augcccgagcuugugguuaccgcguugcuugcgcccagccgccuaucuuuaaaacugcucagggccuuuauguggagcuuaguauucagcgucgcacuggucgcagcugccguuuauggcuguauugcacuuacacacgugcucugccggccuagacgcgguuguuguggucggagacggucugcuucaccagcuugccucucagaucccucccuuggugaacauggauuucuuaaccugaagaguucaggacugcgucuccauuacgugucugcaggucgcggcaauggcccccugaugcucuuucugcaugguuucccugagaauugguucaguuggagguaccaacuacgcgaauuucagucccgguuucacgugguugcaguggauuuaagaggguacgggccaagugaugccccucgggauguggacuguuauacaaucgaucugcucuuaguugauaucaaagaugugauccugggccuagguuauuccaaguguauccugguggcccaugacuggggagcuuuacuggcguggcacuucaguauuuauuacccuucccuugucgagcguauggucguggugucaggcgccccaauguccguuuaucaggauuauagcuuacaucacaucucccaguuuuuuagaagccauuauauguuccuuuuccagcuaccgugguuaccugagaaauuauuguccauguccgacuuccagauccuuaagaccaccuugacccaccgcaaaaccggaauacccugucucacaccuucugagcuugaggccuuucucuauaauuuuagccaacccgggggacugaccggcccgcugaacuacuacaggaaccuauuuagaaacuuuccuuuggagccacaggagcucacaaccccuacucugcuguuguggggagaaaaggacaccuauuuagagcugggccugguggaggcuaucggaagucguuucguuccaggacgacuggaagcacauauucugcccggcauuggucacuggauuccacagaguaauccacaagaaaugcaucaguacaugugggccuucuugcaggaucuguuagauuag

SEQ ID NO: 54876 - RNA, 1083 nt, Artificial Sequence
  derived and/or modified sequence
augccugaauugguagugaccgcccucuuagcuccuagcagauuaagccucaaacuguugagagcauucauguggucguugguguuuagugucgcacugguggccgcugccguguacgggugcauagccuugacccauguucuguguagaccgcgacgugggugcugcgggagaaggagaucugcuagcccugccugccugagugauccuagucucggcgagcauggcuuccuuaaccucaagagcucuggcuuaagacuccacuaugugucugcgggccgaggcaacgguccucuuauguuguuuuuacauggcuucccugagaauugguucuccuggcgguaucagcuucgggaauuccagucccgguuccacguagucgccguggauuuaaggggauacgggcccagcgaugccccuagagacgucgauuguuauaccauugaccugcugcucguugacauaaaagacgugauucugggucucggcuauucaaaguguauacucgucgcccaugauuggggggcucuccuggccuggcauuucucaaucuacuacccaucucuuguugaaagaauggucguugucagcggcgcuccaauguccgucuaccaagacuauagcuuacaucacauaucucaguucuuucgaucucauuacauguuccuguuucagcuaccauggcuuccagaaaagcugcuuagcauguccgauuuucaaauucugaagacgacucugacucacaggaagaccgggaucccuugccugacccccuccgaacuugaggccuucuuguauaauuuuagucagcccggaggacugacugguccccuaaauuacuacagaaaccuauuucgcaacuucccauuggaaccucaggaauugacaacacccacccuguugcuguggggagagaaagauaccuaccuggagcucggucuggucgaagcgauugguagcagauuugucccgggccgccuggaagcacacauccugccuggcaucggccacuggaucccucaaagcaacccacaggagaugcaccaguauaugugggcuuuccuucaagaucuguuggauuag

SEQ ID NO: 54877 - RNA, 1083 nt, Artificial Sequence
  derived and/or modified sequence
augccagaguuggugguaacugcucuccucgcuccuucaagacuuagccucaaauuacugcgggcauucauguggucccuaguguucagugucgcucucguugccgccgcgguuuacggcuguauagcacugacacacguacucuguaggcccaggagagggugcugcggcaggcguagauccgcaucgccugccugucuuagcgaccccagcuuaggggagcaugguuuuuugaaucucaaauccucuggacuccggcugcacuacguauccgcuggacgcgggaauggaccucugauguuguuuuuacauggcuucccugagaauugguucuccuggcgguaucagcuucgggaauuccagucccgguuccacguagucgccguggauuuaaggggauacgggcccagcgaugccccuagagacgucgauuguuauaccauugaccugcugcucguugacauaaaagacgugauucugggucucggcuauucaaaguguauacucgucgcccaugauuggggggcucuccuggccuggcauuucucaaucuacuacccaucucuuguugaaagaauggucguugucagcggcgcuccaaugucagucuaccaagauuauucgcuccaccauauaagccaguucuucagaucccacuacauguuccuguuucagcuacccuggcucccugagaagcugcucaguaugucugacuuucagauuuugaagacaacccucacccaucgcaaaacgggcauccccugcuugacacccucugagcucgaagccuuccucuauaauuucucucagcccgguggacuaaccgguccccuuaauuacuaccgcaacuuguuucgcaauuuuccgcucgagccccaagaacuaacuacucccacccugcuauuguggggugaaaaggauacuuacuuagagcuuggguugguugaggcgauaggcagcagauucgugccugguagacuggaagcccauauccugccuggaaucggucauuggauuccccagucaaauccacaagaaaugcaccaguauaugugggccuuucuccaggaucugcucgacuag

SEQ ID NO: 54878 - protein, 630 aa, Artificial Sequence
  derived and/or modified sequence
MAAKTPSSEESGLPKLPVPPLQQTLATYLQCMRHLVSEEQFRKSQAIVQQFGAPGGLGETLQQKLLERQEKTANWVSEYWLNDMYLNNRLALPVNSSPAVIFARQHFPGTDDQLRFAASLISGVLSYKALLDSHSIPTDCAKGQLSGQPLCMKQYYGLFSSYRLPGHTQDTLVAQNSSIMPEPEHVIVACCNQFFVLDVVINFRRLSEGDLFTQLRKIVKMASNEDERLPPIGLLTSDGRSEWAEARTVLVKDSTNRDSLDMIERCICLVCLDAPGGVELSDTHRALQLLHGGGYSKNGANRWYDKSLQFVVGRDGTCGVVCEHSPFDGIVLVQCTEHLLKHVTQSSRKLIRADSVSELPAPRRLRWKCSPEIQGHLASSAEKLQRIVKNLDFIVYKFDNYGKTFIKKQKCSPDAFIQVALQLAFYRLHRRLVPTYESASIRRFQEGRVDNIRSATPEALAFVRAVTDHKAAVPASEKLLLLKDAIRAQTAYTVMAITGMAIDNHLLALRELARAMCKELPEMFMDETYLMSNRFVLSTSQVPTTTEMFCCYGPVVPNGYGACYNPQPETILFCISSFHSCKETSSSKFAKAVEESLIDMRDLCSLLPPTESKPLATKEKATRPSQGHQP

SEQ ID NO: 54879 - protein, 545 aa, Artificial Sequence
  derived and/or modified sequence
MAAKTPSSEESGLPKLPVPPLQQTLATYLQCMRHLVSEEQFRKSQAIVQQFGAPGGLGETLQQKLLERQEKTANWVSEYWLNDMYLNNRLALPVNSSPAVIFARQHFPGTDDQLRFAASLISGVLSYKALLDSHSIPTDCAKGQLSGQPLCMKQYYGLFSSYRLPGHTQDTLVAQNSSIMPEPEHVIVACCNQFFVLDVVINFRRLSEGDLFTQLRKIVKMASNEDERLPPIGLLTSDGRSEWAEARTVLVKDSTNRDSLDMIERCICLVCLDAPGGVELSDTHRALQLLHGGGYSKNGANRWYDKSLQFVVGRDGTCGVVCEHSPFDGIVLVQCTEHLLKHVTQSSRKLIRADSVSELPAPRRLRWKCSPEIQGHLASSAEKLQRIVKNLDFIVYKFDNYGKTFIKKQKCSPDAFIQVALQLAFYRLHRRLVPTYESASIRRFQEGRVDNIRSATPEALAFVRAVTDHKAAVPASEKLLLLKDAIRAQTAYTVMAITGMAIDNHLLALRELARAMCKELPEMFMDETYLMSNRFVLSTSQLCWP

SEQ ID NO: 54880 - protein, 524 aa, Artificial Sequence
  derived and/or modified sequence
MPTVEELYRNYGILADATEQVGQHKDAYQVILDGVKGGTKEKRLAAQFIPKFFKHFPELADSAINAQLDLCEDEDVSIRRQAIKELPQFATGENLPRVADILTQLLQTDDSAEFNLVNNALLSIFKMDAKGTLGGLFSQILQGEDIVRERAIKFLSTKLKTLPDEVLTKEVEELILTESKKVLEDVTGEEFVLFMKILSGLKSLQTVSGRQQLVELVAEQADLEQTFNPSDPDCVDRLLQCTRQAVPLFSKNVHSTRFVTYFCEQVLPNLGTLTTPVEGLDIQLEVLKLLAEMSSFCGDMEKLETNLRKLFDKLLEYMPLPPEEAENGENAGNEEPKLQFSYVECLLYSFHQLGRKLPDFLTAKLNAEKLKDFKIRLQYFARGLQVYIRQLRLALQGKTGEALKTEENKIKVVALKITNNINVLIKDLFHIPPSYKSTVTLSWKPVQKVEIGQKRASEDTTSGSPPKKSSAGPKRDARQIYNPPSGKYSSNLGNFNYEQRGAFRGSRGGRGWGTRGNRSRGRLY

SEQ ID NO: 54881 - protein, 510 aa, Artificial Sequence
  derived and/or modified sequence
MPTVEELYRNYGILADATEQVGQHKDAYQVILDGVKGGTKEKRLAAQFIPKFFKHFPELADSAINAQLDLCEDEDVSIRRQAIKELPQFATGENLPRVADILTQLLQTDDSAEFNLVNNALLSIFKMDAKGTLGGLFSQILQGEDIVRERAIKFLSTKLKTLPDEVLTKEVEELILTESKKVLEDVTGEEFVLFMKILSGLKSLQTVSGRQQLVELVAEQADLEQTFNPSDPDCVDRLLQCTRQAVPLFSKNVHSTRFVTYFCEQVLPNLGTLTTPVEGLDIQLEVLKLLAEMSSFCGDMEKLETNLRKLFDKLLEYMPLPPEEAENGENAGNEEPKLQFSYVECLLYSFHQLGRKLPDFLTAKLNAEKLKDFKIRLQYFARGLQVYIRQLRLALQGKTGEALKTEENKIKVVALKITNNINVLIKDLFHIPPSYKSTVTLSWKPVQKVEIGQKRASEDTTSGSPPKKSSAGPKRDARQIYNPPSGKYSSNLGNFNYGERFRLGTRNMRD

SEQ ID NO: 54882 - DNA, 1575 bp, Artificial Sequence
  derived and/or modified sequence
atgcccacggtggaggagctttatcgtaactacggtattctggctgatgctacagagcaggttggtcagcataaggatgcataccaggttatcctggacggggtgaagggtggaactaaggagaagaggctcgctgcccaattcattcccaaattcttcaagcatttcccggaattagctgactccgctataaatgctcaacttgacttgtgtgaagatgaggatgtctcaattcgaagacaggccatcaaggagctaccccagtttgctacgggcgagaatctaccgcgcgtcgctgacatcctgactcagcttcttcaaactgacgactccgcagaatttaacctggttaacaatgctttactctccattttcaaaatggatgccaaaggtactctgggggggctctttagtcagatcctgcagggcgaggatatagtgcgcgagcgggcaattaagttcctctcgactaaactgaaaacactgccagatgaggtgctgaccaaagaggtcgaggaactcattctgacggaatcaaaaaaggtgcttgaagatgtgactggagaagaatttgttctttttatgaaaatactgtcgggtttgaaaagccttcagacagtgtcagggaggcagcaactggtggagctggtagcagagcaagctgacctagagcagacatttaacccctccgacccagactgcgtggatcggctgttacagtgtactagacaggcagtgccgctgttttctaagaacgttcacagcacgcgctttgttacttacttctgcgagcaagtcctccctaatttgggaactctcactacacccgtagaagggttagacattcagctagaagttcttaagttgcttgctgagatgtcaagtttttgcggtgatatggagaaactggagacaaacctgagaaagctctttgataagttactggagtatatgcccctgcccccagaagaagcggaaaacggcgagaatgccgggaacgaagagcctaagctacagtttagctacgtggaatgtcttctttactctttccaccaactcggtaggaagctccccgatttccttacagccaaactaaacgccgagaaactcaaggatttcaaaattagactgcagtatttcgctcgtgggcttcaagtgtacatcaggcagttacggctggccctgcaggggaaaacaggcgaagcgctcaagactgaggagaataagattaaagtggtagcactgaaaatcaccaataatatcaatgtcctgatcaaagaccttttccacattccaccctcatacaagtctacagtgacgctcagttggaagcctgttcagaaggttgaaatcgggcagaagcgcgcttcagaggatacaacctcaggctcacctcctaagaagtcttccgcaggacctaagcgcgatgccaggcagatctacaatccaccgtctgggaagtactcgtcgaacctcggcaatttcaattacgagcaacggggggcgttccgaggatcgcggggtggcagaggttggggaaccagaggtaaccgatcacgggggcgcctgtattag

SEQ ID NO: 54883 - DNA, 1533 bp, Artificial Sequence
  derived and/or modified sequence
atgccaaccgtggaggaactgtaccgaaattacgggattctggccgatgccacagagcaggtgggtcagcataaggatgcctaccaggttatcctggatggggtgaagggaggaactaaagaaaagcgtctcgcagcccaatttatccctaagttttttaagcacttcccagaactagctgactctgccataaatgcccagttggacctctgtgaggacgaggacgtttcaatccgccgccaggccatcaaagagctgcctcagtttgccaccggagagaacctgccccgggtggctgacatcttgactcagctccttcagacagacgattctgccgagttcaacctggtgaataacgcgcttctctctattttcaagatggacgctaaaggtacccttggggggctctttagccaaattttgcagggcgaggacattgtccgggaaagggcgattaagttcctgtccaccaaacttaagacgcttccggacgaggtgctcacaaaagaagtggaggagctgatcctgacggagtcaaagaaagtgctggaggatgtgactggcgaagagttcgtcttattcatgaaaattttatccgggcttaaaagccttcagacagtcagcggtcgccagcagctggtggaactagttgctgaacaagccgacctagagcagacttttaatcctagcgatcctgactgtgtggaccggctactgcagtgtacgcgtcaggctgtacccctttttagtaagaacgtccactcgacccgctttgtgacctacttttgcgagcaggtgcttcccaacctaggcactctgaccacccccgtggaaggactggatatccagttggaggtcctgaagttgctagctgagatgtcctccttctgcggagacatggagaaactggaaaccaacttgcgaaagctctttgataagctcctggagtatatgcctctgcctcctgaggaggccgagaatggagagaacgcaggcaacgaagagccaaagctgcaattcagctatgtcgaatgtctgctctatagcttccaccaactgggacgcaaactgcccgatttcctcacagctaaactgaacgccgagaagctcaaagatttcaaaattcggctgcagtacttcgcccgcggactccaggtctatatcagacagctcaggctggccctgcaaggaaagactggtgaggctctcaagaccgaggagaacaagatcaaggtcgtggccctgaaaatcacaaacaatattaatgtgctaattaaggacctgttccacatcccacctagctataagtccactgtgactctgtcctggaagcctgtgcagaaggtcgagataggacagaaacgggcctccgaagacacaaccagtggatcacctcccaaaaaatccagcgctggcccaaaaagagacgcaaggcagatctataatccaccctccggaaaatacagttcaaatctgggcaacttcaactacggagagcgattccgtctgggtactaggaacatgagagattag

SEQ ID NO: 54884 - DNA, 1575 bp, Artificial Sequence
  derived and/or modified sequence
atgcccaccgtggaggagctgtacagaaattatggcatcctggctgatgccacagagcaggtgggccagcacaaggatgcctaccaggtgatcctggatggagtgaagggcggcaccaaggagaagaggctggccgcccagttcatccccaagttcttcaagcacttccctgagctggccgacagcgccatcaatgcccagctggacctgtgtgaagatgaagatgtgtccatccggcggcaggccatcaaggagctgccccagtttgccactggagagaacctgccccgggtggccgacatcctgacccagctgctgcagacagatgattctgctgagttcaacctggtgaacaatgccctgctgagcatcttcaagatggatgccaagggcaccctgggcggcctcttcagccagatcctgcagggcgaggacatcgtgcgggagcgggccatcaagttcctgagcaccaagctgaagaccctgcctgatgaggtgctgaccaaggaggtggaggagctgatcctgacagagagcaagaaggtgctggaggatgtgactggagaggagtttgtgctcttcatgaagatcctgagcggcctgaagagcctgcagacagtgtctggccggcagcagctggtggagctggtggccgagcaggccgacctggagcagaccttcaaccccagcgaccctgactgtgtggaccggctgctgcagtgcacccggcaggccgtgcccctcttcagcaagaatgtgcacagcaccaggtttgtgacctacttctgtgagcaggtgctgcccaacctgggcaccctgaccacccctgtggagggcctggacatccagctggaggtgctgaagctgctggccgagatgagcagcttctgtggggacatggagaagctggagaccaacctgaggaagctgtttgacaagctgctggagtacatgcccctgcccccagaggaggccgagaatggagaaaatgctggaaatgaggagcccaagctgcagttctcctatgtggagtgcctgctgtacagcttccaccagctgggcaggaagctgcctgacttcctgacagccaagctgaatgctgagaagctgaaggacttcaagatccggctgcagtactttgcccggggcctgcaggtgtacatccggcagctgcggctggccctgcagggcaagacaggagaggccctgaagacagaggagaacaagatcaaggtggtggccctgaagatcaccaacaacatcaacgtgctgatcaaggacctcttccacatcccccccagctacaagagcacagtgaccctgtcctggaagcctgtgcagaaggtggagatcggccagaagagggccagcgaggacaccaccagcggcagcccccccaagaagagcagcgctggccccaagagagatgcccggcagatctacaaccccccatctgggaagtacagcagcaacctgggcaacttcaactatgagcagagaggagccttccggggcagccggggcggccggggctggggcacccggggcaacagaagccggggccgcctgtactag

SEQ ID NO: 54885 - DNA, 1533 bp, Artificial Sequence
  derived and/or modified sequence
atgcccaccgtggaggagctgtacagaaattatggcatcctggctgatgccacagagcaggtgggccagcacaaggatgcctaccaggtgatcctggatggagtgaagggcggcaccaaggagaagaggctggccgcccagttcatccccaagttcttcaagcacttccctgagctggccgacagcgccatcaatgcccagctggacctgtgtgaagatgaagatgtgtccatccggcggcaggccatcaaggagctgccccagtttgccactggagagaacctgccccgggtggccgacatcctgacccagctgctgcagacagatgattctgctgagttcaacctggtgaacaatgccctgctgagcatcttcaagatggatgccaagggcaccctgggcggcctcttcagccagatcctgcagggcgaggacatcgtgcgggagcgggccatcaagttcctgagcaccaagctgaagaccctgcctgatgaggtgctgaccaaggaggtggaggagctgatcctgacagagagcaagaaggtgctggaggatgtgactggagaggagtttgtgctcttcatgaagatcctgagcggcctgaagagcctgcagacagtgtctggccggcagcagctggtggagctggtggccgagcaggccgacctggagcagaccttcaaccccagcgaccctgactgtgtggaccggctgctgcagtgcacccggcaggccgtgcccctcttcagcaagaatgtgcacagcaccaggtttgtgacctacttctgtgagcaggtgctgcccaacctgggcaccctgaccacccctgtggagggcctggacatccagctggaggtgctgaagctgctggccgagatgagcagcttctgtggggacatggagaagctggagaccaacctgaggaagctgtttgacaagctgctggagtacatgcccctgcccccagaggaggccgagaatggagaaaatgctggaaatgaggagcccaagctgcagttctcctatgtggagtgcctgctgtacagcttccaccagctgggcaggaagctgcctgacttcctgacagccaagctgaatgctgagaagctgaaggacttcaagatccggctgcagtactttgcccggggcctgcaggtgtacatccggcagctgcggctggccctgcagggcaagacaggagaggccctgaagacagaggagaacaagatcaaggtggtggccctgaagatcaccaacaacatcaacgtgctgatcaaggacctcttccacatcccccccagctacaagagcacagtgaccctgtcctggaagcctgtgcagaaggtggagatcggccagaagagggccagcgaggacaccaccagcggcagcccccccaagaagagcagcgctggccccaagagagatgcccggcagatctacaaccccccatctgggaagtacagcagcaacctgggcaacttcaactatggagagcgcttccggctgggcaccaggaacatgagggactag

SEQ ID NO: 54886 - DNA, 1575 bp, Artificial Sequence
  derived and/or modified sequence
atgcccaccgtggaggagctgtaccggaactacggcatcctggccgacgcaactgagcaggtgggccagcacaaagacgcgtatcaggttattctagacggtgtcaaggggggcactaaggagaaaaggttggcagcacaatttataccaaagttctttaagcacttcccagagctggcggactctgccattaatgcgcagctcgatctctgtgaggacgaggatgtatccattagacgtcaagccataaaggaacttccacagtttgcaactggggaaaatctgcctcgcgttgccgatatcttgactcaactgctgcagacagacgactctgctgaatttaaccttgttaacaacgctctcctttcaatttttaaaatggacgcgaaaggtacactaggcggtttatttagccaaatcttgcagggagaggatattgtccgggagagagcaattaaatttctgagcaccaaacttaagacattgcccgacgaagtgctgacaaaggaagtggaggagcttattttgaccgagtctaaaaaggtgcttgaggatgtcacaggcgaggaattcgttctgttcatgaaaatcctgtctggattgaagtccttgcaaactgtatcaggtcggcaacagctggtcgagctagtcgctgaacaggctgatctggaacagacattcaacccctccgatcccgattgcgtggacaggctcctgcagtgtacacgtcaagctgtgcctttgtttagtaagaacgtccactccacgaggtttgtgacctacttttgcgagcaggtgctgcccaacctcgggactttgacgacccctgttgagggcctcgatatccaattggaagtccttaaactgctcgctgagatgtccagcttttgcggtgacatggagaagttggaaactaacctgcgcaagcttttcgacaaacttctggaatacatgccactgccccccgaggaagcggagaacggtgagaacgccggcaatgaagaacctaaactccaattctcgtatgtagaatgcctgctctactccttccaccaactgggaaggaagttaccagattttttgaccgctaaactcaacgccgagaagctgaaggacttcaagattagactccagtattttgcccgaggcctgcaggtgtatatccgtcagctgcggctggccctgcaggggaaaaccggcgaggcccttaaaacagaagagaacaagatcaaggtagttgccctgaagatcacaaacaatattaatgtgctcatcaaagatctgtttcacataccacccagttacaagtctaccgttaccctttcttggaagccggtacagaaggtggaaatcggacagaagagagccagcgaagatacaacctcaggatcaccccccaagaaatcgagcgctggtccaaaaagagatgctcgacagatttacaatccaccatccggcaagtatagttccaatttggggaacttcaattacgagcagagaggggcttttcggggaagcaggggggggcggggatggggcacacggggtaaccgatccagaggccggctttattag

SEQ ID NO: 54887 - DNA, 1533 bp, Artificial Sequence
  derived and/or modified sequence
atgcccaccgtggaggagctgtaccggaactacggcatcctggccgacgcaaccgaacaagtcgggcagcacaaggatgcatatcaagtgatcctcgatggggttaaagggggaaccaaggaaaaacgccttgccgctcaatttatacccaagttcttcaaacattttcctgaactagcagacagcgccattaatgctcagctggatctatgcgaggatgaagacgtatctatccggcgtcaggctatcaaggagcttccccagttcgcaaccggcgaaaatttgcctcgggtcgccgatatcttgacacaattgctgcagacggacgactctgcagaattcaatctggtgaataatgccctgctgtccatcttcaagatggacgcgaaagggacattaggagggctcttctctcagattctgcagggcgaggatattgttagggagcgggctataaagtttctctcaacaaaactcaaaaccctgcctgacgaagttttgaccaaagaagtggaggaattaattctgactgagagcaaaaaggttcttgaggacgtgacgggtgaggagttcgttctgttcatgaagatactctccggcctgaagagcctccagaccgtttctggaaggcagcagctggttgagttggtcgccgaacaggcggacctcgagcagacttttaacccatcagaccccgactgcgtagacaggctcctgcagtgtacacgacaggctgtgcccttgttcagcaaaaatgttcacagcacaagatttgtgacctatttctgcgagcaggtcctcccaaacctagggactctgacaaccccagtcgaaggattagatattcagctggaagttctcaagctactggcggaaatgagttctttttgtggggacatggaaaagctggaaaccaaccttcggaaactgttcgacaagctgctggaatatatgcctcttcctcctgaagaagctgaaaacggggaaaacgccggcaatgaggagcccaaacttcaattttcctacgtggaatgtctgctttatagcttccatcaactgggcaggaaacttcctgattttctgactgcaaaactcaacgctgagaagttgaaagacttcaaaatcaggttacagtattttgccagagggcttcaggtgtacattagacaactcagattagccctgcaaggtaagacaggcgaagccctgaaaaccgaggagaacaagattaaggtggttgccttgaaaatcacaaataatatcaacgtgctcatcaaggacctgtttcatatccccccttcttataagagtactgtcacgctgagttggaagccagttcagaaggttgagattggccaaaagagggctagcgaggacactacatcaggctccccccctaaaaaaagttccgcgggccctaagagagacgccagacagatatacaatccaccctctggcaaatactctagcaatctgggaaactttaactacggcgaacgcttcaggctcggcacgagaaatatgcgtgactag

SEQ ID NO: 54888 - DNA, 1575 bp, Artificial Sequence
  derived and/or modified sequence
atgcctaccgtggaagaattgtaccggaactatgggatcctggccgatgctactgaacaggtaggtcagcataaggatgcataccaggtcattcttgacggcgttaaggggggaacaaaagagaagaggctggcggcacagttcattccaaagttcttcaagcatttccccgagctcgccgattccgcaatcaatgcacagttagatctctgtgaagacgaagacgtcagtattcgtcgccaagccatcaaggagctgcctcagttcgctactggggaaaatttgccgagggtggcagatatactaacacagctgctgcaaaccgatgactcagccgaattcaacctggtgaacaatgctctgctctccattttcaagatggacgcgaaaggaaccctgggcggactttttagccagatcctgcagggagaagacatcgtgcgcgaacgggcaattaagttcctgagtaccaagctgaaaactctcccagatgaagtactgactaaggaggtcgaagagctcattctcaccgagtccaagaaagtgctggaggatgtcaccggcgaggagtttgtcctcttcatgaagatcctgtctggattgaagtccctgcagactgtttcaggacgacagcagctggtggagttggtggccgagcaggccgacctcgagcaaaccttcaaccctagtgaccctgactgcgtggaccgccttctccagtgcactcgccaggcagtgccactttttagcaagaacgtccattccactcgcttcgtcacttatttttgtgaacaggtgctgcctaatttgggcacccttaccaccccagtcgagggcttggatattcagctcgaagtcctgaagctgctggcagaaatgtcaagcttttgtggagacatggaaaagctggaaaccaacctccggaagctgtttgataagctgttggagtacatgccccttcctcctgaagaagcagaaaacggtgagaacgccggaaatgaggagccaaagctgcagtttagctatgtggagtgtttattatatagctttcatcaacttggcagaaagctgcccgactttctcacagctaaactgaacgctgagaaactgaaagattttaagatacggcttcagtactttgccagaggcctgcaggtgtacattcggcaactgcgtctcgctctgcaggggaagactggcgaggcactgaaaactgaagaaaataagataaaagttgtggcacttaagattacaaacaacatcaacgtgctcattaaagacctgtttcatatccccccaagctacaagagcaccgttacgctgtcctggaagcccgtccagaaagttgagataggccagaagcgtgcctcagaagacaccacatcgggatcccctcccaagaagtcaagcgccggacccaagagggatgcaagacagatttataaccctccctccgggaaatatagctccaatctgggtaacttcaactacgaacagcgaggagccttcagaggcagccgcggaggtcgtggctggggtacgagaggaaataggtctagagggagactgtactag

SEQ ID NO: 54889 - DNA, 1533 bp, Artificial Sequence
  derived and/or modified sequence
atgccaacagtcgaagagctgtatcgaaactacggcatactggccgatgcaacagaacaggtggggcaacacaaagacgcatatcaggtcatcttggatggagtgaagggcggaactaaggagaagcgcttggccgcacaattcattcctaagttcttcaagcactttcctgaattagccgatagtgccatcaatgcccagcttgacctgtgtgaagatgaagatgtgtctattcgccgtcaggctattaaggaattgccacaatttgccaccggtgaaaatcttcctagggtggccgatatactgacacagctcctccagaccgatgattctgctgaatttaacctggtgaataacgccctgttgtcgatatttaaaatggatgcaaaagggacactcggcggactcttctcccagatcttgcaaggggaggacatcgttcgcgagcgtgctattaagttcttgtccaccaagctcaagaccctaccagacgaggttcttactaaggaggtggaggaattgattctgacagagtcaaaaaaagtcctggaagatgtgaccggagaggaattcgttctctttatgaagatcctctccggcctcaaaagtcttcagaccgtgtccgggagacagcagctcgtggaactggttgctgaacaggcagacctggaacaaaccttcaatccatccgatcccgattgcgtcgaccgtctgctgcagtgcaccagacaggccgtgccactcttcagcaaaaacgtccactcgactcgatttgtaacatatttttgtgagcaggtgttgccgaatctcggaactctcacaacccctgtggagggccttgatatccagctcgaagtgttaaaactgctggccgagatgtctagcttctgcggggacatggaaaaacttgagacgaatctcaggaaattgtttgacaaacttttagaatatatgcctctgccacctgaggaagctgaaaacggagagaatgcagggaacgaagagccgaaactccagttctcttacgtggagtgcctgctgtatagcttccaccaattgggcagaaaattgccagactttctcacagctaaacttaacgccgagaagttgaaggacttcaaaatcaggctgcagtattttgcccgagggctgcaggtgtatatccggcagctgagacttgccctccaggggaagactggcgaggccctgaagacagaagagaataaaatcaaggtcgttgctctaaagattacgaataacatcaatgtcctaattaaggacctctttcatataccgcctagttataagtccacagtcaccctgtcctggaagcccgtgcagaaggtcgagatcggccaaaaacgggcaagcgaggatactaccagcggctctccccctaaaaagagcagcgctggacccaaacgcgatgctaggcagatatacaaccctcccagtggaaagtactctagcaacttgggcaatttcaattacggagagcgctttaggttgggaacaagaaacatgcgcgattag

SEQ ID NO: 54890 - DNA, 1868 bp, Artificial Sequence
  derived and/or modified sequence
gtgcgcggtgactggcggctgcactggcggcagctggaggtgtaatagtgcgggtagtgggtttggagaagttccgaggcggcggtggcgccggtcaggacaaggatagcggaaccgggccctgggcttgtcgctcaccatgccgacagtagaggagctttaccgcaattatggcatcctggccgatgccacggagcaagtgggccagcataaagatgcctatcaagtgatattggatggtgtgaaaggtggtactaaggaaaagcgattagcagctcaatttattccgaaattctttaagcattttccagaattggctgattctgctatcaatgcacagttagacctctgtgaggatgaagatgtatctattcgacgtcaagcaattaaagaactgcctcaatttgccactggagaaaatcttcctcgagtggcagatatactaacgcaacttttgcagacagatgactctgcagaatttaacctagtgaacaatgccctattaagtatatttaaaatggatgcaaaagggactttaggtgggttgttcagccaaatacttcaaggagaggacattgttagagaacgagcaattaaattcctttctacaaaacttaagactttaccagatgaagtcttaacaaaggaagtggaagagcttatactaactgaatccaaaaaggtcctagaagatgtgactggtgaagaatttgttctatttatgaagatactgtctgggttaaaaagcttacagacagtgagtggaagacagcaacttgtagagttggtggctgaacaggccgacctagaacagaccttcaatccctcggatcctgactgtgtggacaggctcttacagtgcactcggcaggcagtacccctcttctctaaaaatgtccattccacaaggtttgtgacatatttctgtgagcaggttctccctaacctcggtaccttgactaccccagtggaaggtcttgatatacagttggaggtattgaaattgttggcggagatgagttcattttgtggtgacatggaaaaactagaaacaaatttaaggaaactatttgataagttattggaatacatgcccctccctccagaagaggcagaaaatggagagaatgctggtaatgaagaacccaagctacagttcagttatgtggaatgtttgttgtacagttttcaccagttgggccgaaaacttccagatttcttaacagccaaactgaatgcagaaaagctcaaagatttcaaaatcaggctgcagtactttgcacggggcctgcaagtttatatcagacaacttcgcttagctctccagggtaaaacgggtgaggccttaaaaacagaagagaacaagattaaagtcgttgcattgaaaataacaaacaatatcaatgttttaatcaaggatctcttccacattcctccttcttataagagcacagtaacactatcctggaaacctgtacaaaaggttgagattgggcaaaagagagccagtgaagatacaacttcaggttcaccacccaagaaatcttcagcaggaccaaaaagagatgccaggcagatttataaccctcccagtgggaaatatagcagcaatttgggcaactttaattatgagcagagaggagccttcaggggaagtagaggtggccgaggttggggcacacgaggaaatcgtagtcggggaagactctactgaataagacatcagcattcttcagcattgtcatgagcttaatatacttaaattctactactcattggattgccggggatgtccctttaaacagactgctgccttcagctaaaaacttaatgttctttatacctttgtatgtatgacctacttttgt

SEQ ID NO: 54891 - DNA, 1760 bp, Artificial Sequence
  derived and/or modified sequence
agcggaaccgggccctgggcttgtcgctcaccatgccgacagtagaggagctttaccgcaattatggcatcctggccgatgccacggagcaagtgggccagcataaagatgcctatcaagtgatattggatggtgtgaaaggtggtactaaggaaaagcgattagcagctcaatttattccgaaattctttaagcattttccagaattggctgattctgctatcaatgcacagttagacctctgtgaggatgaagatgtatctattcgacgtcaagcaattaaagaactgcctcaatttgccactggagaaaatcttcctcgagtggcagatatactaacgcaacttttgcagacagatgactctgcagaatttaacctagtgaacaatgccctattaagtatatttaaaatggatgcaaaagggactttaggtgggttgttcagccaaatacttcaaggagaggacattgttagagaacgagcaattaaattcctttctacaaaacttaagactttaccagatgaagtcttaacaaaggaagtggaagagcttatactaactgaatccaaaaaggtcctagaagatgtgactggtgaagaatttgttctatttatgaagatactgtctgggttaaaaagcttacagacagtgagtggaagacagcaacttgtagagttggtggctgaacaggccgacctagaacagaccttcaatccctcggatcctgactgtgtggacaggctcttacagtgcactcggcaggcagtacccctcttctctaaaaatgtccattccacaaggtttgtgacatatttctgtgagcaggttctccctaacctcggtaccttgactaccccagtggaaggtcttgatatacagttggaggtattgaaattgttggcggagatgagttcattttgtggtgacatggaaaaactagaaacaaatttaaggaaactatttgataagttattggaatacatgcccctccctccagaagaggcagaaaatggagagaatgctggtaatgaagaacccaagctacagttcagttatgtggaatgtttgttgtacagttttcaccagttgggccgaaaacttccagatttcttaacagccaaactgaatgcagaaaagctcaaagatttcaaaatcaggctgcagtactttgcacggggcctgcaagtttatatcagacaacttcgcttagctctccagggtaaaacgggtgaggccttaaaaacagaagagaacaagattaaagtcgttgcattgaaaataacaaacaatatcaatgttttaatcaaggatctcttccacattcctccttcttataagagcacagtaacactatcctggaaacctgtacaaaaggttgagattgggcaaaagagagccagtgaagatacaacttcaggttcaccacccaagaaatcttcagcaggaccaaaaagagatgccaggcagatttataaccctcccagtgggaaatatagcagcaatttgggcaactttaattatggtgagcgtttccgtttgggtacaaggaatatgagagattaggcagaaattgtgttatactttattttaattagtaattatatacagtgtcatggttctatccaatgacttttctgaattagcttggagaactagggctgttgaggaaatgatttatcccattcctctctcattcacccttctgggctgactgtattgaacatgcaacattaaacagtaagcacttaaagaaaaata

SEQ ID NO: 54892 - DNA, 1575 bp, Artificial Sequence
  derived and/or modified sequence
atgcccaccgtggaggagctgtacagaaactacggcatcctggccgacgccaccgagcaggtgggccagcacaaggacgcctaccaggtgatcctggacggcgtgaagggcggcaccaaggagaagagactggccgcccagttcatccccaagttcttcaagcacttccccgagctggccgacagcgccatcaacgcccagctggacctgtgcgaggacgaggacgtgagcatcagaagacaggccatcaaggagctgccccagttcgccaccggcgagaacctgcccagagtggccgacatcctgacccagctgctgcagaccgacgacagcgccgagttcaacctggtgaacaacgccctgctgagcatcttcaagatggacgccaagggcaccctgggcggcctgttcagccagatcctgcagggcgaggacatcgtgagagagagagccatcaagttcctgagcaccaagctgaagaccctgcccgacgaggtgctgaccaaggaggtggaggagctgatcctgaccgagagcaagaaggtgctggaggacgtgaccggcgaggagttcgtgctgttcatgaagatcctgagcggcctgaagagcctgcagaccgtgagcggcagacagcagctggtggagctggtggccgagcaggccgacctggagcagaccttcaaccccagcgaccccgactgcgtggacagactgctgcagtgcaccagacaggccgtgcccctgttcagcaagaacgtgcacagcaccagattcgtgacctacttctgcgagcaggtgctgcccaacctgggcaccctgaccacccccgtggagggcctggacatccagctggaggtgctgaagctgctggccgagatgagcagcttctgcggcgacatggagaagctggagaccaacctgagaaagctgttcgacaagctgctggagtacatgcccctgccccccgaggaggccgagaacggcgagaacgccggcaacgaggagcccaagctgcagttcagctacgtggagtgcctgctgtacagcttccaccagctgggcagaaagctgcccgacttcctgaccgccaagctgaacgccgagaagctgaaggacttcaagatcagactgcagtacttcgccagaggcctgcaggtgtacatcagacagctgagactggccctgcagggcaagaccggcgaggccctgaagaccgaggagaacaagatcaaggtggtggccctgaagatcaccaacaacatcaacgtgctgatcaaggacctgttccacatcccccccagctacaagagcaccgtgaccctgagctggaagcccgtgcagaaggtggagatcggccagaagagagccagcgaggacaccaccagcggcagcccccccaagaagagcagcgccggccccaagagagacgccagacagatctacaacccccccagcggcaagtacagcagcaacctgggcaacttcaactacgagcagagaggcgccttcagaggcagcagaggcggcagaggctggggcaccagaggcaacagaagcagaggcagactgtactag

SEQ ID NO: 54893 - DNA, 1533 bp, Artificial Sequence
  derived and/or modified sequence
atgcccaccgtggaggagctgtacagaaactacggcatcctggccgacgccaccgagcaggtgggccagcacaaggacgcctaccaggtgatcctggacggcgtgaagggcggcaccaaggagaagagactggccgcccagttcatccccaagttcttcaagcacttccccgagctggccgacagcgccatcaacgcccagctggacctgtgcgaggacgaggacgtgagcatcagaagacaggccatcaaggagctgccccagttcgccaccggcgagaacctgcccagagtggccgacatcctgacccagctgctgcagaccgacgacagcgccgagttcaacctggtgaacaacgccctgctgagcatcttcaagatggacgccaagggcaccctgggcggcctgttcagccagatcctgcagggcgaggacatcgtgagagagagagccatcaagttcctgagcaccaagctgaagaccctgcccgacgaggtgctgaccaaggaggtggaggagctgatcctgaccgagagcaagaaggtgctggaggacgtgaccggcgaggagttcgtgctgttcatgaagatcctgagcggcctgaagagcctgcagaccgtgagcggcagacagcagctggtggagctggtggccgagcaggccgacctggagcagaccttcaaccccagcgaccccgactgcgtggacagactgctgcagtgcaccagacaggccgtgcccctgttcagcaagaacgtgcacagcaccagattcgtgacctacttctgcgagcaggtgctgcccaacctgggcaccctgaccacccccgtggagggcctggacatccagctggaggtgctgaagctgctggccgagatgagcagcttctgcggcgacatggagaagctggagaccaacctgagaaagctgttcgacaagctgctggagtacatgcccctgccccccgaggaggccgagaacggcgagaacgccggcaacgaggagcccaagctgcagttcagctacgtggagtgcctgctgtacagcttccaccagctgggcagaaagctgcccgacttcctgaccgccaagctgaacgccgagaagctgaaggacttcaagatcagactgcagtacttcgccagaggcctgcaggtgtacatcagacagctgagactggccctgcagggcaagaccggcgaggccctgaagaccgaggagaacaagatcaaggtggtggccctgaagatcaccaacaacatcaacgtgctgatcaaggacctgttccacatcccccccagctacaagagcaccgtgaccctgagctggaagcccgtgcagaaggtggagatcggccagaagagagccagcgaggacaccaccagcggcagcccccccaagaagagcagcgccggccccaagagagacgccagacagatctacaacccccccagcggcaagtacagcagcaacctgggcaacttcaactacggcgagagattcagactgggcaccagaaacatgagagactag

SEQ ID NO: 54894 - protein, 450 aa, Artificial Sequence
  derived and/or modified sequence
MPTVEELYRNYGILADATEQVGQIRRQAIKELPQFATGENLPRVADILTQLLQTDDSAEFNLVNNALLSIFKMDAKGTLGGLFSQILQGEDIVRERAIKFLSTKLKTLPDEVLTKEVEELILTESKKVLEDVTGEEFVLFMKILSGLKSLQTVSGRQQLVELVAEQADLEQTFNPSDPDCVDRLLQCTRQAVPLFSKNVHSTRFVTYFCEQVLPNLGTLTTPVEGLDIQLEVLKLLAEMSSFCGDMEKLETNLRKLFDKLLEYMPLPPEEAENGENAGNEEPKLQFSYVECLLYSFHQLGRKLPDFLTAKLNAEKLKDFKIRLQYFARGLQVYIRQLRLALQGKTGEALKTEENKIKVVALKITNNINVLIKDLFHIPPSYKSTVTLSWKPVQKVEIGQKRASEDTTSGSPPKKSSAGPKRDARQIYNPPSGKYSSNLGNFNYERSLQGK

SEQ ID NO: 54895 - DNA, 1353 bp, Artificial Sequence
  derived and/or modified sequence
atgccaaccgtggaggaactctatagaaattacggaatcctggccgatgccacagagcaggtgggacagatcaggagacaagccataaaagagctgccacagtttgcgacaggggagaatctgcccagggttgctgatatactgacccagttactgcaaactgatgatagcgcggaatttaatttggtcaacaatgccctcctgtctatctttaaaatggatgctaaaggcaccctcggaggactgtttagccagattctacagggagaagatatagtgagggagcgtgccattaagtttctcagcacaaaattaaaaacactcccggatgaagttctaaccaaggaagttgaggaattaatcttgactgagtccaaaaaggttcttgaagatgtaacgggcgaggagttcgtccttttcatgaaaatactttccgggttgaagtccctccagacagtcagtggaagacagcagctggtggagctcgtcgcagaacaggccgatctcgaacagacgtttaacccctctgatccagattgcgtggatcgactgctacagtgcacccgacaggctgtgcctctgttctctaagaatgttcactcaacgagattcgtgacatatttttgcgagcaagtcctgccgaatctcggaactctcacaaccccagtggaaggcctggatatacaactggaggtacttaagctcctggctgagatgagctccttttgcggcgatatggagaagcttgagactaatcttaggaagctttttgataagctgctggaatacatgcctctgcctcccgaggaggctgagaacggagaaaatgcaggcaacgaggaacccaaactgcagtttagctacgttgaatgtttgctgtattcgtttcaccaacttgggaggaagctgccggacttcctgactgccaaactgaacgctgaaaaactcaaagacttcaagattcgcttacagtacttcgctcgcggcctgcaagtgtacattcgccagctgcgcctagccttacaagggaaaacaggggaggctctcaaaaccgaagaaaataaaatcaaagtagtggcactgaagattaccaacaacattaatgttctcattaaagatctctttcacatccccccgtcatataagtccacagtcacgctgtcgtggaaacctgtgcagaaagtcgagatcggccagaaacgagcaagcgaagacactacttctggcagtcctcctaagaagtcttccgctgggcccaagcgggacgctcgtcagatttacaatcctccctctggcaaatactccagcaatctggggaattttaactacgaacgctccctgcagggcaagtag

SEQ ID NO: 54896 - DNA, 1353 bp, Artificial Sequence
  derived and/or modified sequence
atgcccaccgtggaggagctgtacagaaattatggcatcctggctgatgccacagagcaggtgggccagatccggcggcaggccatcaaggagctgccccagtttgccactggagagaacctgccccgggtggccgacatcctgacccagctgctgcagacagatgattctgctgagttcaacctggtgaacaatgccctgctgagcatcttcaagatggatgccaagggcaccctgggcggcctcttcagccagatcctgcagggcgaggacatcgtgcgggagcgggccatcaagttcctgagcaccaagctgaagaccctgcctgatgaggtgctgaccaaggaggtggaggagctgatcctgacagagagcaagaaggtgctggaggatgtgactggagaggagtttgtgctcttcatgaagatcctgagcggcctgaagagcctgcagacagtgtctggccggcagcagctggtggagctggtggccgagcaggccgacctggagcagaccttcaaccccagcgaccctgactgtgtggaccggctgctgcagtgcacccggcaggccgtgcccctcttcagcaagaatgtgcacagcaccaggtttgtgacctacttctgtgagcaggtgctgcccaacctgggcaccctgaccacccctgtggagggcctggacatccagctggaggtgctgaagctgctggccgagatgagcagcttctgtggggacatggagaagctggagaccaacctgaggaagctgtttgacaagctgctggagtacatgcccctgcccccagaggaggccgagaatggagaaaatgctggaaatgaggagcccaagctgcagttctcctatgtggagtgcctgctgtacagcttccaccagctgggcaggaagctgcctgacttcctgacagccaagctgaatgctgagaagctgaaggacttcaagatccggctgcagtactttgcccggggcctgcaggtgtacatccggcagctgcggctggccctgcagggcaagacaggagaggccctgaagacagaggagaacaagatcaaggtggtggccctgaagatcaccaacaacatcaacgtgctgatcaaggacctcttccacatcccccccagctacaagagcacagtgaccctgtcctggaagcctgtgcagaaggtggagatcggccagaagagggccagcgaggacaccaccagcggcagcccccccaagaagagcagcgctggccccaagagagatgcccggcagatctacaaccccccatctgggaagtacagcagcaacctgggcaacttcaactatgaaagaagcctgcagggcaagtag

SEQ ID NO: 54897 - DNA, 1353 bp, Artificial Sequence
  derived and/or modified sequence
atgcccaccgtggaggagctgtaccggaactacggcatcctggccgacgccactgaacaggtggggcagatccgtcgacaagcaattaaagagctgcctcagtttgccacgggagagaatttaccccgtgtggctgacatcctgacccagctgctccagacggatgattctgccgagttcaatttggtgaacaacgcgctcctgagcattttcaagatggacgctaagggtaccttaggaggcttgttttcgcagatcttgcagggtgaagacatcgtgcgggagcgggccatcaagttccttagcacaaagctgaagacgttaccagacgaggtccttacaaaggaagtcgaagaactgatcctcacggagagcaaaaaagtccttgaggatgtaaccggcgaggagttcgtgctctttatgaagattctgtcagggttgaagtccctacaaactgtgtctgggaggcagcaactcgtggagctggtcgctgagcaggctgatctggagcaaaccttcaacccttccgacccggactgcgtagatagattactgcagtgcacacggcaggccgtccccctgtttagcaagaacgtccactcgactcggttcgttacgtatttctgcgagcaggtgctccccaatcttggaacccttacaaccccggttgagggcctggatattcagctcgaagttttgaagctgttggctgagatgagctcattttgtggcgatatggagaagctcgaaactaacctgcgcaaattgtttgacaagttgctcgaatacatgccactgcctccggaggaggccgaaaacggggagaatgctgggaacgaggagcctaaactccaattcagctacgttgagtgtctgctgtattcttttcatcagctggggagaaaactgcctgatttcctgactgccaaactgaacgcggaaaaactcaaggactttaaaatacgtctgcagtacttcgcacgcggtttacaggtatatatccgccaacttaggttggccctccagggaaaaacaggggaggctctcaaaaccgaggaaaataaaattaaggtcgtcgcccttaaaatcactaataatatcaatgtgttaataaaagacctgtttcacattccacccagctacaaatccactgtgacactctcctggaaacccgtgcagaaggtggagattggacagaagcgggctagtgaggacaccacatctggatccccccccaaaaagtcctccgcaggacctaaaagagatgccagacagatctataaccctccaagcggcaaatactccagtaacctcggcaatttcaactacgagagaagtttacagggaaaatag

SEQ ID NO: 54898 - DNA, 1353 bp, Artificial Sequence
  derived and/or modified sequence
atgcctaccgttgaagagctgtaccgcaactacggaattctggctgacgcaaccgaacaggtcggacaaatcaggcggcaggccataaaagaacttccccaattcgctacaggggagaatctgcccagggtggctgacattctcacccagcttttgcaaaccgatgacagcgcggagtttaacttggtgaataacgctttgctgagcatcttcaagatggatgccaaaggtacattgggagggttgttcagccagattctgcagggtgaagatatcgtgcgcgagagggcgattaagtttctctctacaaagttgaagaccctacccgatgaagtgcttaccaaggaggttgaagaactaattctgaccgaaagtaagaaggtgctggaggatgtgactggtgaggaatttgtcctgtttatgaaaatactgtcagggctcaaatcattacagaccgtttctggcagacaacagctggtggagctcgtcgccgaacaagcagaccttgagcagacctttaacccatcggatcctgactgcgttgaccgcttgctgcagtgtacgaggcaggccgtaccccttttcagcaagaacgtgcactcaaccaggtttgtgacttatttctgtgagcaggtgctgcctaatttgggcactctgactactcccgtggaagggctcgatatccagctggaggtgctgaaactgctagccgaaatgtcttccttctgcggtgacatggagaaactagagaccaaccttcgcaagctctttgacaagttactggaatacatgcctctgcctcctgaagaagcagaaaatggggagaacgcaggaaacgaagaacctaagctccagtttagttatgtggagtgcctcctgtacagttttcatcagctgggacgtaaacttcccgattttctgacagctaagcttaacgccgaaaaactcaaggactttaaaatcagattgcagtacttcgcacgtggcctgcaggtctacattagacaactgagactggcgctccaaggcaagacaggcgaggccttgaaaacagaagagaacaaaataaaggtagtggcgctgaaaataacaaataacattaatgttctgataaaggatttgttccacatcccccctagctataaaagcaccgtgacactgtcctggaaacccgttcagaaagtggagatcggtcagaagcgcgctagcgaagatacaacttctggatctcccccaaagaagtcttcagctggccctaagcgggacgcacggcagatatataatccccctagcggtaaatattcttccaatctcggcaatttcaattacgaacgcagcctccaaggaaaatag

SEQ ID NO: 54899 - DNA, 2009 bp, Artificial Sequence
  derived and/or modified sequence
gactggcggctgcactggcggcagctggaggtgtaatagtgcgggtagtgggtttggagaagttccgaggcggcggtggcgccggtcaggacaaggatagcggaaccgggccctgggcttgtcgctcaccatgccgacagtagaggagctttaccgcaattatggcatcctggccgatgccacggagcaagtgggccagattcgacgtcaagcaattaaagaactgcctcaatttgccactggagaaaatcttcctcgagtggcagatatactaacgcaacttttgcagacagatgactctgcagaatttaacctagtgaacaatgccctattaagtatatttaaaatggatgcaaaagggactttaggtgggttgttcagccaaatacttcaaggagaggacattgttagagaacgagcaattaaattcctttctacaaaacttaagactttaccagatgaagtcttaacaaaggaagtggaagagcttatactaactgaatccaaaaaggtcctagaagatgtgactggtgaagaatttgttctatttatgaagatactgtctgggttaaaaagcttacagacagtgagtggaagacagcaacttgtagagttggtggctgaacaggccgacctagaacagaccttcaatccctcggatcctgactgtgtggacaggctcttacagtgcactcggcaggcagtacccctcttctctaaaaatgtccattccacaaggtttgtgacatatttctgtgagcaggttctccctaacctcggtaccttgactaccccagtggaaggtcttgatatacagttggaggtattgaaattgttggcggagatgagttcattttgtggtgacatggaaaaactagaaacaaatttaaggaaactatttgataagttattggaatacatgcccctccctccagaagaggcagaaaatggagagaatgctggtaatgaagaacccaagctacagttcagttatgtggaatgtttgttgtacagttttcaccagttgggccgaaaacttccagatttcttaacagccaaactgaatgcagaaaagctcaaagatttcaaaatcaggctgcagtactttgcacggggcctgcaagtttatatcagacaacttcgcttagctctccagggtaaaacgggtgaggccttaaaaacagaagagaacaagattaaagtcgttgcattgaaaataacaaacaatatcaatgttttaatcaaggatctcttccacattcctccttcttataagagcacagtaacactatcctggaaacctgtacaaaaggttgagattgggcaaaagagagccagtgaagatacaacttcaggttcaccacccaagaaatcttcagcaggaccaaaaagagatgccaggcagatttataaccctcccagtgggaaatatagcagcaatttgggcaactttaattatgagaggagccttcaggggaagtagaggtggccgaggttggggcacacgaggaaatcgtagtcggggaagactctactgaataagacatcagcattcttcagcattgtcatgagcttaatatacttaaattctactactcattggattgccggggatgtccctttaaacagactgctgccttcagctaaaaacttaatgttctttatacctttgtatgtatgacctacttttgtaacagaccatggttgtgtccaaggtaaaaccacagtgatatttttggatgctttgtctgcaatcttgacttgtttttgcagtatcattattcagacttcaaattgtgaatcttttaaacatcttgataatttgttgttgagagctgttcattctaaaatgtaatgaaattcagtctagttctgctgataaagatcatcagttttgaaaggttactgattttcctcttccctcttagttttttacccaatatatggagaagagtaatggtcaatcttaacattttgttttaattgtttaataaagctgctgggcagtg

SEQ ID NO: 54900 - DNA, 1353 bp, Artificial Sequence
  derived and/or modified sequence
atgcccaccgtggaggagctgtacagaaactacggcatcctggccgacgccaccgagcaggtgggccagatcagaagacaggccatcaaggagctgccccagttcgccaccggcgagaacctgcccagagtggccgacatcctgacccagctgctgcagaccgacgacagcgccgagttcaacctggtgaacaacgccctgctgagcatcttcaagatggacgccaagggcaccctgggcggcctgttcagccagatcctgcagggcgaggacatcgtgagagagagagccatcaagttcctgagcaccaagctgaagaccctgcccgacgaggtgctgaccaaggaggtggaggagctgatcctgaccgagagcaagaaggtgctggaggacgtgaccggcgaggagttcgtgctgttcatgaagatcctgagcggcctgaagagcctgcagaccgtgagcggcagacagcagctggtggagctggtggccgagcaggccgacctggagcagaccttcaaccccagcgaccccgactgcgtggacagactgctgcagtgcaccagacaggccgtgcccctgttcagcaagaacgtgcacagcaccagattcgtgacctacttctgcgagcaggtgctgcccaacctgggcaccctgaccacccccgtggagggcctggacatccagctggaggtgctgaagctgctggccgagatgagcagcttctgcggcgacatggagaagctggagaccaacctgagaaagctgttcgacaagctgctggagtacatgcccctgccccccgaggaggccgagaacggcgagaacgccggcaacgaggagcccaagctgcagttcagctacgtggagtgcctgctgtacagcttccaccagctgggcagaaagctgcccgacttcctgaccgccaagctgaacgccgagaagctgaaggacttcaagatcagactgcagtacttcgccagaggcctgcaggtgtacatcagacagctgagactggccctgcagggcaagaccggcgaggccctgaagaccgaggagaacaagatcaaggtggtggccctgaagatcaccaacaacatcaacgtgctgatcaaggacctgttccacatcccccccagctacaagagcaccgtgaccctgagctggaagcccgtgcagaaggtggagatcggccagaagagagccagcgaggacaccaccagcggcagcccccccaagaagagcagcgccggccccaagagagacgccagacagatctacaacccccccagcggcaagtacagcagcaacctgggcaacttcaactacgagagaagcctgcagggcaagtag

SEQ ID NO: 54901 - protein, 666 aa, Artificial Sequence
  derived and/or modified sequence
MWPECRDEALSTVGPHLCIPAPGLTKTPILEKVPRKMAAKTPSSEESGLPKLPVPPLQQTLATYLQCMRHLVSEEQFRKSQAIVQQFGAPGGLGETLQQKLLERQEKTANWVSEYWLNDMYLNNRLALPVNSSPAVIFARQHFPGTDDQLRFAASLISGVLSYKALLDSHSIPTDCAKGQLSGQPLCMKQYYGLFSSYRLPGHTQDTLVAQNSSIMPEPEHVIVACCNQFFVLDVVINFRRLSEGDLFTQLRKIVKMASNEDERLPPIGLLTSDGRSEWAEARTVLVKDSTNRDSLDMIERCICLVCLDAPGGVELSDTHRALQLLHGGGYSKNGANRWYDKSLQFVVGRDGTCGVVCEHSPFDGIVLVQCTEHLLKHVTQSSRKLIRADSVSELPAPRRLRWKCSPEIQGHLASSAEKLQRIVKNLDFIVYKFDNYGKTFIKKQKCSPDAFIQVALQLAFYRLHRRLVPTYESASIRRFQEGRVDNIRSATPEALAFVRAVTDHKAAVPASEKLLLLKDAIRAQTAYTVMAITGMAIDNHLLALRELARAMCKELPEMFMDETYLMSNRFVLSTSQVPTTTEMFCCYGPVVPNGYGACYNPQPETILFCISSFHSCKETSSSKFAKAVEESLIDMRDLCSLLPPTESKPLATKEKATRPSQGHQP

SEQ ID NO: 54902 - DNA, 1893 bp, Artificial Sequence
  derived and/or modified sequence
atggcagctaaaacaccatcctcagaggagtccggtttaccaaaactgccagtgccgccacttcagcaaacactggccacttatttgcagtgcatgcggcacctcgtctctgaggagcaattccgcaagagccaggcaatcgttcagcaattcggcgccccaggcggactgggggagacgcttcagcagaaattgctcgagaggcaagagaaaacagcaaattgggttagcgagtactggctcaacgatatgtacctgaacaatagactggcactgcctgtgaactccagcccagctgtgatcttcgcacgccaacactttccaggtacagacgaccagcttcggtttgctgcctcgttgatatccggagtcctctcttacaaggctctactcgattcccattctattcccactgattgcgcaaaaggacagctctctggccagcccttgtgcatgaagcagtactacggcctgttttctagttaccgactgcctgggcacacccaggacactctggttgcgcagaactcgtccatcatgccagaacccgaacacgtaatagtggcttgctgcaatcaattcttcgttctggatgttgtaatcaacttcaggcgcttgtctgagggcgacttgtttactcagctgcggaagattgtcaagatggccagtaacgaggacgaaagactgccgccaatcggactcctgactagcgacggtcgcagcgagtgggccgaagcccggaccgtcctggtgaaggattcgaccaacagggattcacttgatatgatagagcgctgcatttgcctcgtgtgcctagatgcaccgggaggcgtcgaactttccgacactcaccgtgcccttcagttacttcatggggggggttatagcaagaacggcgcaaacaggtggtacgataagtcacttcaattcgtggtgggacgcgatggaacttgcggcgtcgtgtgtgagcacagcccctttgatggaattgtgctggtccagtgtacagagcacctcttgaagcacgtgactcagtcctctcgtaagctgatcagagctgactctgtgtcagagcttcctgcgccaaggaggctgaggtggaaatgtagtcctgagatccaaggtcatttggcatcctccgctgaaaagctgcagcgcattgttaagaacctcgattttatcgtgtataagtttgataactacggtaagaccttcatcaaaaagcagaaatgctctcccgatgcattcatacaagtggcccttcagttggccttctatcgcctccaccgcaggctggtccccacatacgaatctgcctctatcagacgattccaggaaggacgagttgataacataaggtccgctaccccagaagcacttgcttttgtgagagctgttaccgaccacaaggccgctgtgcctgcctcagaaaaacttctactgctgaaagatgcaatccgcgctcaaacagcctacacagtgatggccatcaccggtatggccatcgataatcaccttctggccctgcgcgagctagcgagagccatgtgtaaggagctaccagaaatgtttatggatgagacatatctcatgtctaatcgtttcgtcttatccacttcccaggtacccacaaccaccgaaatgttctgttgctatggaccagtggttcccaacggctatggcgcctgctacaaccctcagcctgaaaccattttgttctgtattagctcttttcactcatgcaaggaaacaagtagctccaagtttgccaaggccgtggaggagagccttattgacatgcgggacctctgttctcttctgccacccaccgaatccaaaccattggccaccaaggagaaggctacacgaccctcgcaaggtcaccagccctag

SEQ ID NO: 54903 - DNA, 1893 bp, Artificial Sequence
  derived and/or modified sequence
atggctgccaaaacaccaagttccgaggaatcaggactccccaaactgccggtgcccccactccagcagaccctagccacctacctgcaatgtatgcggcaccttgtatcagaggaacagtttcgcaaatcccaggcaatagttcagcaatttggggctcctgggggactcggggagacactgcaacagaagctactcgagaggcaggagaaaactgctaattgggtgagcgagtactggctgaacgacatgtatctgaataatcgactcgctctgcccgttaactccagccccgctgtgatcttcgcacgtcagcacttccctggtaccgatgatcagctgcggtttgccgcctccctgatttctggagtgctcagttacaaagcattactcgatagtcactccatccctaccgattgcgctaagggccagctaagcggtcaacccctctgcatgaaacagtactatggcctttttagtagctaccgcctgcccggacacacacaggacactctggtagcacaaaactcaagcataatgcctgagccagagcatgtaatcgtggcctgctgtaaccagttttttgtgctggatgtggtgattaacttcaggaggctgagcgaaggtgatcttttcacacagttacgaaaaatcgtgaagatggcctctaatgaggatgaacgcttgccccctataggactcttaacttcggacggacggtccgaatgggctgaagcacggacagtgctggtgaaggacagtacgaacagagattcgctcgatatgatcgaacgttgcatttgcttggtgtgcctagacgccccggggggtgtggagctgagtgacacccaccgtgcccttcagctactgcacggcggggggtattccaagaacggcgcgaatagatggtacgataaaagccttcagttcgtggtgggcagagatggcacttgcggggtcgtttgcgaacacagcccgttcgacggcattgttctggtgcagtgcacagagcatttacttaagcacgttacccagagctcacgaaaactcattcgggccgattcagtgagtgaactcccggccccccgccgcctcagatggaagtgtagcccagagattcaggggcatctggcgtcttccgctgaaaagctgcaacggattgtcaagaaccttgacttcatcgtatacaagtttgacaactatggaaagacctttataaaaaaacaaaagtgctctccagatgcctttattcaggtggcacttcaattggcgttctataggctgcatagaaggctggtacccacctatgagtctgcctccataaggcgcttccaggaagggcgggtcgacaatattcgttcggctacacccgaggcactggctttcgtacgggcggtgactgaccataaggccgccgtgccggcatctgaaaagttgctcctcctcaaggatgcgattcgggcacagacagcttacaccgtcatggctatcaccggcatggcgatcgacaatcacttgcttgccctgagggagttggcccgggccatgtgtaaggaattaccggaaatgttcatggacgagacctacctcatgtctaatcgctttgtgcttagtacgtctcaggtgccaactactaccgagatgttctgctgttacggtccggtcgtgccgaacggctatggcgcttgttacaatccacaacccgagacaatcctgttctgcatttcctcattccattcctgcaaagagacttcttccagtaagtttgccaaagccgtggaggaatctctcattgatatgagggatctgtgctctctgctgccccctaccgagtcaaagccgcttgcaaccaaggaaaaggctacgcgtccttcccaggggcaccagccttag

SEQ ID NO: 54904 - DNA, 1893 bp, Artificial Sequence
  derived and/or modified sequence
atggcagcaaagaccccttcgagcgaagagtcagggcttcctaaactccccgttcctcctctgcagcagacactggctacatatctccagtgtatgcgtcatctggtgagcgaggagcagtttcggaagtcgcaggccatcgtacagcagttcggggctcctggaggattgggagaaaccttacagcagaagctattggaaagacaggaaaagactgccaattgggtctcagagtactggcttaatgacatgtatctgaacaataggctggcgctcccagtgaatagctctccagccgtcatcttcgcccgtcagcattttcccggaactgacgaccagctcagatttgccgcctccctgattagcggcgtcttgagctataaagctctcttggacagtcactctatccctactgactgtgcaaaaggacagctttctggtcagccactgtgtatgaaacagtattatggccttttctcatcatacagactgccgggccatacccaggatactctggtggcccagaactcgtccataatgcctgagccggagcacgtcattgtggcttgctgcaatcaattttttgtgctggatgtggttatcaacttccgccgtctgagcgagggcgatctgtttacgcagctgagaaaaatagtgaaaatggcttccaacgaagacgagagacttcccccaattggtctcctgacttcagatgggcgtagtgagtgggccgaggccagaaccgtgctcgtgaaggactccactaaccgcgattcactggacatgatcgagcggtgcatatgcctggtttgcctcgatgcacccggtggtgtggaactgtccgacacccacagggccctacagctactccacggaggtggctactctaaaaacggcgccaatcgctggtatgacaaatccttgcagtttgttgtgggacgcgacggtacatgtggcgttgtgtgcgagcactcaccctttgatggtattgtattggtccagtgtaccgagcatctactgaagcacgtaacccagtcgtctcgaaaactgatcagggccgacagcgtctcagaactccccgcgccgagaagactgagatggaaatgctcccctgaaattcaaggtcatctggccagttctgccgaaaagttgcaacggatagtgaaaaatctagacttcattgtatataaattcgataactatggaaaaaccttcataaagaagcagaagtgttcaccagatgcatttattcaggttgcacttcagttagctttttacagattgcataggcgcctcgtaccaacttacgagagcgcatcgatccgtagattccaggagggacgtgtcgataatatccgcagcgcgactccagaggcactggctttcgtcagagccgttaccgaccacaaggcagcagttccggctagcgaaaagttacttctgctgaaggatgcgataagagctcagactgcctacactgtgatggccatcaccggcatggccatcgacaatcaccttcttgctctgcgggaacttgcccgcgcaatgtgcaaagagctacccgaaatgtttatggacgaaacatacctcatgagcaatagatttgtgctctctacaagtcaggtgccaaccacaaccgaaatgttttgctgttatggacccgtggtgcctaacggctatggcgcctgttataaccctcagccagagacgattctgttctgtatctcttcctttcatagttgcaaggaaacctcctcgtcaaaattcgctaaggctgtggaagaatcactgatcgacatgcgggacttatgctccctcctgccccctaccgagtccaagcctctggcgacaaaggaaaaagccacccgcccgagtcagggtcaccagccttag

SEQ ID NO: 54905 - DNA, 2001 bp, Artificial Sequence
  derived and/or modified sequence
atgtggcctgagtgtagggacgaggccctttccacagtgggtccacatctgtgtatccccgcccccggcctaactaaaacacccatcctggagaaggtgcctaggaagatggctgccaagactccttccagtgaagaatcaggcttgccgaagctccctgtgcccccactgcagcagacgctggctacctatctgcagtgtatgcgccaccttgtgtcagaagaacagtttcgaaaaagccaagccattgtgcagcagttcggggcccccggaggactgggagagactctgcagcagaagctcctcgaacgacaggagaaaaccgccaactgggtgtcagaatactggctgaacgacatgtacctgaacaatcgcctggctcttcccgtgaactcgtcgcccgcagtgattttcgcccgccaacacttccccgggaccgacgatcagctcagatttgccgccagtttaatctctggtgtgttgagctataaagcattactggatagtcacagtatacccaccgattgtgccaagggccagctgagtggacagcctctttgcatgaagcagtattacgggctattttcgagctaccgcctgcccggccacacccaggataccttggtggcccagaacagctccatcatgccggaacctgagcacgtgatcgtggcttgttgtaaccagttctttgttttagatgtcgttattaattttcgacggttgtctgaaggcgatctgttcactcaactgaggaaaatcgtgaagatggcatcaaacgaggatgagcgtctgccccccattggactgctgacatcagacgggcgctctgaatgggctgaagctagaacagtgttagtcaaagattcgactaacagggatagcctggacatgattgagagatgcatctgtttggtatgcctggatgccccgggcggagtcgaactgtctgatacccaccgggctctccagctgttgcacggtggtggatattccaaaaatggtgccaacaggtggtatgataagtcactgcagttcgtggtcggtagagacggaacttgcggggttgtatgcgagcacagcccctttgacgggatcgtgctggtccagtgtacggagcacctactgaagcacgtgacccaaagtagcagaaaattgattcgggccgatagcgtgagcgaactgccggcccctcgccgactcaggtggaaatgttccccagaaatccagggacacctcgccagctccgctgagaagctgcagaggattgtgaaaaacctggacttcatcgtgtacaagttcgataactatggaaaaactttcatcaaaaagcagaaatgcagccctgatgcattcattcaagtggcgctgcaacttgcgttctaccgcctgcatcggagactggtacccacatacgagagcgcctcgattcggcgcttccaggagggaagagtcgataacatcaggtctgctacacccgaagcattggcctttgtccgggccgtgacagaccataaagcggcagtgcccgcctcagagaagcttctgctgctgaaagacgctattcgggcacagacggcctatactgtcatggcaatcactggtatggccattgataatcacctgttagcactcagagaactcgcacgcgctatgtgcaaagaactgcctgaaatgttcatggacgagacgtatctgatgagcaaccggttcgtcttgtcaacaagccaggtgcctacaactaccgagatgttctgctgttatgggccggtggtcccaaatggatacggggcttgttacaatccacagccagaaaccattctcttttgtatcagttcctttcattcttgtaaggaaacctcatcctccaagttcgcgaaagccgtagaggagtctctgatagacatgagggacctttgtagtctgctccccccaaccgaaagtaagcccctagcaaccaaggagaaagcgacccggccttcccaggggcaccaaccttag

SEQ ID NO: 54906 - DNA, 1638 bp, Artificial Sequence
  derived and/or modified sequence
atggctgccaaaaccccttcgagcgaggagtctggactgcccaaacttcccgttccccccctgcaacagactctagcgacctacttacaatgcatgcggcacctggtcagtgaagaacagtttcggaaatcccaagccatagtgcagcagttcggcgccccagggggcttgggcgagacgctgcagcagaagttgctcgagagacaggagaagaccgccaactgggtgagcgagtattggttaaacgacatgtatctgaacaaccgcctggctctcccagttaatagttcacccgcagtcatctttgccaggcagcatttcccgggcacggacgatcaacttaggtttgctgctagcttaatcagcggcgtcttatcctataaggccttacttgattcacactcgatccctaccgactgcgccaagggtcagctgtccggccagccgctgtgcatgaaacaatattacggcctattctcgagctatcgactccctggccacactcaggataccctcgtggcccagaacagtagcatcatgccagaacccgagcatgtcatcgtcgcctgctgtaatcagttttttgtgctggatgttgtgattaattttagaagactgtcggagggcgacctgttcacacagctgcgtaagatagtcaaaatggcaagtaatgaggatgaaagactgcccccgatcggattgctgacctccgacggccggtctgagtgggcagaggccaggactgtgctcgtgaaagacagtacaaatcgggactccctggatatgattgagagatgcatctgtcttgtttgtctcgatgctcccggaggggtagagctgtccgatacgcacagagcgctccagttactgcacggaggcggatatagcaaaaatggagccaatagatggtacgacaaatcactgcagttcgtggtcggcagagacggaacttgcggggtggtgtgtgaacattccccttttgatggcattgtgttggtacagtgcaccgaacatctccttaagcatgtgacacagagttcccggaaattgatccgcgccgactccgtgagcgagcttccagctccaaggagactcaggtggaaatgcagccccgagatccaggggcacctagccagctccgccgaaaagctgcaacgcattgttaaaaatctggactttatcgtgtataaattcgataactacggaaagacctttatcaaaaagcaaaagtgttcccccgatgctttcattcaagtggccctgcagctggctttttaccgattgcaccgaaggctcgtccccacctacgagtccgcctctatcaggagatttcaagagggtagggtggataacataaggagtgccacacctgaagccttagcgtttgtacgtgcagtgactgatcataaggctgcagtcccagcctctgagaaactcctgttattaaaagatgccattcgagcacagactgcctacaccgtaatggctatcaccggcatggccatagacaaccacctcctggccctcagggaactggcacgcgctatgtgtaaagagctgccggagatgtttatggatgaaacctacctcatgagcaatagattcgtcctgagtacttcacaattatgctggccatag

SEQ ID NO: 54907 - DNA, 1893 bp, Artificial Sequence
  derived and/or modified sequence
atggccgccaagacccccagcagcgaggagagcggcctgcccaagctgcctgtgccccccctgcagcagaccctggccacctacctgcagtgcatgaggcacctggtgtctgaggagcagttcaggaagagccaggccatcgtgcagcagtttggagcccctgggggcctgggggagaccctgcagcagaagctgctggagcggcaggagaagacagccaactgggtgtctgagtactggctgaatgacatgtacctgaacaaccggctggccctgcctgtgaacagcagccctgctgtgatctttgcccggcagcacttccctggaacagatgaccagctgcgctttgctgccagcctcatcagcggcgtgctgagctacaaggccctgctggacagccacagcatccccacagactgtgccaagggccagctgagcggccagcccctgtgcatgaagcagtactacggcctcttcagcagctaccgcctgcccggccacacccaggacaccctggtggcccagaacagcagcatcatgcctgagcctgagcacgtgattgtggcctgctgcaaccagttctttgtgctggatgtggtgatcaacttccggcggctgtctgagggggacctcttcacccagctgaggaagatcgtgaagatggccagcaatgaagatgagcggctgccccccatcggcctgctgaccagtgatggccgctctgagtgggccgaggccaggacagtgctggtgaaggacagcaccaacagagacagcctggacatgattgagcgctgcatctgcctggtgtgcctggatgcccctggaggagtggagctgagtgacacccaccgggccctgcagctgctgcatggaggcggctacagcaagaatggagccaaccgctggtatgacaagagcctgcagtttgtggtgggcagagatggcacctgtggggtggtgtgtgagcacagcccctttgatggcatcgtgctggtgcagtgcacagagcacctgctgaagcacgtgacccagagcagcaggaagctgatccgggctgacagcgtgtctgagctgcctgccccccggcggctgcgctggaagtgcagccctgagatccagggccacctggccagcagcgctgagaagctgcagagaattgtgaagaacctggacttcatcgtgtacaagtttgacaactacggcaagaccttcatcaagaagcagaagtgcagcccagatgccttcatccaggtggccctgcagctggccttctaccgcctgcaccggcggctggtgcccacctatgagagcgccagcatccgccgcttccaggagggccgggtggacaacatccgcagcgccaccccagaggccctggcctttgtgcgggctgtgacagaccacaaggctgctgtgcctgccagcgagaagctgctgctgctgaaggatgccatccgggcccagacagcctacacagtgatggccatcaccggcatggccatcgacaaccacctgctggccctgcgggagctggcccgggccatgtgcaaggagctgcctgagatgttcatggatgagacctacctgatgagcaacagatttgtgctgagcaccagccaggtgcccaccaccacagagatgttctgctgctacggccctgtggtgcccaacggctacggggcctgctacaacccccagcctgagaccatcctcttctgcatcagcagcttccacagctgcaaggagaccagcagcagcaagtttgccaaggctgtggaggagagcctgattgacatgagggacctgtgcagcctgctgcccccaacagagagcaagcccctggccaccaaggagaaggccacccggcccagccagggccaccagccctag

SEQ ID NO: 54908 - DNA, 2001 bp, Artificial Sequence
  derived and/or modified sequence
atgtggccagagtgcagagatgaggccctgagcacagtgggcccccacctgtgcatcccagcccctggcctgaccaagacccccatcctggagaaggtgcccaggaagatggccgccaagacccccagcagcgaggagagcggcctgcccaagctgcctgtgccccccctgcagcagaccctggccacctacctgcagtgcatgaggcacctggtgtctgaggagcagttcaggaagagccaggccatcgtgcagcagtttggagcccctgggggcctgggggagaccctgcagcagaagctgctggagcggcaggagaagacagccaactgggtgtctgagtactggctgaatgacatgtacctgaacaaccggctggccctgcctgtgaacagcagccctgctgtgatctttgcccggcagcacttccctggaacagatgaccagctgcgctttgctgccagcctcatcagcggcgtgctgagctacaaggccctgctggacagccacagcatccccacagactgtgccaagggccagctgagcggccagcccctgtgcatgaagcagtactacggcctcttcagcagctaccgcctgcccggccacacccaggacaccctggtggcccagaacagcagcatcatgcctgagcctgagcacgtgattgtggcctgctgcaaccagttctttgtgctggatgtggtgatcaacttccggcggctgtctgagggggacctcttcacccagctgaggaagatcgtgaagatggccagcaatgaagatgagcggctgccccccatcggcctgctgaccagtgatggccgctctgagtgggccgaggccaggacagtgctggtgaaggacagcaccaacagagacagcctggacatgattgagcgctgcatctgcctggtgtgcctggatgcccctggaggagtggagctgagtgacacccaccgggccctgcagctgctgcatggaggcggctacagcaagaatggagccaaccgctggtatgacaagagcctgcagtttgtggtgggcagagatggcacctgtggggtggtgtgtgagcacagcccctttgatggcatcgtgctggtgcagtgcacagagcacctgctgaagcacgtgacccagagcagcaggaagctgatccgggctgacagcgtgtctgagctgcctgccccccggcggctgcgctggaagtgcagccctgagatccagggccacctggccagcagcgctgagaagctgcagagaattgtgaagaacctggacttcatcgtgtacaagtttgacaactacggcaagaccttcatcaagaagcagaagtgcagcccagatgccttcatccaggtggccctgcagctggccttctaccgcctgcaccggcggctggtgcccacctatgagagcgccagcatccgccgcttccaggagggccgggtggacaacatccgcagcgccaccccagaggccctggcctttgtgcgggctgtgacagaccacaaggctgctgtgcctgccagcgagaagctgctgctgctgaaggatgccatccgggcccagacagcctacacagtgatggccatcaccggcatggccatcgacaaccacctgctggccctgcgggagctggcccgggccatgtgcaaggagctgcctgagatgttcatggatgagacctacctgatgagcaacagatttgtgctgagcaccagccaggtgcccaccaccacagagatgttctgctgctacggccctgtggtgcccaacggctacggggcctgctacaacccccagcctgagaccatcctcttctgcatcagcagcttccacagctgcaaggagaccagcagcagcaagtttgccaaggctgtggaggagagcctgattgacatgagggacctgtgcagcctgctgcccccaacagagagcaagcccctggccaccaaggagaaggccacccggcccagccagggccaccagccctag

SEQ ID NO: 54909 - DNA, 1638 bp, Artificial Sequence
  derived and/or modified sequence
atggccgccaagacccccagcagcgaggagagcggcctgcccaagctgcctgtgccccccctgcagcagaccctggccacctacctgcagtgcatgaggcacctggtgtctgaggagcagttcaggaagagccaggccatcgtgcagcagtttggagcccctgggggcctgggggagaccctgcagcagaagctgctggagcggcaggagaagacagccaactgggtgtctgagtactggctgaatgacatgtacctgaacaaccggctggccctgcctgtgaacagcagccctgctgtgatctttgcccggcagcacttccctggaacagatgaccagctgcgctttgctgccagcctcatcagcggcgtgctgagctacaaggccctgctggacagccacagcatccccacagactgtgccaagggccagctgagcggccagcccctgtgcatgaagcagtactacggcctcttcagcagctaccgcctgcccggccacacccaggacaccctggtggcccagaacagcagcatcatgcctgagcctgagcacgtgattgtggcctgctgcaaccagttctttgtgctggatgtggtgatcaacttccggcggctgtctgagggggacctcttcacccagctgaggaagatcgtgaagatggccagcaatgaagatgagcggctgccccccatcggcctgctgaccagtgatggccgctctgagtgggccgaggccaggacagtgctggtgaaggacagcaccaacagagacagcctggacatgattgagcgctgcatctgcctggtgtgcctggatgcccctggaggagtggagctgagtgacacccaccgggccctgcagctgctgcatggaggcggctacagcaagaatggagccaaccgctggtatgacaagagcctgcagtttgtggtgggcagagatggcacctgtggggtggtgtgtgagcacagcccctttgatggcatcgtgctggtgcagtgcacagagcacctgctgaagcacgtgacccagagcagcaggaagctgatccgggctgacagcgtgtctgagctgcctgccccccggcggctgcgctggaagtgcagccctgagatccagggccacctggccagcagcgctgagaagctgcagagaattgtgaagaacctggacttcatcgtgtacaagtttgacaactacggcaagaccttcatcaagaagcagaagtgcagcccagatgccttcatccaggtggccctgcagctggccttctaccgcctgcaccggcggctggtgcccacctatgagagcgccagcatccgccgcttccaggagggccgggtggacaacatccgcagcgccaccccagaggccctggcctttgtgcgggctgtgacagaccacaaggctgctgtgcctgccagcgagaagctgctgctgctgaaggatgccatccgggcccagacagcctacacagtgatggccatcaccggcatggccatcgacaaccacctgctggccctgcgggagctggcccgggccatgtgcaaggagctgcctgagatgttcatggatgagacctacctgatgagcaacagatttgtgctgagcaccagccagctgtgctggccctag

SEQ ID NO: 54910 - DNA, 1893 bp, Artificial Sequence
  derived and/or modified sequence
atggccgccaagacccccagcagcgaggagagcggcctgcccaagctccccgtgcctccacttcagcaaacgcttgccacctatctccaatgcatgcgccatcttgtgagcgaagagcaattccgcaaaagccaggcaatagtccaacaatttggcgctcccggtggactcggtgaaacactgcaacagaagctgctggaaaggcaggagaagacagcaaattgggtgtctgaatactggcttaatgacatgtatctgaataatcggcttgcccttcctgttaattcgtctccggccgtaatttttgctaggcagcacttccccggcactgacgaccagttgcgattcgcagctagcctgatttccggcgtgctgtcctacaaggctctgcttgactcacactccatcccaaccgattgcgctaagggacagctgtcgggccaacccctgtgcatgaaacagtattatggcctgttctcttcttaccgattgccaggacacacgcaggacacactcgtcgcacaaaattcctcgatcatgcctgaaccagaacacgttattgtcgcatgctgcaatcagtttttcgtgctggacgtggtgatcaactttcgtcggttatccgagggtgatctctttactcagctgaggaaaatcgtgaaaatggccagcaacgaggatgagcggctgcctccaatcgggttgctgacaagcgacgggagaagcgaatgggctgaggcgcggacggttctcgtcaaggacagtaccaaccgtgactcgctcgacatgatagagcgatgcatctgtcttgtgtgtctcgatgctcctggtggagtggagctgagtgatacacatcgtgctcttcagctgctccatggtgggggatattctaagaacggcgcgaatcggtggtatgacaagtccctgcagttcgtggtgggccgagatggcacatgcggcgttgtctgtgagcatagccctttcgacgggatagtactagtgcagtgtactgagcacctactgaaacacgtgacacagtcttcacggaaactcatccgcgctgacagcgtgtctgagcttcccgccccgcgacggcttaggtggaagtgtagcccagagatccagggccaccttgcttctagtgctgagaagctccagcgaatcgtgaagaaccttgatttcatcgtctataaatttgataattatgggaaaacttttattaagaagcagaaatgctctcccgacgcctttatccaggtggcgctgcagctcgccttttatcgactgcacagacgactggttcctacatatgaaagtgcctcaatccgtagatttcaggagggccgggtggataacataaggtccgctactcccgaggcactggcatttgtgcgcgccgtgactgaccataaggcagcagtgcccgccagtgaaaagttgcttcttctgaaggatgccatccgggcgcagaccgcatatactgttatggcaatcacgggcatggccattgacaaccatctgctagccctccgcgaattagcaagagcaatgtgcaaggagctgccggaaatgttcatggatgaaacctatctgatgtccaatcgctttgtgctctccaccagccaggtccctaccaccacagaaatgttttgctgttatggaccagtcgtccctaatggctatggtgcctgctacaatccacagcctgaaaccatactcttttgtatatcctcgttccacagctgcaaagaaacctcgtctagcaaatttgccaaagcggttgaagaaagtttaattgatatgagagacctgtgcagcctgctcccccccaccgagtccaaaccgctggcaacaaaagagaaagcaacacggccttcccagggacaccagccttag

SEQ ID NO: 54911 - DNA, 1893 bp, Artificial Sequence
  derived and/or modified sequence
atggccgccaagacccccagcagcgaggagagcggcctgcccaagctgccagtgccacctctgcagcaaacccttgccacctacctacagtgcatgaggcatctggtgagcgaggaacagttcagaaagtcacaggccatagtacagcagtttggtgctcctgggggcttgggcgaaaccttgcaacagaagcttttagagcggcaggagaagaccgctaattgggtgtccgaatactggcttaatgacatgtatctgaacaatcgtttagctcttccggtgaatagtagtccagccgtgatcttcgctagacagcattttcccggcacagatgaccagcttcgcttcgcagcctcacttatcagcggagtccttagctataaagctttgctcgattctcactccatcccaactgactgtgcaaagggccagctttccggccaaccactgtgtatgaagcagtactacgggctctttagctcttatcgccttcctggacacacccaggatacactggtggctcagaatagtagcattatgcctgaacctgaacacgtgatcgtggcctgctgtaatcagttcttcgtgctggacgtagtgattaactttagacgattatccgaaggcgatttatttacccaactgcggaagatagtgaagatggctagcaacgaggacgaacggctccctccaattggccttctgactagcgacggtcgcagcgaatgggccgaagctaggactgtacttgttaaggattctactaatagggactcgctcgatatgattgagcgatgcatttgtctagtgtgcttggatgcccccggcggcgtcgagttatcggacacgcaccgcgccttacagctgttgcacggcggagggtatagcaaaaatggcgccaacaggtggtacgacaagtccttgcagttcgttgtaggtcgcgatggaacctgtggggttgtgtgtgagcacagtccgtttgatggcatcgtgcttgtacagtgcactgaacaccttctgaaacatgttactcagtcgtctcggaagctcattagagcggacagtgtcagcgagttacccgcccctagacggctgagatggaagtgctcccccgaaatccaggggcatttagcttcttccgcggagaaactacagcggattgtgaaaaatcttgatttcatcgtctacaaatttgacaattacggaaagaccttcataaagaagcagaaatgctcaccagatgcatttattcaggtggccctacagctagctttctataggctccacagaagactcgtgcccacatatgaatcggccagtatccggcggtttcaggagggccgtgtggacaacattcggagtgcaacccctgaggctcttgcatttgtgagggccgttaccgaccacaaagcagcagtgcctgcctcagagaagctgttgctgctcaaggacgctatacgggcccagacagcctacaccgtgatggcaataacaggtatggcaattgacaaccacttgctggctctacgcgagttagcccgcgccatgtgtaaagagcttcctgaaatgtttatggatgagacttacctgatgtctaatagattcgtgctatcaaccagccaggtgcctaccaccaccgagatgttctgttgttatggtccggttgtgcccaacggttatggcgcttgctacaacccacagcccgaaaccatccttttttgcatttctagtttccattcctgtaaagagacaagttcttctaagtttgccaaggctgttgaagagagcctcatcgatatgcgcgacttatgtagtctgttacccccaacggagtcaaagccactggccaccaaggaaaaagccaccagaccctctcaggggcatcagccctag

SEQ ID NO: 54912 - DNA, 1893 bp, Artificial Sequence
  derived and/or modified sequence
atggccgccaagacccccagcagcgaggagagcggcctgcccaagctccctgtcccaccacttcaacaaacgctggccacatacctgcagtgtatgcgtcacctggtgagcgaggaacaatttcggaagagtcaggcgattgtacagcagttcggcgctccaggtggcctgggagaaacccttcagcagaaactgttggagagacaggagaagaccgcaaactgggttagcgagtattggctaaatgacatgtatttaaataacaggctagctcttcctgtgaattctagcccggccgtgatctttgcccgccagcattttccaggcacagatgatcagcttagattcgctgcatccctgatttctggtgtgctttcctacaaagctttactggactcccacagtattcctactgattgtgctaagggccagctgtcaggacagcctctgtgcatgaaacaatactacggactcttctcttcatatagacttcccgggcatacacaagatacactggttgctcagaatagctcaattatgcctgagcccgagcatgtgatcgtcgcctgctgtaatcaatttttcgtcctggatgtcgtcatcaatttccgtcgattgtcggagggagatttgtttacacagctaagaaagatcgttaagatggcctccaatgaagatgagcgactccctccgattggcttgctgaccagcgatggccggagtgagtgggccgaagcccggacagtactggtcaaggatagtacgaacagagacagcctcgacatgattgaacgctgcatctgtctcgtttgtcttgatgcccctgggggtgtggaactctccgacactcatagggcactccagctgttacacggaggcggttattcaaaaaacggagcaaacaggtggtatgacaagtccctccagttcgtggttgggagggacgggacttgtggtgtggtgtgtgaacattccccatttgatgggatcgtgcttgtgcagtgcaccgaacacctcctcaaacacgtgacccagtcaagtaggaagctcatccgggctgattccgtttcagagcttcccgcaccgaggagactcaggtggaagtgttccccagaaatccagggccacctggccagcagtgcagagaagctccagaggatagtgaagaacttggatttcattgtgtacaagttcgacaattacggaaaaacctttataaaaaagcagaaatgctctcccgacgcttttatacaagtggcacttcagttggctttttaccggcttcaccgacgactggtccctacgtatgagtctgcttcaatccggcgctttcaggaaggaagagtcgataatatccgctccgcaacacccgaagcactggcattcgttcgcgctgtaacggatcacaaggccgctgtgcccgcctcagagaaacttctgctgctgaaggacgccatcagggcccaaacggcttataccgtcatggccatcaccggcatggccatcgacaatcacctcctggctttgcgagagctggcccgggcaatgtgcaaggagctgcccgaaatgtttatggacgagacgtatctcatgtctaatcggttcgttttgtccacaagccaggtcccaaccacgacggagatgttctgttgctatggacctgtggtacctaatggctacggcgcctgttataatccgcagccggaaaccatattgttttgtatcagcagtttccattcttgcaaggagacctccagcagcaagtttgccaaggctgtggaggaaagtctgattgatatgcgggatctgtgcagtctgctgcccccaaccgagtccaagcctttggccactaaagaaaaggctacaaggccttcccagggtcaccaaccgtag

SEQ ID NO: 54913 - DNA, 2001 bp, Artificial Sequence
  derived and/or modified sequence
atgtggcccgagtgccgggacgaggccctgagcaccgtgggcccccatctctgtatcccagccccaggcctcacaaagaccccaatcctggaaaaggttccacggaaaatggctgctaaaaccccatcctccgaagagtccggcctgcctaaactccccgtgcccccactacagcagaccctagcaacctatttgcagtgtatgagacatctggtctccgaggagcagttccgcaaatcacaggcgatcgttcagcaattcggagcccccggcgggttgggagagactttgcagcagaagcttctcgagcggcaggagaaaactgctaactgggtgtctgaatactggctgaacgatatgtatttaaataataggctggccctgccagtgaactcctccccagcagtaatatttgcgagacaacactttccaggtactgacgatcagctacggtttgccgccagccttatctctggagtccttagttacaaagcccttctcgactcacactctatacctactgattgtgcaaaaggccagctttccggccagcccctctgcatgaaacagtactatggcctcttttcgagctaccgacttccgggacatacgcaggataccttggtagcccagaattcctccattatgccagaacctgagcacgtcatcgtggcatgttgcaaccagttcttcgttctcgacgtcgtcatcaatttcaggaggctctccgaaggtgatctctttactcagctccggaaaattgttaaaatggcatctaacgaagacgagagacttccacctatcggacttctcacctcggacggacgaagcgagtgggctgaggctagaacggttttggtgaaagacagtactaaccgcgactccctcgacatgatcgaaaggtgtatatgtctggtgtgcttagacgctccaggaggcgttgaactgagcgacacacatagagccttacagcttctgcacgggggaggatactcaaaaaatggggccaatagatggtatgacaagtctctgcagtttgtcgtcggcagagatgggacatgtggagtcgtatgtgaacactccccatttgacggaatcgtcctggttcagtgcacagagcatttgctgaaacatgtgacgcagtctagccggaagctgatccgtgcagacagcgtaagtgaactccctgccccccgtcgcctgcggtggaagtgtagccctgaaatacagggccatttggctagctcagcggagaaactgcaacggatcgttaaaaatctggatttcatcgtgtataagtttgataattacgggaaaaccttcattaaaaagcagaaatgttcacccgatgcctttatccaggtggctttgcagctggccttttatcgtctacaccgaagacttgtgccaacctatgaatccgcttcaattcggcggttccaggagggacgagtcgataatatcaggagtgctacaccagaggctctggccttcgtgcgcgcagtcaccgaccacaaagcggctgtgcctgctagcgagaagctgttactactgaaagatgctattagggcccagaccgcatacacagtgatggccattaccgggatggctattgataaccatctgctggccttacgcgagttggcccgtgctatgtgcaaggagttaccagaaatgttcatggacgaaacctatttgatgagtaacagattcgttctcagtacttctcaggtacccacaaccacagaaatgttttgttgttacggtccagtcgttcctaatgggtatggcgcatgctacaaccctcagcctgagacaatacttttctgtatttctagcttccactcatgcaaggagacgtctagttcgaagtttgccaaagctgtggaagaaagcctgatcgatatgagggatttatgtagtctgctgcccccgaccgagtcgaagccgttagcaactaaagaaaaagccactcggccatcccaggggcaccaaccctag

SEQ ID NO: 54914 - DNA, 1638 bp, Artificial Sequence
  derived and/or modified sequence
atggccgccaagacccccagcagcgaggagagcggcctgcccaagctcccggtgccgccactccaacagacgttagcgacctaccttcaatgcatgcgccacctggtctctgaggagcaatttcgtaaatctcaggcaatcgttcaacagttcggagcccccggcgggctgggagaaaccttgcaacaaaagctgctggagaggcaggaaaaaaccgcgaactgggtgagtgagtattggctaaacgatatgtatttaaacaatagactagctttgccagtgaactcgtctcctgctgtcatatttgctaggcaacacttccctggcactgacgatcagttgagatttgccgcaagtttgatctctggcgtgcttagctataaggccctgttagactctcattcaataccaaccgattgcgccaagggccaactgagcggacagccactgtgcatgaagcagtactacggcctgtttagcagttatcgtctgccaggtcatacacaagacacgctggtggcccagaactccagcatcatgcccgagcccgagcatgtgatagtggcctgctgcaatcagttctttgtcctggatgttgttatcaactttcgtcgactgtctgagggtgacctgttcacgcagctccgcaaaattgtcaaaatggcctccaatgaagacgaacggctgcctcctatagggcttttaacatctgatggccgatctgaatgggcagaggctcgcacggtgttggtaaaagactcaaccaacagggacagtcttgacatgatcgagaggtgtatttgcctggtgtgccttgacgcacctggaggcgtggaactaagtgacacccacagagccctccagctcctgcacggtggtggctacagtaaaaatggcgccaatcgttggtacgacaagagtctgcagttcgtggtgggccgcgacggaacatgtggagtggtttgcgaacactcaccctttgatgggattgtccttgtgcagtgtacagagcacctgctgaagcacgtgactcagtccagcaggaagcttataagagccgacagtgtttcggaactgcccgcaccgagaagactccgatggaagtgtagtccagagatccagggtcacctcgcttcaagcgcggaaaaactacaaagaatcgttaaaaatctggatttcatcgtttataagttcgataactacgggaagacattcattaagaaacagaagtgctctcctgacgcctttattcaagttgccctgcagctcgcattctaccgccttcataggagactggtgccaacctatgagagtgcctcaattagacgattccaggagggccgcgtggataacatacgcagtgcgactccagaggctctcgcattcgttcgcgcagtcaccgatcataaagccgccgtgcctgcctctgagaagctcctactgttgaaggacgcaattcgcgctcagaccgcctataccgtgatggcaattacagggatggcaatcgacaatcatctcctcgccctccgcgagctggcaagggcaatgtgcaaagagctgccagagatgttcatggacgagacatacctcatgagcaatcggtttgtcctcagcactagccagttgtgctggccgtag

SEQ ID NO: 54915 - DNA, 1893 bp, Artificial Sequence
  derived and/or modified sequence
atggcagctaaaacgccttccagcgaggagtctggtctgccaaaattgcccgtgccacctctccaacagacactagccacgtacctgcaatgtatgagacatttggttagtgaagaacagtttcgcaagagccaggcaatcgtccaacagttcggcgctcctggcggtctgggcgagaccctgcaacagaaactgctggaaagacaggaaaagaccgcgaactgggtgtcagaatattggcttaacgatatgtacctcaacaatagactggcattgcccgtgaatagttctccggcagttatcttcgccaggcaacactttcccggtacagatgatcagctgcgatttgctgcctctcttatctccggtgttttatcctacaaggccctgcttgattcacattccattcctacggactgtgccaaagggcagctcagcggccagccactctgcatgaagcaatactacggcctatttagctcgtacaggctgccgggacacactcaggatacgctggtggctcagaactcatccatcatgccagaacccgagcatgtgattgtggcgtgttgcaatcaatttttcgtcttggatgtggttatcaactttaggcgtctctcagaaggagatcttttcactcagcttaggaagattgttaagatggcttctaacgaggacgaacgcttaccacctattggactgctcacttctgacggtcggtccgaatgggccgaggcacggacagttttagtaaaggattccacaaacagagactcactggatatgattgagcggtgtatttgcctagtttgtctcgatgccccaggaggtgtggagctgtcggacacacaccgggctctgcagttactgcacgggggagggtactccaaaaacggggctaatagatggtacgacaagagtctgcaattcgtggtaggacgcgatggaacgtgtggggtagtttgcgagcattctccgtttgacggaattgtcttagtacaatgcactgaacatctgctcaagcatgtgactcagtcttcacgaaaactcatcagggctgactccgtgagtgaactgccagctccccgaagattgcgctggaagtgctctcctgagattcagggacatctggcaagctctgctgagaaactgcagcgaatcgtcaagaatctggactttatcgtgtataaattcgataattacgggaagacctttataaaaaagcaaaaatgttctcccgacgcgttcattcaggttgcgctccagctggcgttctaccggctacacagacgattggtgcctacgtacgagtccgccagcataaggcgtttccaggagggtcgggttgacaacattcgttcagccactcctgaagccctcgctttcgtccgcgcagtaactgatcacaaggctgcagttcccgcaagcgagaagctcctactactcaaagacgccattcgagctcagactgcgtacacagtgatggcaattaccggcatggctattgataatcacctgctggctttacgcgaactcgccagggccatgtgtaaggaattgcctgagatgtttatggatgagacctatctcatgtccaatcgcttcgttttatcgacgtctcaggttccgaccactacagagatgttttgctgttatggtccagtggtgcctaatggctatggtgcctgctacaatcctcaacccgaaaccatactcttctgcatttcatcttttcactcgtgtaaggagactagttcgagcaaattcgcaaaagcggttgaagaaagtctgatcgatatgagggatctgtgtagtctgctaccgcctaccgagagcaaaccactggctaccaaagagaaagctacacgacctagccagggacatcagccatag

SEQ ID NO: 54916 - DNA, 1893 bp, Artificial Sequence
  derived and/or modified sequence
atggctgcaaagacaccgtcttctgaagagagcggccttcccaaactgccagtgccacctcttcaacagacactcgcaacctatctccagtgtatgcgtcacctggtcagcgaggagcagttcaggaagagccaggctatcgttcagcagttcggggctcctggaggtctcggcgaaacgcttcagcagaagctactcgaacggcaagagaagaccgccaattgggtctctgaatactggctgaatgacatgtacctgaacaaccgcctggctttgcctgtgaatagtagcccagccgttattttcgccagacagcatttccccggaacagatgaccagttgcgtttcgcagctagcttgatttccggggtcctgtcttataaagccctgctcgattcacactccatcccaactgactgtgctaaggggcaactaagcgggcagccgctatgcatgaaacagtactatggcctgttctctagttaccgactccccggtcatacccaggataccctcgtggctcaaaattcttctatcatgcccgagcccgagcatgttattgtggcatgttgtaatcagttttttgtcctggatgtggtgatcaattttcgtagactgtctgaaggagatctgtttactcagttgcgcaagatcgttaaaatggcatctaatgaagacgagagacttcccccaataggtctcctgacctcagatgggaggagcgaatgggcagaagccagaactgtcctggtgaaggattcaactaatcgtgactcccttgatatgatcgagaggtgtatttgtctggtgtgcctagacgcccctggtggggtcgaactatctgacactcatagagctctgcagctgttgcatggcggaggttactcaaaaaatggggcaaacaggtggtacgataagtctctccagttcgtcgtggggagagatggcacatgcggagtggtgtgcgaacatagtccttttgacggtattgtcttggttcagtgcacggagcaccttcttaaacatgtgactcaaagcagccgcaaacttatccgcgcagactctgtgagtgagctgccagcacccagacgactgcggtggaagtgtagccccgagatacagggacacttggcaagcagtgctgaaaagctgcagaggatagtgaagaacctcgacttcatcgtgtataagtttgataattacggtaaaacttttattaaaaaacagaaatgtagcccagacgccttcattcaagtggcccttcaactggcattctatcgactccataggaggttggtgcctacgtacgaatctgcgagcatcaggagattccaagagggacgcgtggacaatatccgtagcgctacacccgaagcgctggcctttgtacgagcagttaccgaccacaaagccgcagtgcctgcttcggaaaagctgctcctactgaaggacgcgatccgagcccagaccgcctacactgtaatggcaataaccggtatggctattgacaatcacctgctagcgctacgggaactcgccagggccatgtgcaaagaactgcccgagatgtttatggatgaaacctatttaatgtcaaataggtttgtactatcaacgagccaggtgcccactacgaccgaaatgttctgttgctatgggccagtcgtgcccaatgggtatggggcttgctataacccccagcctgaaacgattcttttttgcatcagttcgtttcatagctgcaaagagacctcctccagcaagtttgctaaagctgtcgaagaaagtctgatcgatatgcgcgatttgtgctcacttctccccccaaccgagtcaaagcccctagcgacaaaagagaaagccaccagaccaagtcagggacaccagccatag

SEQ ID NO: 54917 - DNA, 1893 bp, Artificial Sequence
  derived and/or modified sequence
atggcagcaaagaccccttcaagcgaggagagtggcctccccaaattgcctgtcccccctttacagcaaaccctggctacctatcttcagtgcatgaggcacctcgtatctgaggagcaatttagaaagtctcaggcaatcgttcaacaattcggtgccccaggaggactaggcgagacactgcaacaaaagcttcttgagcggcaggagaagactgcgaattgggtgagcgagtactggctcaatgacatgtacctgaacaataggctcgctctccctgtgaattcctctcctgccgtgatctttgccagacagcatttccccggaactgatgaccagctgaggttcgccgcttctctgatctctggcgttctgagctacaaggcgctgctcgatagccactccatccccacagattgcgctaagggacagctgtctggtcaacctctgtgtatgaaacagtactacggactgttcagcagttaccgcctccccggacatacccaggacaccctggtggcgcagaattcttcgatcatgccagagcccgagcacgttattgttgcttgctgtaatcaattcttcgtcctggacgtcgtcatcaatttccggagactgagtgaaggagatttattcacgcagttgagaaagattgtgaaaatggcgtcaaatgaggacgagcggctgccgccaatcgggttgctgacatcagatggacgctccgagtgggcggaagccaggaccgttctcgtgaaggactcaacaaaccgcgattcattagacatgatagaacgatgcatctgcctggtgtgcctggatgctcctgggggagttgagctgtccgacactcaccgcgctctgcagctgctgcacggcggagggtacagcaagaacggtgccaaccgatggtatgacaagtctcttcagttcgtggttggacgggacggcacatgtggagtcgtatgcgagcacagtccctttgacggtatcgtcctcgttcagtgtacagaacaccttctcaaacacgtgacacagagcagtcgcaagctcatccgggctgactctgtttccgagctgcccgcacctaggcgcctaagatggaaatgcagccccgaaattcaggggcatctggcgtccagcgcagagaagttacagaggatcgtgaaaaacctggacttcatcgtgtataagtttgataactatggaaaaacattcatcaagaagcagaagtgttcccccgatgcatttatccaggtcgccctgcaacttgcattttaccgccttcaccgtcgtctggtacctacatacgaatccgcctctataagacggttccaagaggggcgtgtggataatatccgtagcgccacacccgaggctctcgcctttgttagggcagtgaccgaccacaaggcggcagtgcctgctagcgaaaagcttctgctgcttaaagacgcaattagggctcagacagcgtacacagtaatggccattaccggcatggccattgataatcacctattggcactgcgagagcttgctagggcgatgtgcaaagagctcccagagatgttcatggacgagacctacctgatgtctaataggtttgtgctgtctacctctcaagtccctactaccacagaaatgttctgctgttatggtcctgtagtgcccaatggatacggcgcatgctacaacccgcagcctgaaactattcttttctgtatttcaagctttcattcctgtaaagagacgtcctcttctaagtttgctaaggcagttgaggaatccctgatcgatatgagggacctgtgttcactgcttcctcctacagaatcgaagccactcgcaacaaaggaaaaggcaacaaggccttcccaagggcaccagccgtag

SEQ ID NO: 54918 - DNA, 2001 bp, Artificial Sequence
  derived and/or modified sequence
atgtggcccgagtgccgggatgaggccctgtcaaccgtcggtccgcatctgtgtataccggcacctggactgacaaagactccaatcctagagaaggtgccacggaaaatggccgctaagacaccctccagcgaagagtccggtctgccgaaactgcctgtgcctccgctacaacagacccttgcgacgtatctgcagtgcatgagacaccttgtgagcgaagaacagttccgcaagtcccaagccatagtgcagcagttcggagcccctggaggcctgggtgaaacattgcagcagaagctgctggaacggcaggaaaaaacagcgaattgggtatctgagtactggctcaatgacatgtatcttaataataggttggctctgcctgttaatagtagcccagctgtaattttcgcgaggcaacatttccccggaaccgacgatcagctgcggtttgcagcctctctgattagtggggtactctcctataaagctctcttagacagtcacagcattccgaccgactgtgcaaaaggccagctgtccggtcaaccactgtgcatgaagcagtactacggcctgttttctagctatcgcctgcccggacacacccaagacactctcgttgctcagaactccagtataatgcccgaacccgagcatgtgattgtagcctgctgcaatcagttttttgtgctcgacgttgtgattaatttcagacgcctttctgagggagacctttttacccagctcaggaagattgtcaagatggcctctaacgaagatgagcggcttccccctatcggcctcctgacgtccgacggccgtagcgaatgggcagaggcccgaacagtcctggtcaaggacagcaccaatagggattccctggacatgatagaaaggtgcatctgcctggtttgcctggatgcacctgggggagtggaactgagtgacacccatcgcgcacttcaactgctgcacgggggtgggtattcaaagaatggcgcaaaccgatggtatgacaagtcgctgcagtttgtggtcggcagggatgggacctgtggggtggtgtgcgaacattcccctttcgacggcatcgtcctagtacaatgtacagaacaccttttgaagcacgttacacaatccagccggaagttgatcagagcagactcagtcagcgaactgcctgcccctcgaagacttcgctggaagtgcagccccgaaatacagggtcacctcgcatcctcagcggaaaagctccaacggatcgtgaagaacctggattttattgtttataagttcgataactatgggaagacattcatcaagaaacagaagtgctctcctgatgccttcatccaagtcgcattgcagctcgcattctaccggctccacagaaggctcgtccccacctatgaatcagctagcattaggcgatttcaagaagggagggtagacaacatcagatctgccacaccggaggccctggctttcgtgagggcagtgactgaccacaaagccgcagtccctgcttctgagaagctcctgttgctcaaggacgctatccgggcacagacagcttataccgtgatggctattaccggtatggccattgacaatcatcttctggccttaagagagctcgcccgagccatgtgcaaagaactgcctgagatgttcatggatgagacgtacctaatgtctaaccgttttgtgctgagcacgagtcaagtccccacaactacggagatgttctgttgctacggacccgtggtgccaaacggctatggagcttgttacaacccacagccagagaccattctgttttgtatttcttcctttcatagttgtaaggagacctcaagcagcaagtttgccaaggctgttgaagagtctctcatcgacatgcgtgatctttgcagtctgctgccacctacagagagcaagccactggctacaaaggagaaagcaacacggccttcccagggacatcagccatag

SEQ ID NO: 54919 - DNA, 1638 bp, Artificial Sequence
  derived and/or modified sequence
atggccgctaagaccccaagcagtgaggagagtggattgccaaagctgcccgtgccccctctgcagcagaccctagcaacttatttgcagtgtatgaggcacctagtatccgaggaacagttccgtaaatcccaggcaattgtgcagcagttcggcgcacccggaggcctgggcgaaactctccagcagaagctgttagagcgccaggagaaaaccgccaactgggtcagtgaatattggctcaatgacatgtatttaaacaatcgcttggctttgccagttaattcgtcacccgctgttatcttcgccagacagcatttccctggcaccgacgaccagttaagattcgctgcatccctgataagcggagtgttatcctacaaagccctactggattcacactcaattcccaccgactgtgcgaaaggccaactctccggccagccgctttgcatgaaacaatattatggactgttctcctcatatcgcctacccggacatactcaggatacgctggtcgctcagaactcatcaatcatgcccgagcctgaacatgttattgtggcatgttgtaatcagttcttcgtgttagatgtggtcataaacttcagacgtcttagcgaaggcgaccttttcactcagctgcgcaagatcgtcaaaatggcatctaacgaagacgagcggctgcctcccatcggactgttgacttctgatggtcggtccgagtgggcggaagcgcgtaccgtgctagtgaaggattcgacaaaccgagactctctggacatgatcgagcgctgcatttgtttggtgtgtttggatgcacccggaggggtggagctttcagatacacaccgtgccctccagctgttacacggagggggttattcaaaaaacggcgctaacagatggtatgataaaagcttgcagtttgttgtcggcagagatgggacatgtggggttgtgtgtgagcatagccctttcgatggaattgtattggtccagtgtaccgagcacctgttgaagcacgtgacccagagcagcagaaaattgattcgggctgattccgtgtccgagttaccagccccacgcagattgcgctggaagtgttctcctgagatccagggccacctcgcctcgtccgctgaaaaactccagcggattgtgaagaacctggactttatcgtgtacaaattcgataattacggcaagacatttatcaagaaacagaagtgtagtccggatgctttcattcaagttgcactccagcttgccttctatcgcttgcaccgcaggctcgtaccaacatacgagtctgcttccatccgcaggttccaggaagggagagtggataacatacgtagcgccacaccagaggcgctggcctttgtgagagccgtcactgaccacaaggcagccgttcccgcttctgagaagctgttgttgctgaaggacgccattcgagcacagaccgcttacacagtaatggcaatcaccggaatggccatagataaccacctcttagccttacgcgagcttgctcgggctatgtgcaaggagttacccgagatgttcatggacgagacatatctcatgtcaaataggtttgtactgtctacctcccagctatgttggccatag

SEQ ID NO: 54920 - DNA, 2114 bp, Artificial Sequence
  derived and/or modified sequence
cccgccccgttgaggctttgagaaaggagtaggagccgagcattccggcagaggaagaaaaacggcccatcttttagagtccgacctctggaaatgtccacacctctgcatccctgcaccaggactcaccaagacgcccatcctggaaaaggtcccccgtaagatggcagcaaaaactcccagcagtgaggagtctgggctgcccaaactgcccgtgcccccgctgcagcagaccctggccacgtacctgcagtgcatgcgacacttggtgtctgaggagcagttcaggaagagccaggccattgtgcagcagtttggggcccctggtggcctcggcgagaccctgcagcagaaactcctggagcggcaggagaagacagccaactgggtgtctgagtactggctgaatgacatgtatctcaacaaccgcctggccctgcctgtcaactccagccctgccgtgatctttgctcggcagcacttccctggcaccgatgaccagctgaggtttgcagccagcctcatctctggtgtactcagctacaaggccctgctggacagccactccattcccactgactgtgccaaaggccagctgtcagggcagcccctttgcatgaagcaatactatgggctcttctcctcctaccggctccccggccatacccaggacacgctggtggctcagaacagcagcatcatgccggagcctgagcacgtcatcgtagcctgctgcaatcagttctttgtcttggatgttgtcattaatttccgccgtctcagtgagggggatctgttcactcagttgagaaagatagtcaaaatggcttccaacgaggacgagcgtttgcctccaattggcctgctgacgtctgacgggaggagcgagtgggccgaggccaggacggtcctcgtgaaagactccaccaaccgggactcgctggacatgattgagcgctgcatctgccttgtatgcctggacgcgccaggaggcgtggagctcagcgacacccacagggcactccagctccttcacggcggaggctacagcaagaacggggccaatcgctggtacgacaagtccctgcagtttgtggtgggccgagacggcacctgcggtgtggtgtgcgaacactccccattcgatggcatcgtcctggtgcagtgcactgagcatctgctcaagcacgtgacgcagagcagcaggaagctgatccgagcagactccgtcagcgagctccccgccccccggaggctgcggtggaaatgctccccggaaattcaaggccacttagcctcctcggcagaaaaacttcaacgaatagtaaagaaccttgacttcattgtctataagtttgacaactatgggaaaacattcattaagaagcagaaatgcagccctgatgccttcatccaggtggccctccagctggccttctacaggctccatcgaagactggtgcccacctacgagagcgcgtccatccgccgattccaggagggacgcgtggacaacatcagatcggccactccagaggcactggcttttgtgagagccgtgactgaccacaaggctgctgtgccagcttctgagaagcttctgctcctgaaggatgccatccgtgcccagactgcatacacagtcatggccataacagggatggccattgacaaccacctgctggcactgcgggagctggcccgggccatgtgcaaggagctgcccgagatgttcatggatgaaacctacctgatgagcaaccggtttgtcctctccactagccaggtgcccacaaccacggagatgttctgctgctatggtcctgtggtcccaaatgggtatggtgcctgctacaacccccagccagagaccatccttttctgcatctctagctttcacagctgcaaagagacttcttctagcaagtttgcaaaagctgtggaagaaagcctcattgacatgagagacctctgcagtctgctgccgcctactgagagcaagccattggcaacaaaggaaaaagccacgaggcccagccagggacaccaaccttgactcctgccactaggtttcacctcccaaacccagcctctagaacagccagaccctgcag

SEQ ID NO: 54921 - DNA, 2528 bp, Artificial Sequence
  derived and/or modified sequence
aaatgctgagctaggggcaggaggcatgggcgggacagtgttctgtgcccccttctagagcctaaatttgttgcccgagttcctccgggaagcgctccgggtagattctgggggccgggagctgagatccctgggcggggagctggggaagggatggggctgaggacagcgaagaagagggggcttgggggaggggggaaatggaagagagaggagggaggaggtacaagaggaaggagagaagtgcggccagcttgctttctccagtcgggtggccgcggggacccgggcgacgtcggaggccctgccgggaacccaggctgcagcccccacccccgcgctgcgacacgccccccaccccttccggctcacacccccgcccacactcctgagtggtgcggtgcagcgtcggccgaggcagcagagccgaggagagcagtgagggaattcaccctactccacaccagagatgtggccggaatgcagagatgaagcactgagcacagtaggtccacacctctgcatccctgcaccaggactcaccaagacgcccatcctggaaaaggtcccccgtaagatggcagcaaaaactcccagcagtgaggagtctgggctgcccaaactgcccgtgcccccgctgcagcagaccctggccacgtacctgcagtgcatgcgacacttggtgtctgaggagcagttcaggaagagccaggccattgtgcagcagtttggggcccctggtggcctcggcgagaccctgcagcagaaactcctggagcggcaggagaagacagccaactgggtgtctgagtactggctgaatgacatgtatctcaacaaccgcctggccctgcctgtcaactccagccctgccgtgatctttgctcggcagcacttccctggcaccgatgaccagctgaggtttgcagccagcctcatctctggtgtactcagctacaaggccctgctggacagccactccattcccactgactgtgccaaaggccagctgtcagggcagcccctttgcatgaagcaatactatgggctcttctcctcctaccggctccccggccatacccaggacacgctggtggctcagaacagcagcatcatgccggagcctgagcacgtcatcgtagcctgctgcaatcagttctttgtcttggatgttgtcattaatttccgccgtctcagtgagggggatctgttcactcagttgagaaagatagtcaaaatggcttccaacgaggacgagcgtttgcctccaattggcctgctgacgtctgacgggaggagcgagtgggccgaggccaggacggtcctcgtgaaagactccaccaaccgggactcgctggacatgattgagcgctgcatctgccttgtatgcctggacgcgccaggaggcgtggagctcagcgacacccacagggcactccagctccttcacggcggaggctacagcaagaacggggccaatcgctggtacgacaagtccctgcagtttgtggtgggccgagacggcacctgcggtgtggtgtgcgaacactccccattcgatggcatcgtcctggtgcagtgcactgagcatctgctcaagcacgtgacgcagagcagcaggaagctgatccgagcagactccgtcagcgagctccccgccccccggaggctgcggtggaaatgctccccggaaattcaaggccacttagcctcctcggcagaaaaacttcaacgaatagtaaagaaccttgacttcattgtctataagtttgacaactatgggaaaacattcattaagaagcagaaatgcagccctgatgccttcatccaggtggccctccagctggccttctacaggctccatcgaagactggtgcccacctacgagagcgcgtccatccgccgattccaggagggacgcgtggacaacatcagatcggccactccagaggcactggcttttgtgagagccgtgactgaccacaaggctgctgtgccagcttctgagaagcttctgctcctgaaggatgccatccgtgcccagactgcatacacagtcatggccataacagggatggccattgacaaccacctgctggcactgcgggagctggcccgggccatgtgcaaggagctgcccgagatgttcatggatgaaacctacctgatgagcaaccggtttgtcctctccactagccaggtgcccacaaccacggagatgttctgctgctatggtcctgtggtcccaaatgggtatggtgcctgctacaacccccagccagagaccatccttttctgcatctctagctttcacagctgcaaagagacttcttctagcaagtttgcaaaagctgtggaagaaagcctcattgacatgagagacctctgcagtctgctgccgcctactgagagcaagccattggcaacaaaggaaaaagccacgaggcccagccagggacaccaaccttgactcctgccactaggtttcacctcccaaacccagcctctagaacagccagaccctgcag

SEQ ID NO: 54922 - DNA, 1839 bp, Artificial Sequence
  derived and/or modified sequence
gcggtgcagcgtcggccgaggcagcagagccgaggagagcaggtccacacctctgcatccctgcaccaggactcaccaagacgcccatcctggaaaaggtcccccgtaagatggcagcaaaaactcccagcagtgaggagtctgggctgcccaaactgcccgtgcccccgctgcagcagaccctggccacgtacctgcagtgcatgcgacacttggtgtctgaggagcagttcaggaagagccaggccattgtgcagcagtttggggcccctggtggcctcggcgagaccctgcagcagaaactcctggagcggcaggagaagacagccaactgggtgtctgagtactggctgaatgacatgtatctcaacaaccgcctggccctgcctgtcaactccagccctgccgtgatctttgctcggcagcacttccctggcaccgatgaccagctgaggtttgcagccagcctcatctctggtgtactcagctacaaggccctgctggacagccactccattcccactgactgtgccaaaggccagctgtcagggcagcccctttgcatgaagcaatactatgggctcttctcctcctaccggctccccggccatacccaggacacgctggtggctcagaacagcagcatcatgccggagcctgagcacgtcatcgtagcctgctgcaatcagttctttgtcttggatgttgtcattaatttccgccgtctcagtgagggggatctgttcactcagttgagaaagatagtcaaaatggcttccaacgaggacgagcgtttgcctccaattggcctgctgacgtctgacgggaggagcgagtgggccgaggccaggacggtcctcgtgaaagactccaccaaccgggactcgctggacatgattgagcgctgcatctgccttgtatgcctggacgcgccaggaggcgtggagctcagcgacacccacagggcactccagctccttcacggcggaggctacagcaagaacggggccaatcgctggtacgacaagtccctgcagtttgtggtgggccgagacggcacctgcggtgtggtgtgcgaacactccccattcgatggcatcgtcctggtgcagtgcactgagcatctgctcaagcacgtgacgcagagcagcaggaagctgatccgagcagactccgtcagcgagctccccgccccccggaggctgcggtggaaatgctccccggaaattcaaggccacttagcctcctcggcagaaaaacttcaacgaatagtaaagaaccttgacttcattgtctataagtttgacaactatgggaaaacattcattaagaagcagaaatgcagccctgatgccttcatccaggtggccctccagctggccttctacaggctccatcgaagactggtgcccacctacgagagcgcgtccatccgccgattccaggagggacgcgtggacaacatcagatcggccactccagaggcactggcttttgtgagagccgtgactgaccacaaggctgctgtgccagcttctgagaagcttctgctcctgaaggatgccatccgtgcccagactgcatacacagtcatggccataacagggatggccattgacaaccacctgctggcactgcgggagctggcccgggccatgtgcaaggagctgcccgagatgttcatggatgaaacctacctgatgagcaaccggtttgtcctctccactagccagctgtgttggccatagatggacatgaggtcatcctagagaagatagaagactggaatgtggtggaactcatggtgaatgaagaagtcatcttccactgcaacattaa

SEQ ID NO: 54923 - DNA, 1893 bp, Artificial Sequence
  derived and/or modified sequence
atggccgccaagacccccagcagcgaggagagcggcctgcccaagctgcccgtgccccccctgcagcagaccctggccacctacctgcagtgcatgagacacctggtgagcgaggagcagttcagaaagagccaggccatcgtgcagcagttcggcgcccccggcggcctgggcgagaccctgcagcagaagctgctggagagacaggagaagaccgccaactgggtgagcgagtactggctgaacgacatgtacctgaacaacagactggccctgcccgtgaacagcagccccgccgtgatcttcgccagacagcacttccccggcaccgacgaccagctgagattcgccgccagcctgatcagcggcgtgctgagctacaaggccctgctggacagccacagcatccccaccgactgcgccaagggccagctgagcggccagcccctgtgcatgaagcagtactacggcctgttcagcagctacagactgcccggccacacccaggacaccctggtggcccagaacagcagcatcatgcccgagcccgagcacgtgatcgtggcctgctgcaaccagttcttcgtgctggacgtggtgatcaacttcagaagactgagcgagggcgacctgttcacccagctgagaaagatcgtgaagatggccagcaacgaggacgagagactgccccccatcggcctgctgaccagcgacggcagaagcgagtgggccgaggccagaaccgtgctggtgaaggacagcaccaacagagacagcctggacatgatcgagagatgcatctgcctggtgtgcctggacgcccccggcggcgtggagctgagcgacacccacagagccctgcagctgctgcacggcggcggctacagcaagaacggcgccaacagatggtacgacaagagcctgcagttcgtggtgggcagagacggcacctgcggcgtggtgtgcgagcacagccccttcgacggcatcgtgctggtgcagtgcaccgagcacctgctgaagcacgtgacccagagcagcagaaagctgatcagagccgacagcgtgagcgagctgcccgcccccagaagactgagatggaagtgcagccccgagatccagggccacctggccagcagcgccgagaagctgcagagaatcgtgaagaacctggacttcatcgtgtacaagttcgacaactacggcaagaccttcatcaagaagcagaagtgcagccccgacgccttcatccaggtggccctgcagctggccttctacagactgcacagaagactggtgcccacctacgagagcgccagcatcagaagattccaggagggcagagtggacaacatcagaagcgccacccccgaggccctggccttcgtgagagccgtgaccgaccacaaggccgccgtgcccgccagcgagaagctgctgctgctgaaggacgccatcagagcccagaccgcctacaccgtgatggccatcaccggcatggccatcgacaaccacctgctggccctgagagagctggccagagccatgtgcaaggagctgcccgagatgttcatggacgagacctacctgatgagcaacagattcgtgctgagcaccagccaggtgcccaccaccaccgagatgttctgctgctacggccccgtggtgcccaacggctacggcgcctgctacaacccccagcccgagaccatcctgttctgcatcagcagcttccacagctgcaaggagaccagcagcagcaagttcgccaaggccgtggaggagagcctgatcgacatgagagacctgtgcagcctgctgccccccaccgagagcaagcccctggccaccaaggagaaggccaccagacccagccagggccaccagccctag

SEQ ID NO: 54924 - DNA, 2001 bp, Artificial Sequence
  derived and/or modified sequence
atgtggcccgagtgcagagacgaggccctgagcaccgtgggcccccacctgtgcatccccgcccccggcctgaccaagacccccatcctggagaaggtgcccagaaagatggccgccaagacccccagcagcgaggagagcggcctgcccaagctgcccgtgccccccctgcagcagaccctggccacctacctgcagtgcatgagacacctggtgagcgaggagcagttcagaaagagccaggccatcgtgcagcagttcggcgcccccggcggcctgggcgagaccctgcagcagaagctgctggagagacaggagaagaccgccaactgggtgagcgagtactggctgaacgacatgtacctgaacaacagactggccctgcccgtgaacagcagccccgccgtgatcttcgccagacagcacttccccggcaccgacgaccagctgagattcgccgccagcctgatcagcggcgtgctgagctacaaggccctgctggacagccacagcatccccaccgactgcgccaagggccagctgagcggccagcccctgtgcatgaagcagtactacggcctgttcagcagctacagactgcccggccacacccaggacaccctggtggcccagaacagcagcatcatgcccgagcccgagcacgtgatcgtggcctgctgcaaccagttcttcgtgctggacgtggtgatcaacttcagaagactgagcgagggcgacctgttcacccagctgagaaagatcgtgaagatggccagcaacgaggacgagagactgccccccatcggcctgctgaccagcgacggcagaagcgagtgggccgaggccagaaccgtgctggtgaaggacagcaccaacagagacagcctggacatgatcgagagatgcatctgcctggtgtgcctggacgcccccggcggcgtggagctgagcgacacccacagagccctgcagctgctgcacggcggcggctacagcaagaacggcgccaacagatggtacgacaagagcctgcagttcgtggtgggcagagacggcacctgcggcgtggtgtgcgagcacagccccttcgacggcatcgtgctggtgcagtgcaccgagcacctgctgaagcacgtgacccagagcagcagaaagctgatcagagccgacagcgtgagcgagctgcccgcccccagaagactgagatggaagtgcagccccgagatccagggccacctggccagcagcgccgagaagctgcagagaatcgtgaagaacctggacttcatcgtgtacaagttcgacaactacggcaagaccttcatcaagaagcagaagtgcagccccgacgccttcatccaggtggccctgcagctggccttctacagactgcacagaagactggtgcccacctacgagagcgccagcatcagaagattccaggagggcagagtggacaacatcagaagcgccacccccgaggccctggccttcgtgagagccgtgaccgaccacaaggccgccgtgcccgccagcgagaagctgctgctgctgaaggacgccatcagagcccagaccgcctacaccgtgatggccatcaccggcatggccatcgacaaccacctgctggccctgagagagctggccagagccatgtgcaaggagctgcccgagatgttcatggacgagacctacctgatgagcaacagattcgtgctgagcaccagccaggtgcccaccaccaccgagatgttctgctgctacggccccgtggtgcccaacggctacggcgcctgctacaacccccagcccgagaccatcctgttctgcatcagcagcttccacagctgcaaggagaccagcagcagcaagttcgccaaggccgtggaggagagcctgatcgacatgagagacctgtgcagcctgctgccccccaccgagagcaagcccctggccaccaaggagaaggccaccagacccagccagggccaccagccctag

SEQ ID NO: 54925 - DNA, 1638 bp, Artificial Sequence
  derived and/or modified sequence
atggccgccaagacccccagcagcgaggagagcggcctgcccaagctgcccgtgccccccctgcagcagaccctggccacctacctgcagtgcatgagacacctggtgagcgaggagcagttcagaaagagccaggccatcgtgcagcagttcggcgcccccggcggcctgggcgagaccctgcagcagaagctgctggagagacaggagaagaccgccaactgggtgagcgagtactggctgaacgacatgtacctgaacaacagactggccctgcccgtgaacagcagccccgccgtgatcttcgccagacagcacttccccggcaccgacgaccagctgagattcgccgccagcctgatcagcggcgtgctgagctacaaggccctgctggacagccacagcatccccaccgactgcgccaagggccagctgagcggccagcccctgtgcatgaagcagtactacggcctgttcagcagctacagactgcccggccacacccaggacaccctggtggcccagaacagcagcatcatgcccgagcccgagcacgtgatcgtggcctgctgcaaccagttcttcgtgctggacgtggtgatcaacttcagaagactgagcgagggcgacctgttcacccagctgagaaagatcgtgaagatggccagcaacgaggacgagagactgccccccatcggcctgctgaccagcgacggcagaagcgagtgggccgaggccagaaccgtgctggtgaaggacagcaccaacagagacagcctggacatgatcgagagatgcatctgcctggtgtgcctggacgcccccggcggcgtggagctgagcgacacccacagagccctgcagctgctgcacggcggcggctacagcaagaacggcgccaacagatggtacgacaagagcctgcagttcgtggtgggcagagacggcacctgcggcgtggtgtgcgagcacagccccttcgacggcatcgtgctggtgcagtgcaccgagcacctgctgaagcacgtgacccagagcagcagaaagctgatcagagccgacagcgtgagcgagctgcccgcccccagaagactgagatggaagtgcagccccgagatccagggccacctggccagcagcgccgagaagctgcagagaatcgtgaagaacctggacttcatcgtgtacaagttcgacaactacggcaagaccttcatcaagaagcagaagtgcagccccgacgccttcatccaggtggccctgcagctggccttctacagactgcacagaagactggtgcccacctacgagagcgccagcatcagaagattccaggagggcagagtggacaacatcagaagcgccacccccgaggccctggccttcgtgagagccgtgaccgaccacaaggccgccgtgcccgccagcgagaagctgctgctgctgaaggacgccatcagagcccagaccgcctacaccgtgatggccatcaccggcatggccatcgacaaccacctgctggccctgagagagctggccagagccatgtgcaaggagctgcccgagatgttcatggacgagacctacctgatgagcaacagattcgtgctgagcaccagccagctgtgctggccctag

SEQ ID NO: 54926 - protein, 193 aa, Artificial Sequence
  derived and/or modified sequence
MEPLASNIQVLLQAAEFLERREREAEHGYASLCPHRSPGPIHRRKKRPPQAPGAQDSGRSVHNELEKRRRAQLKRCLERLKQQMPLGADCARYTTLSLLRRARMHIQKLEDQEQRARQLKERLRSKQQSLQRQLEQLRGLAGAAERERLRADSLDSSGLSSERSDSDQVLPNENGGTPNHRPTGRGNNISSHH

SEQ ID NO: 54927 - DNA, 1167 bp, Artificial Sequence
  derived and/or modified sequence
atggaacctctcgcttctaacatccaagtcctgctgcaggctgctgagttccttgagcgaagggaaagagaagcagagcatgggtacgcatctctctgcccacatcgatcccctggtcctatccatcgacgaaagaagagaccacctcaggctcctggcgctcaggacagcggtcgctcggtacataatgagctggaaaagcgcaggagggcacaactgaagcggtgcctcgagcgcctcaaacaacagatgcccctcggtgcagactgcgcccgatacactaccctttccctgttgcgccgagcccgcatgcatatccagaaacttgaggaccaggagcaacgggctagacagctgaaggagcggcttcgctctaagcagcaatcgctgcagagacagctcgagcagttacgcgggctggcaggggcggctgagagagagcgtctacgcgccgactccttggactcctctggactgagctcagaaagatctgactccgatcagggagaatgccctgaggccgaaggtttgtgcgggccacgcggagagccaggactcttgactggcccgctcccagctcagcggtcttggcgatggatgtggagggcgtggtgcctcggggtgaggccttcttgctgtggggcttccagccctgcccggtccaccgccacacgcaccgcggcagccccaggatatgatgtgccccatcctgggagggccagcgcattatactcctgccaagcacatctaccaggaaggtctccaccacaggcgttcagggccgcgaggtctcacctgctggagtggactaagcggaccctggtgtgggagcaggttctgccaaaacaccccgcagcgggctgtcaggctggtccgctggagggaaaaggacaggactctagcggcccgccctggacaccagctgggcaggccgcatgggcacgcgctcaagcttttggcagcgctgccccaaaggggactggatctctcctagggctgtttccgtcttggacaaggccaccagccttcgcaagccataagctttattccatcttcataaagtctctattccacaacttcccaagcatcgtgctgcccaatgagaacgggggtaccccaaatcaccgtccaacaggacgcggaaacaatataagttctcatcactag

SEQ ID NO: 54928 - DNA, 582 bp, Artificial Sequence
  derived and/or modified sequence
atggaacccctcgccagtaacatccaggtcctgctgcaagcggccgagttcctagagcgacgagaacgtgaagccgagcacgggtacgcttcgctgtgccctcataggtcccctggccctatccatcgccgtaaaaaaagaccaccgcaagcacctggcgcacaggactctggaaggtctgtccataatgaactggaaaaaagaagaagagctcaactgaagcgatgcctggaaaggctcaagcagcagatgcccctaggcgccgactgcgccaggtatactactctgagcctgctgcgaagagctaggatgcacattcagaaactcgaggaccaggagcaaagggcaagacaattgaaagaaaggctgcgttcgaagcagcaatccctccagcggcagttagaacagttgcgcggtttggccggtgctgccgagcgagaacgactgcgcgcagacagtcttgacagcagcgggctgtcctctgagaggtccgactcagaccaggtgctgccaaacgagaacggtggcactccaaaccatcggccaaccggcaggggcaacaacataagctcccaccactag

SEQ ID NO: 54929 - DNA, 1167 bp, Artificial Sequence
  derived and/or modified sequence
atggagcccctggccagcaacatccaggtgctgctgcaggccgctgagttcctggagcggcgggagcgggaggccgagcacggctacgccagcctgtgcccccacaggagccctggccccatccacaggaggaagaagaggcctccccaggcccctggggcccaggacagcggccgctctgtgcacaatgagctggagaagagaagaagagcccagctgaagcgctgcctggagcggctgaagcagcagatgcccctgggcgctgactgtgcccgctacaccaccctgagcctgctgcggcgggccaggatgcacatccagaagctggaggaccaggagcagagggcccggcagctgaaggagcggctgcggagcaagcagcagagcctgcagaggcagctggagcagctgcggggcctggccggggctgctgagcgggagcggctgcgggctgacagcctggacagcagcggcctgagcagcgagaggagtgacagcgaccagggcgagtgcccagaggccgagggcctgtgtggccccagaggagagcccggcctgctgaccggccccctgcctgcccagaggtcctggcgctggatgtggagggcctggtgcctgggcgtgcggcccagctgctgcggggccagcagccctgcccggagcacagccaccaggacagctgctgcccctggctatgatgtgccccaccctggccgggccagcgccctgtacagctgccaggcccacctgcccggccgcagccccccccaggccttccgggccgcccggagccacctgctggagtggaccaagaggaccctggtgtgggagcaggtgctgcccaagcaccctgctgctggctgccaggccggccccctggagggcaagggccaggacagcagcggccccccctggaccccagctggccaggccgcctgggcccgggcccaggcctttggatctgctgcccccaagggcaccggcagcctgctgggcctcttccccagctggacccggcccccagcctttgccagccacaagctgtacagcatcttcatcaagagcctcttccacaacttccccagcatcgtgctgcccaatgaaaatggaggcacccccaaccaccggcccaccggccggggcaacaacatcagcagccaccactag

SEQ ID NO: 54930 - DNA, 582 bp, Artificial Sequence
  derived and/or modified sequence
atggagcccctggccagcaacatccaggtgctgctgcaggccgctgagttcctggagcggcgggagcgggaggccgagcacggctacgccagcctgtgcccccacaggagccctggccccatccacaggaggaagaagaggcctccccaggcccctggggcccaggacagcggccgctctgtgcacaatgagctggagaagagaagaagagcccagctgaagcgctgcctggagcggctgaagcagcagatgcccctgggcgctgactgtgcccgctacaccaccctgagcctgctgcggcgggccaggatgcacatccagaagctggaggaccaggagcagagggcccggcagctgaaggagcggctgcggagcaagcagcagagcctgcagaggcagctggagcagctgcggggcctggccggggctgctgagcgggagcggctgcgggctgacagcctggacagcagcggcctgagcagcgagaggagtgacagcgaccaggtgctgcccaatgaaaatggaggcacccccaaccaccggcccaccggccggggcaacaacatcagcagccaccactag

SEQ ID NO: 54931 - DNA, 1534 bp, Artificial Sequence
  derived and/or modified sequence
aaaagtgctgcagccgcttgctccggccggcaccctaggccggcccgccgccagctgtcgccgacatggaacccttggccagcaacatccaggtcctgctgcaggcggccgagttcctggagcgccgtgagagagaggccgagcatggttatgcgtccctgtgcccgcatcgcagtccaggccccatccacaggaggaagaagcgacccccccaggctcctggcgcgcaggacagcgggcggtcagtgcacaatgaactggagaagcgcaggagggcccagttgaagcggtgcctggagcggctgaagcagcagatgcccctgggggccgactgtgcccggtacaccacgctgagcctgctgcgccgtgccaggatgcacatccagaagctggaggatcaggagcagcgggcccgacagctcaaggagaggctgcgcagcaagcagcagagcctgcagcggcagctggagcagctccgggggctggcaggggcggccgagcgggagcggctgcgggcggacagtctggactcctcaggcctctcctctgagcgctcagactcagaccaaggtgagtgccccgaggctgaggggttgtgtggccctcggggcgagccaggtcttctgaccggacccctccccgcgcagaggagctggaggtggatgtggagagcctggtgtttgggggtgaggccgagctgctgcggggcttcgtcgccggccaggagcacagctactcgcacggcggcggcgcctggctatgatgttcctcacccagggcgggcctctgccctctactcgtgccaggcccacttgccaggcaggagccctccccaagccttcagggctgctcggagtcacctgttggaatggactaaaaggacccttgtgtgggaacaggtgctccccaaacaccctgctgctggctgccaggcaggccctctggaagggaaggggcaggactcatcaggacctccctggacccctgcagggcaggcagcttgggcccgagcccaagcatttggctctgctgcccccaaggggacaggaagcctcttgggcctcttcccttcctggacaaggccccctgcctttgcctcacataaactgtacagtattttcattaaaagcctctttcataacttcccgtccatagtcttgcctaatgaaaacgggggaactcccaaccacagacccactggaagaggaaataatatcagttcccatcactgacactgttggccgtgccaggcagtgcacttaattctcacaacttgaggctgttctgtctccacttcacggatggtagaaatgaggctgagtgacgtgactcgcctgaggtccaaaaacagtgaagccaagattcaaaccagagccttccgactccagagctggggccaactgaattcaacaagtatttattgagtgtctattatgtgctagatactgagacacatcagagaacaaaaccaaaagccctgcccttgtcgggcttacagtctagcacttaccgccagttaacctgcaggctacct

SEQ ID NO: 54932 - DNA, 2269 bp, Artificial Sequence
  derived and/or modified sequence
aacaaaagtgctgcagccgcttgctccggccggcaccctaggccggcccgccgccagctgtcgccgacatggaacccttggccagcaacatccaggtcctgctgcaggcggccgagttcctggagcgccgtgagagagaggccgagcatggttatgcgtccctgtgcccgcatcgcagtccaggccccatccacaggaggaagaagcgacccccccaggctcctggcgcgcaggacagcgggcggtcagtgcacaatgaactggagaagcgcaggagggcccagttgaagcggtgcctggagcggctgaagcagcagatgcccctgggggccgactgtgcccggtacaccacgctgagcctgctgcgccgtgccaggatgcacatccagaagctggaggatcaggagcagcgggcccgacagctcaaggagaggctgcgcagcaagcagcagagcctgcagcggcagctggagcagctccgggggctggcaggggcggccgagcgggagcggctgcgggcggacagtctggactcctcaggcctctcctctgagcgctcagactcagaccaagtcttgcctaatgaaaacgggggaactcccaaccacagacccactggaagaggaaataatatcagttcccatcactgacactgttggccgtgccaggcagtgcacttaattctcacaacttgaggctgttctgtctccacttcacggatggtagaaatgaggctgagtgacgtgactcgcctgaggtccaaaaacagtgaagccaagattcaaaccagagccttccgactccagagctggggccaactgaattcaacaagtatttattgagtgtctattatgtgctagatactgagacacatcagagaacaaaaccaaaagccctgcccttgtcgggcttacagtctagcacttaccgccagttaacctgcaggctacctggagccccgggcaagtcaccgcacctctgtgcctcggtcctcagctgcccaatgggagaataagcagacctggctcagacatgaatcatgtgcttggtgtactgcagatgccaaactgcatccccacaacccaccacgtagacagcagacagggctggaagttgatttttaatgataaagtacaatgaagggagggcagagaggctaagcctagctgtctggggtgctgtggtggtggtagactggctacacaaactgttgctgctgctgctgcttcttggtggccgccttgctggcgaggtccttggccttctctgtagctgccagtgccgtctcctttgccttctccttggcttccttggctgtctcaacaagtgttttggaaggggcctcgcctgtcgcgaacggcaggtggctgcctttagaagatgcctgaaagaccaacctaatttccctcccccatgacaccaatctcctctgggccaggctccactaaaaaggtggtattcaccctcctcccacccccagtacagacaaggagtcccagctcagagcagggcaatgactaacccagactccacgcccgctaggctgaatgagcctctccctatgaggaatatccacatacccagaaactcaccttgcagcttagccaagatatattcaaaacccttcatagtcttggtcacgttgcttttgaatcgggcaagaccaaattcctggcatgagatgagaatgggaaggatactgagttgcccactgaccccagcccagccccaacaccgaaagcactgggtcccagagccccagcagccccaacaacactgctcacctggacagctctggagacaccaaataagctagaggagacccaggcttcccggcggatttcagtccagccactgttgtcagagttcacacagtaaacacatcgttcctccaccacctatgcagaggccaaccacaatcgtggaacagtctttcattttgccaacttgcacataaatctgactccctgtcacttttcatgaggcgaagcaatacaatgaaaatccattccttcccctgactgcacctccaagtggcactgacagaacaagaagccataaataaggtcgttttgctctcgaaaacctctcttctgactcttaaactagaaggcaaaaggtctctctcttgagatcaacaaagggccttccagcccatcctgctcctggattttgttttgtgcatctagacgcatgcagtgttttagccgccttccaccagctgcagctctggagcttcctgacagtccaaataaaaacatttgcccgg

SEQ ID NO: 54933 - DNA, 1167 bp, Artificial Sequence
  derived and/or modified sequence
atggagcccctggccagcaacatccaggtgctgctgcaggccgccgaatttcttgagagaagggagcgggaggcagaacacggttatgcatctctttgtccccaccgcagccctggaccgatccatcgaagaaaaaaacgacctcctcaggccccaggagcccaggatagtgggaggtccgtgcataatgaactggaaaaacgccgaagggcgcaactcaagaggtgcttggaacgtctgaagcagcaaatgccactcggagcagactgcgcacgatacactacactctcattactgcgaagggctcgtatgcatatacaaaaactcgaggaccaggaacagagagccaggcagctgaaggaacgtctgcggtccaagcagcagagcctgcagcggcaacttgagcaactcagagggttagcgggagcagccgaaagggagcgcttacgcgccgacagtctggacagttccggactgagcagcgaaaggtccgattcagatcagggagagtgcccagaggctgaggggctatgcggaccaaggggcgagcccgggctactgaccggaccgttgccagctcagcggagttggaggtggatgtggagggcatggtgcctgggcgtacgccctagctgttgcggagcttcttctcctgcccgctccacggcaacaagaactgccgccgcccctggttacgatgtgcctcacccaggcagagccagcgctttatattcgtgtcaggcacatctgcccggaaggtctccccctcaggcctttagagccgcccgatcacatctcttagagtggactaaacgtactctcgtgtgggagcaggtcctgccaaaacatccagcagccggttgccaggctgggccccttgagggcaagggccaggattctagcggccccccatggacacccgcaggccaggctgcctgggcacgcgctcaagccttcggctccgcagctcctaagggcaccggatccctgttgggtctgttcccctcctggactcggcctcccgcctttgccagccataaactgtatagcatatttattaaatcactatttcataattttccgtccattgttttgcctaacgagaatggcggaactcccaatcaccggcctaccggaaggggtaataacatcagtagtcatcattag

SEQ ID NO: 54934 - DNA, 582 bp, Artificial Sequence
  derived and/or modified sequence
atggagcccctggccagcaacatccaggtgctgctgcaggccgccgagttcctggagagacgcgagcgggaggccgaacacggatatgcctccctgtgtcctcatagatcccccggcccgattcatcggcggaagaaacgccctccacaggcgcccggtgcgcaggactctggacggtcggtgcataatgagctcgaaaaacgacgacgggctcagttaaagaggtgtcttgagagactcaaacagcagatgccgctcggagctgactgtgctaggtacacaaccctctccctcctcaggcgagccaggatgcacattcagaaactggaagatcaagaacagagagcaaggcagttaaaagagaggctcagatcaaaacaacagagcctgcagcggcaactcgagcaactgaggggtctggccggagcagctgaacgagaacgcctgcgcgctgacagtttggattcctcaggcctgtccagcgagcggtccgactccgaccaagtcctgccgaacgaaaatggcggcactcctaatcataggccgaccggtcgcgggaacaatatttcttctcatcactag

SEQ ID NO: 54935 - DNA, 1167 bp, Artificial Sequence
  derived and/or modified sequence
atggaacccctagcttcaaatattcaagtgctcctgcaggcagcagagttcctagaaagacgcgaaagggaagccgagcatggctatgctagcttatgcccacacaggtcccccggacccattcatagaagaaaaaagcggcctccccaggctccgggagcgcaggattctggaaggtccgtgcataacgaactggaaaagcgacgcagagctcaactgaagcgctgcctggagaggctgaagcagcagatgccactgggcgcagactgtgcccgttacacaacactatccctgctgcggagggcacgaatgcatattcagaaactcgaggaccaggaacagcgcgcacggcagcttaaagagcgactacgttctaaacagcagtcactgcagcggcagttagaacaactgaggggcttggccggagcagccgaacgagagagattgcgggcagactcccttgactcgagcggactgtcctctgagcggtccgattcagaccaaggagagtgccctgaggccgagggattgtgtggacctcgcggtgagccaggtctccttacaggaccgttacccgctcagaggtcctggaggtggatgtggagggcttggtgcctgggcgtcaggccatcttgttgtggagcctcttcacctgctaggagtacagccacccgtacggccgctgccccagggtacgacgttccccaccccggaagggcttccgccctctattcttgtcaggcccaccttccaggacgttccccgcctcaagcttttagggctgccagaagccatcttctggagtggacaaaacgaactctcgtctgggagcaggttcttcctaaacacccggctgcaggctgccaggccggtcctctggaaggcaagggccaggattcatcggggccaccatggacacccgctggacaggccgcatgggcacgagcgcaagcctttggtagtgctgcacccaaggggacgggttccctactggggttattcccctcctggactaggcccccagcttttgctagccacaaactctattctatttttatcaagtcactgtttcacaatttcccctccatcgtgttgcctaatgagaacggaggcactcccaatcacaggccaacaggcagaggcaacaacatatcgtcgcaccattag

SEQ ID NO: 54936 - DNA, 582 bp, Artificial Sequence
  derived and/or modified sequence
atggagcccctggcatctaatattcaggttttgctgcaggcagccgagtttctcgagcggagagagagggaggccgagcatgggtacgccagcctgtgccctcataggtcccccggacctatccacaggcggaagaagaggccccctcaggcaccaggcgctcaggattctggaagaagcgtgcataacgaactggaaaaacggaggagagcccaattaaaacgatgcctcgagagacttaaacaacagatgccactgggggctgattgcgccagatacactaccctctctcttctcaggagggctaggatgcacatacagaagctggaggatcaagagcaaagagcaaggcagctgaaagagcgactgcgatcaaaacagcagagcttacagagacagttggaacagctgcgcggattggccggagccgctgaaagggagcggctccgagccgactcgttggactcaagtggcctttcttcggaaaggtcagatagcgatcaggtgctgccaaacgagaatgggggtactcccaatcacaggcctacgggcaggggtaacaacataagttcccatcattag

SEQ ID NO: 54937 - DNA, 1167 bp, Artificial Sequence
  derived and/or modified sequence
atggagcccctggccagcaacatccaggtgctgctgcaggccgccgagttcctggagagaagagagagagaggccgagcacggctacgccagcctgtgcccccacagaagccccggccccatccacagaagaaagaagagacccccccaggcccccggcgcccaggacagcggcagaagcgtgcacaacgagctggagaagagaagaagagcccagctgaagagatgcctggagagactgaagcagcagatgcccctgggcgccgactgcgccagatacaccaccctgagcctgctgagaagagccagaatgcacatccagaagctggaggaccaggagcagagagccagacagctgaaggagagactgagaagcaagcagcagagcctgcagagacagctggagcagctgagaggcctggccggcgccgccgagagagagagactgagagccgacagcctggacagcagcggcctgagcagcgagagaagcgacagcgaccagggcgagtgccccgaggccgagggcctgtgcggccccagaggcgagcccggcctgctgaccggccccctgcccgcccagagaagctggagatggatgtggagagcctggtgcctgggcgtgagacccagctgctgcggcgccagcagccccgccagaagcaccgccaccagaaccgccgccgcccccggctacgacgtgccccaccccggcagagccagcgccctgtacagctgccaggcccacctgcccggcagaagccccccccaggccttcagagccgccagaagccacctgctggagtggaccaagagaaccctggtgtgggagcaggtgctgcccaagcaccccgccgccggctgccaggccggccccctggagggcaagggccaggacagcagcggccccccctggacccccgccggccaggccgcctgggccagagcccaggccttcggcagcgccgcccccaagggcaccggcagcctgctgggcctgttccccagctggaccagaccccccgccttcgccagccacaagctgtacagcatcttcatcaagagcctgttccacaacttccccagcatcgtgctgcccaacgagaacggcggcacccccaaccacagacccaccggcagaggcaacaacatcagcagccaccactag

SEQ ID NO: 54938 - DNA, 582 bp, Artificial Sequence
  derived and/or modified sequence
atggagcccctggccagcaacatccaggtgctgctgcaggccgccgagttcctggagagaagagagagagaggccgagcacggctacgccagcctgtgcccccacagaagccccggccccatccacagaagaaagaagagacccccccaggcccccggcgcccaggacagcggcagaagcgtgcacaacgagctggagaagagaagaagagcccagctgaagagatgcctggagagactgaagcagcagatgcccctgggcgccgactgcgccagatacaccaccctgagcctgctgagaagagccagaatgcacatccagaagctggaggaccaggagcagagagccagacagctgaaggagagactgagaagcaagcagcagagcctgcagagacagctggagcagctgagaggcctggccggcgccgccgagagagagagactgagagccgacagcctggacagcagcggcctgagcagcgagagaagcgacagcgaccaggtgctgcccaacgagaacggcggcacccccaaccacagacccaccggcagaggcaacaacatcagcagccaccactag

SEQ ID NO: 54939 - protein, 132 aa, Artificial Sequence
  derived and/or modified sequence
MGRTWCGMWRRRRPGRRSAVPRWPHLSSQSGVEPPDRWTGTPGWPSRDQEAPGSMMPPAAAQPSAHGALVPPATAHEPVDHPALHWLACCCCLSLPGQLPLAIRLGWDLDLEAGPSSGKLCPRARRWQPLPS

SEQ ID NO: 54940 - protein, 178 aa, Artificial Sequence
  derived and/or modified sequence
MASFLVWPLRTALRGGKSWAGPGVGCGGDGARGGGELSLSNLDLPGAGEAGLEHHPLLGHLFISAVPRWPHLSSQSGVEPPDRWTGTPGWPSRDQEAPGSMMPPAAAQPSAHGALVPPATAHEPVDHPALHWLACCCCLSLPGQLPLAIRLGWDLDLEAGPSSGKLCPRARRWQPLPS

SEQ ID NO: 54941 - DNA, 399 bp, Artificial Sequence
  derived and/or modified sequence
atgggacgtacatggtgcggcatgtggaggcggcggagacccgggaggcgctccgcggtccctagatggccccacctgagttctcagtccggcgtggaaccgcctgatcggtggaccggcacccccggatggccctcccgtgaccaggaggcgccaggaagcatgatgccaccggctgccgcccagccgtcggctcatggagccctcgtgcctccagctacagctcacgagccagtggaccatcccgctttgcactggcttgcctgctgctgttgtttgtctctacctggacagctcccactcgcgatacgtttgggctgggacctggatctcgaggcagggccctcctccgggaagctgtgtccacgggcaagaagatggcagcccctgccatcgtag

SEQ ID NO: 54942 - DNA, 537 bp, Artificial Sequence
  derived and/or modified sequence
atggcctcctttttagtttggccgctgagaactgctctgcgaggcggtaaaagctgggccggacccggcgtgggatgtggtggggacggcgccaggggaggtggtgaactcagtttatctaacctagatctgccaggcgctggtgaggccgggttggaacaccatcccctcttaggccatttgttcatatcagccgttcctaggtggccacacctcagttcccaatctggtgtggaacccccagaccgttggacgggcacacccggatggccctcccgcgaccaagaagcccccggcagcatgatgcccccggccgcagcacaaccatcagctcacggtgcgctcgtccctcccgccactgctcacgagcccgtggaccaccccgctctgcattggctggcctgttgctgttgtctgagtctcccagggcaactgcccctggccatcagattagggtgggatctggatctggaggctggcccctctagcggcaagctttgcccacgcgcacgacgttggcagccacttccctcctag

SEQ ID NO: 54943 - DNA, 399 bp, Artificial Sequence
  derived and/or modified sequence
atgggccgcacctggtgtggcatgtggaggagaagaagacctggccgccgctctgctgtgccccgctggccccacctgagcagccagagcggcgtggagcccccagaccgctggacaggcaccccaggctggcccagccgggaccaggaggcccctggctccatgatgcctcctgctgctgcccagcccagcgcccacggggccctggtgcccccagccacagcccacgagcctgtggaccacccagccctgcactggctggcctgctgctgctgcctgagcctgcccggccagctgcccctggccatccggctgggctgggacctggacctggaggccggccccagcagcggcaagctgtgcccccgggcccggcgctggcagcccctgcccagctag

SEQ ID NO: 54944 - DNA, 537 bp, Artificial Sequence
  derived and/or modified sequence
atggccagcttcctggtgtggcccctgaggacagccctgcggggcggcaagtcctgggccggccctggggtgggctgtggaggagatggagcccggggcggcggggagctgagcctgagcaacctggacctgcctggagctggggaggccggcctggagcaccaccccctgctgggccacctgttcatctctgctgtgccccgctggccccacctgagcagccagagcggcgtggagcccccagaccgctggacaggcaccccaggctggcccagccgggaccaggaggcccctggctccatgatgcctcctgctgctgcccagcccagcgcccacggggccctggtgcccccagccacagcccacgagcctgtggaccacccagccctgcactggctggcctgctgctgctgcctgagcctgcccggccagctgcccctggccatccggctgggctgggacctggacctggaggccggccccagcagcggcaagctgtgcccccgggcccggcgctggcagcccctgcccagctag

SEQ ID NO: 54945 - DNA, 399 bp, Artificial Sequence
  derived and/or modified sequence
atgggccggacctggtgcggcatgtggcggcggcggcggcccggccgacgttctgcagttccacgctggccacatctctcgtcacagtcaggcgttgaaccccctgaccgctggaccggcacccctggttggccgtcccgcgaccaggaagcaccaggctcaatgatgccgccagccgcagcacaacctagtgcccatggggctctagtaccccccgccactgcacatgagccagtcgaccatccagctttgcactggttggcctgctgctgctgcttaagcctgcccgggcagttgcccctcgctatcagattgggatgggatctcgacctcgaggccggacccagctctggcaagctgtgcccccgcgcgcgtcgctggcaacccctgccatcctag

SEQ ID NO: 54946 - DNA, 537 bp, Artificial Sequence
  derived and/or modified sequence
atggccagcttcctggtgtggcccctgcggaccgccctgcggggcggtaaatcgtgggcgggcccaggagtaggctgtggcggcgacggagctcggggcggcggagagttgtctctgagtaacttggatctccctggcgctggagaggctggccttgaacatcaccccctgttagggcacctctttatcagtgctgttcctcgttggccgcacttaagcagccagtcaggggtcgagccacccgacaggtggaccggtacgcccggctggcctagcagagaccaggaggcgccaggttcaatgatgcctcctgcagccgcgcaaccgtccgcacatggcgcattagtgcctcctgccacagcccacgaaccagtggatcatccggccctccactggcttgcgtgctgttgctgcttaagcttgccaggccagctgcctcttgccattcgcctagggtgggacctggatttggaagctggacccagctcaggcaagctctgtccccgagctagacgctggcagcccctgccatcttag

SEQ ID NO: 54947 - DNA, 399 bp, Artificial Sequence
  derived and/or modified sequence
atgggaaggacttggtgcggcatgtggagaaggagaagacccggtcgcagatctgctgtgccccgttggccacacctgtcctctcagagtggcgtcgaacccccagatcgctggaccggtacaccagggtggccctccagagatcaagaggccccaggcagcatgatgccgccagcagccgcacagccatccgcccacggcgcactggttcctcctgcaacagcacacgagcccgtggatcacccagcgttgcactggctggcgtgctgctgctgcttgagtctccccggacagcttcctctagctattcggttaggctgggatctcgatctcgaggccggtcccagcagcggtaaattatgcccccgagcccgaagatggcaacctctcccttcatag

SEQ ID NO: 54948 - DNA, 537 bp, Artificial Sequence
  derived and/or modified sequence
atggcctcttttctggtctggccactccgcactgcattaaggggcggtaagagttgggcagggcctggcgtcggctgtggcggagatggcgcacggggtgggggagagctatcattaagcaatttagacctccctggggcaggagaagctgggctggaacaccatcctttactaggacacctgttcatctctgcggtgccaaggtggcctcacctatcaagtcagtctggagtcgaaccccctgatcgatggaccggcaccccgggttggccctcccgtgaccaggaggcgccagggtctatgatgccaccagcggctgcgcaaccttctgcgcatggtgcattagtacctccagccactgcccatgaacctgtggatcaccctgccctacactggttagcttgctgttgctgtctatcacttcccggtcagttgcccttggctatccggctgggatgggacctggacctggaagcaggaccatctagcggaaaactgtgtcctcgggcacgaaggtggcagcccctgccaagttag

SEQ ID NO: 54949 - DNA, 2956 bp, Artificial Sequence
  derived and/or modified sequence
aggaggtaggctgcatccgcccctctgtctgtctgtcaacatcgccctaggaccgagctgctgggtgccccggaagaagggcaggcaggaaggggaggggcagtgaggttggctccccccaccacctcaccctggtgcccccagcccagcccaagacaccagggcatttgctgacatctgaggcccttcccaggaagacatggcctcgttcttggtgtggccactgaggacggcgctgagagggggaaagtcatgggcaggacctggtgtgggatgtggaggagacggcgcccggggaggaggagcgctgtgcccaggtggcctcacttgtcatctcaaagtggcgtcgaaccccctgacaggtggacgggaacccccggctggccctccagagaccaggaggcccctggctcaatgatgccacctgcagctgcccaaccctccgcccatggtgcccttgttccacctgccaccgctcatgaacctgtggatcacccagctctgcactggcttgcctgctgctgctgtctcagtttacctgggcagttgcccctggctatccggctgggatgggacttggacttagaagcaggcccctcctctggaaagctgtgtcctcgggccaggaggtggcagcctctaccttcctgagacagggacccttttctgtccatcagaggacagctgtatgaagacacagagagaaggcagccatctgtaagccaggaagagagccctcaccaagactggaatcagcagcaccttgatattggacttccagcctccagaactgcaagaaataagcacctgctgtttacatgcccagcctgcagtgcttccttatggcagattggagctaactgagacagctcccagcactcattcattcattcattcattcactcacctcatgtctactaaacagctctgggctggctctgggaagcagtgagtcacacacactgcccccagcaacgtgtgaaatatgtttagagacagtgggctacagcggaaagggtagatgccctgagaaccccagcggtgctggtcagaagcacaggccttgttgggctgaggctggcatggggtgaacctggggagcctcgggggcagaggtgatagatgtggggtgtttcaaggcagtgagacaaagaagggagatgggtggtgccccccaatgccaggcttcaccagcctcccaacacacgagtgttcacccgcctggatgagacacctctgtggacttgggagtgaaggcagtgaatttgggcaatgctggaggccgtgcaggtgggaggtgggacaggggcaagaggccggggcccaggcaggagctgacagcccaccagtggtgctcccctgagaagcaacctcagtgggtggcttggggtctgctgggctgtccccacactgacaccctggctgcagggcccccctgtgtccccagtgaggggtctcgggagctgtgtgtcctactcagggccatccctgcagcccatgctctctgggtgaccagttgccagcagtgtcccccctgccttgggcggaggctgaggaccccagggtgggagggaaggtgcggtgggggctcagccaatgctgcccagcctgagggtccctcacatgtgggccgcacccctgcgtcagccggagtgatctctgcttagggtggtttgaggtgagttctgatatctcaaacaccagcatcagggccagggcagacaaaataagagtgagctggtcaggggtgtcccagttgggagctcgctcacagtctttaaggaggcagggcacagcccagtgggggtggccacgaggccccgggcctgtggctgagatggcaactggcaccggcagtgattggaacagtccagcccatggagccctgtggccttggccggtggctcacggtgccacgggagctggagcaatgggtggcctcccttgcctggtgcctgagtgaaggaggactgggtgcccctgaggaaggaccttgccatactcctacaaatttacattattcttctttccccagtctcccctcagggacctgcagccatttgctggggtggctagtggaaagggggatcatcagactcagggggattactggactctaactctaacctgacacccactcctggggacacaaacacccatcggatctaatagtcagaggaggggcgtatggaggtcagtgggctcacggagttctagctcaggtccaaccctcggtgggtgcagaggtcacttccctagcctcagatgggtgagtaaacagacgtatgtggcagccagcagagcccccacatttgttccctgacctgagggtgggggctactatgctgggaaaggccaggtggaagccattggggtgaactctgcctaggaaaattgtcagtcaaaagcaacctgcagccctggagggactgcaaaggtcagtgccgccatcgaggacttggaagatgcagggtggtgacccccactgcagcctcgttccactcgtctaattggcttgtgtggaagacaggggggtcccggagaaagaaggacagtgaatcctggtaaacttaaccaggactccaattgcaactgctgttccagatatgactactgatcactggggcaaatcaaagcatccccggacacctggtctacagccattgatctggtgaaagctttaatttttaatatagattttattttttagagcagtttcatgtttacagagaaattgagcatatttgagagtcctcatatagcatctctccctacacacagtttcccttattattcatatcttgaattactgtgatacatctttgcaattgatgaaccaatattgacctagtcattgatcaggttacatgagggttcactcttcttgttgtacatgctgtgagttcgggcaaatgtgtaatggcatatctccactattacagtgtcacacagaatt

SEQ ID NO: 54950 - DNA, 1366 bp, Artificial Sequence
  derived and/or modified sequence
agcccaagacaccagggcatttgctgacatctgaggcccttcccaggaagacatggcctcgttcttggtgtggccactgaggacggcgctgagagggggaaagtcatgggcaggacctggtgtgggatgtggaggagacggcgcccggggaggaggagaattgtctctctccaaccttgacctccctggagctggtgaggcgggcctggagcaccacccgcttctgggacacctcttcatcagcgctgtgcccaggtggcctcacttgtcatctcaaagtggcgtcgaaccccctgacaggtggacgggaacccccggctggccctccagagaccaggaggcccctggctcaatgatgccacctgcagctgcccaaccctccgcccatggtgcccttgttccacctgccaccgctcatgaacctgtggatcacccagctctgcactggcttgcctgctgctgctgtctcagtttacctgggcagttgcccctggctatccggctgggatgggacttggacttagaagcaggcccctcctctggaaagctgtgtcctcgggccaggaggtggcagcctctaccttcctgagacagggacccttttctgtccatcagaggacagctgtatgaagacacagagagaaggcagccatctgtaagccaggaagagagccctcaccaagactggaatcagcagcaccttgatattggacttccagcctccagaactgcaagaaataagcacctgctgtttacatgcccagcctgcagtgcttccttatggcagattggagctaactgagacagctcccagcactcattcattcattcattcattcactcacctcatgtctactaaacagctctgggctggctctgggaagcagtgagtcacacacactgcccccagcaacgtgtgaaatatgtttagagacagtgggctacagcggaaagggtagatgccctgagaaccccagcggtgctggtcagaagcacaggccttgttgggctgaggctggcatggggtgaacctggggagcctcgggggcagaggtgatagatgtggggtgtttcaaggcagtgagacaaagaagggagatgggtggtgccccccaatgccaggcttcaccagcctcccaacacacgagtgttcacccgcctggatgagacacctctgtggacttgggagtgaaggcagtgaatttgggcaatgctggaggccgtgcaggtgggaggtgggacaggggcaagaggccggggcccaggcaggagctgacagcccaccagtggtgctcccctgagaagcaacctcagtgggtggcttggggtctgctgggctgtccccacactgacaccctggctgcag

SEQ ID NO: 54951 - DNA, 399 bp, Artificial Sequence
  derived and/or modified sequence
atgggcagaacctggtgcggcatgtggagaagaagaagacccggcagaagaagcgccgtgcccagatggccccacctgagcagccagagcggcgtggagccccccgacagatggaccggcacccccggctggcccagcagagaccaggaggcccccggcagcatgatgccccccgccgccgcccagcccagcgcccacggcgccctggtgccccccgccaccgcccacgagcccgtggaccaccccgccctgcactggctggcctgctgctgctgcctgagcctgcccggccagctgcccctggccatcagactgggctgggacctggacctggaggccggccccagcagcggcaagctgtgccccagagccagaagatggcagcccctgcccagctag

SEQ ID NO: 54952 - DNA, 537 bp, Artificial Sequence
  derived and/or modified sequence
atggccagcttcctggtgtggcccctgagaaccgccctgagaggcggcaagagctgggccggccccggcgtgggctgcggcggcgacggcgccagaggcggcggcgagctgagcctgagcaacctggacctgcccggcgccggcgaggccggcctggagcaccaccccctgctgggccacctgttcatcagcgccgtgcccagatggccccacctgagcagccagagcggcgtggagccccccgacagatggaccggcacccccggctggcccagcagagaccaggaggcccccggcagcatgatgccccccgccgccgcccagcccagcgcccacggcgccctggtgccccccgccaccgcccacgagcccgtggaccaccccgccctgcactggctggcctgctgctgctgcctgagcctgcccggccagctgcccctggccatcagactgggctgggacctggacctggaggccggccccagcagcggcaagctgtgccccagagccagaagatggcagcccctgcccagctag

SEQ ID NO: 54953 - protein, 434 aa, Artificial Sequence
  derived and/or modified sequence
MPSEILLKIFSYLDAVSLLCTGCVSRRFYHLANDNFIWIGIYSTAFSPARSNWKFNSVEKIAMSMSFLSVQDKEAGYWKKEYITKQIASVKAALADILKPVNPYTGLPVKTKEALRIFGLGWAIILKEKGGKEYIMEHVDLSINDTSVTVIWYGKKWPCLASLSTLDLCGMTPVFTDWYKTPTKHRLRWHSLIAKYNLSHLTISTMIGCDRLIRIFCLHPGLLVGVWKKEEELAFVMANLHFHHLVERSTLGSATIPYELPPHSPFLDDSPEYGLHGYQLHVDLHSGGVFYLCGTFRNLFTKRGNIENGHVKLIVIHLKNNREHLPLIGKVGLSWKTDIFDGCIKSCSMMDVTLLDEHGKPFWCFSSPVCLRSPATPSDSSSFLGQTYNVDYVDAEGRVHVELVWIRETEEYLIVNLVLYLSIAKINHWFGTEY

SEQ ID NO: 54954 - protein, 510 aa, Artificial Sequence
  derived and/or modified sequence
MATGRGRILQQHWLGLQTLRGPSRGGGAARGRARAFGCRKGPGVKLSAGSAALRCHAGGGQHWESSFSCCSGFLDGMPSEILLKIFSYLDAVSLLCTGCVSRRFYHLANDNFIWIGIYSTAFSPARSNWKFNSVEKIAMSMSFLSVQDKEAGYWKKEYITKQIASVKAALADILKPVNPYTGLPVKTKEALRIFGLGWAIILKEKGGKEYIMEHVDLSINDTSVTVIWYGKKWPCLASLSTLDLCGMTPVFTDWYKTPTKHRLRWHSLIAKYNLSHLTISTMIGCDRLIRIFCLHPGLLVGVWKKEEELAFVMANLHFHHLVERSTLGSATIPYELPPHSPFLDDSPEYGLHGYQLHVDLHSGGVFYLCGTFRNLFTKRGNIENGHVKLIVIHLKNNREHLPLIGKVGLSWKTDIFDGCIKSCSMMDVTLLDEHGKPFWCFSSPVCLRSPATPSDSSSFLGQTYNVDYVDAEGRVHVELVWIRETEEYLIVNLVLYLSIAKINHWFGTEY

SEQ ID NO: 54955 - DNA, 1816 bp, Artificial Sequence
  derived and/or modified sequence
cttcgtttcagccctggcgcggtcctgtggtgaactccttgtctctatggcgactggacgcggtcggatcttgcagcagcactggctcggcctccagacgctgcgcgggcccagcaggggcggtggcgcggcccgggggcgcgccagggcctttgggtgcaggtgactgtagggcctgcgggtggggtcccctggcgggaagcccgtcactgcgcggccccgctctcttcaccgtgtattttattcgtccagcttggcgcaaggcccgtggccgtcttcaacgtgagaaggaaaggggccaggggtcaagctttctgcaggctctgctgccctgaggtgccatgccggaggtggacagcactgggagagctctttctcctgctgttctgggttcctggatggaatgccttcagaaatcttgctgaagatattttcctacttggatgctgtgagccttctgtgtactggatgtgtgagcaggcgcttttatcatctagccaatgacaattttatttggatcggaatctactcaactgctttttcacctgcaagatcaaattggaaatttaattcagtagagaagatagctatgtctatgagctttctgtcagttcaggataaagaagctggttattggaagaaagaatatatcacaaaacaaatagcatctgtaaaagccgcactagctgacattctcaaacctgtcaacccttacacaggccttccagttaagaccaaagaggccctcagaatatttggtttaggttgggcaattatactgaaagaaaaaggtggaaaagaatatatcatggagcatgttgatctttccataaatgacacatcagttactgttatatggtatggcaaaaaatggccatgcctagcatcattgtcaaccttagatttatgtggcatgacaccagtttttaccgactggtataaaactcccaccaaacatagactccgatggcattctttaattgcaaagtacaatctgagtcatttgaccatatctaccatgattggctgtgacagactcattcggatcttctgcctgcaccctggcctcctggtgggagtgtggaagaaggaggaagaactggcttttgttatggcaaatcttcattttcatcaccttgtggagaggagcacattaggctcggctactatcccctatgaactgcctccacatagcccctttttggatgatagccccgagtatggactgcacggctaccaactccatgttgatctgcacagcggtggggttttctacctatgtggtacatttcgcaatctcttcaccaagagaggaaatattgaaaatggacatgtgaagctcattgttatacatttaaaaaataacagagaacacctacctcttattggaaaagttggcctctcgtggaaaactgatatttttgatggctgtataaagagttgttccatgatggacgtaactcttttggatgaacatgggaaacccttttggtgtttcagttccccggtgtgcctgagatcgcctgccacaccctctgacagctctagcttcttgggacagacatacaacgtggactacgttgatgcggaaggaagagtgcacgtggagctggtgtggatcagagagaccgaagaataccttattgtcaacctggtcctttatcttagtatcgcaaaaatcaaccattggtttgggactgaatattagcagtaggtggcaaattattgttgttatttagttgtttatttttgactggctttgttcttggtgttgaaaattaaaataaagcaaatctgcagagtgctgtgcaatgcc

SEQ ID NO: 54956 - DNA, 1721 bp, Artificial Sequence
  derived and/or modified sequence
ggcgacgtgcgggcgtgggggcggtgcgtgcactcttcgtttcagccctggcgcggtcctgtggtgaactccttgtctctatggcgactggacgcggtcggatcttgcagcagcactggctcggcctccagacgctgcgcgggcccagcaggggcggtggcgcggcccgggggcgcgccagggcctttgggtgcagaaaggggccaggggtcaagctttctgcaggctctgctgccctgaggtgccatgccggaggtggacagcactgggagagctctttctcctgctgttctgggttcctggatggaatgccttcagaaatcttgctgaagatattttcctacttggatgctgtgagccttctgtgtactggatgtgtgagcaggcgcttttatcatctagccaatgacaattttatttggatcggaatctactcaactgctttttcacctgcaagatcaaattggaaatttaattcagtagagaagatagctatgtctatgagctttctgtcagttcaggataaagaagctggttattggaagaaagaatatatcacaaaacaaatagcatctgtaaaagccgcactagctgacattctcaaacctgtcaacccttacacaggccttccagttaagaccaaagaggccctcagaatatttggtttaggttgggcaattatactgaaagaaaaaggtggaaaagaatatatcatggagcatgttgatctttccataaatgacacatcagttactgttatatggtatggcaaaaaatggccatgcctagcatcattgtcaaccttagatttatgtggcatgacaccagtttttaccgactggtataaaactcccaccaaacatagactccgatggcattctttaattgcaaagtacaatctgagtcatttgaccatatctaccatgattggctgtgacagactcattcggatcttctgcctgcaccctggcctcctggtgggagtgtggaagaaggaggaagaactggcttttgttatggcaaatcttcattttcatcaccttgtggagaggagcacattaggctcggctactatcccctatgaactgcctccacatagcccctttttggatgatagccccgagtatggactgcacggctaccaactccatgttgatctgcacagcggtggggttttctacctatgtggtacatttcgcaatctcttcaccaagagaggaaatattgaaaatggacatgtgaagctcattgttatacatttaaaaaataacagagaacacctacctcttattggaaaagttggcctctcgtggaaaactgatatttttgatggctgtataaagagttgttccatgatggacgtaactcttttggatgaacatgggaaacccttttggtgtttcagttccccggtgtgcctgagatcgcctgccacaccctctgacagctctagcttcttgggacagacatacaacgtggactacgttgatgcggaaggaagagtgcacgtggagctggtgtggatcagagagaccgaagaataccttattgtcaacctggtcctttatcttagtatcgcaaaaatcaaccattggtttgggactgaatattagcagtaggtggcaaattattgttgttatttagttgtttatttttgactggctttgttcttggtgttgaaaattaaaataaagcaaatctgcagagtgctgtgcaatgcc

SEQ ID NO: 54957 - DNA, 1533 bp, Artificial Sequence
  derived and/or modified sequence
atggctaccggtagagggcggatcttacagcagcactggctaggactgcagacactgagggggccctctcggggcggcggagctgcccgaggaagagctcgggcgttcggctgccgcaagggtccgggggtgaaactatccgctggatccgcggccttgcggtgccacgcaggcggaggacagcattgggagtcttccttcagctgttgctctggatttttagacgggatgcccagtgagatcctgctgaaaattttctcatatctggatgctgttagcttgttatgtacgggttgcgtgagccgccgcttctaccacctggctaacgacaactttatctggattggaatatatagtacagcttttagccccgcacggtccaattggaagtttaatagcgtggagaaaatagctatgagcatgtcatttctgtcagtgcaagacaaagaggccggatactggaaaaaagaatatattaccaaacagatagcctcagtgaaagctgctctggctgacattctcaagcctgtcaacccatacaccgggctgccagttaaaacaaaggaagccttgagaatatttgggctggggtgggcaataatcttaaaggagaaggggggcaaagagtatatcatggagcacgtcgatctgagcatcaatgacacttcggtcaccgtgatctggtacggtaaaaagtggccgtgtttggcatcactttccaccttagacctatgcgggatgacacctgtgtttacggattggtacaagaccccaactaagcacagactgcggtggcattctctgatcgctaaatacaacctgtctcacctgacgatctctactatgatcggttgcgaccggctgatcaggatcttttgcttacatcccggactgctggtgggggtctggaaaaaggaagaggagctcgcattcgtgatggccaacctccactttcatcacctggtcgaacggtctacattgggctccgcgactatcccttatgaactgccaccacactcaccgttcctggatgactcaccagagtacgggctgcacggttatcagcttcacgttgatctgcacagcgggggcgtcttttacctttgcggtacattcaggaatctgtttaccaagagagggaatattgagaacggacacgtgaagctgatagttatccacctcaagaacaaccgagagcacctgccattgatcgggaaagtggggctgtcgtggaaaaccgacatattcgacggctgtatcaagtcatgttctatgatggatgtgacattactggacgaacacggtaagcccttttggtgtttctcctcccccgtctgtctgcgctcccccgctactccctccgatagcagtagttttctgggtcagacctataacgtagattatgtcgacgctgagggccgcgtgcatgttgaactggtctggataagggagactgaggagtacttgatcgtgaacttggtgctgtacctgtccatcgcaaagataaaccactggttcggcactgagtactag

SEQ ID NO: 54958 - DNA, 1533 bp, Artificial Sequence
  derived and/or modified sequence
atggccaccggccggggccgcatcctgcagcagcactggctgggcctgcagaccctgcggggccccagcagaggaggaggagctgcccggggccgggcccgggccttcggctgcaggaagggccctggggtgaagctgtctgctggcagcgctgccctgcgctgccacgccggcggcggccagcactgggagagcagcttcagctgctgcagcggcttcctggatggcatgcccagcgagatcctgctgaagatcttctcctacctggatgctgtgtccctgctgtgcaccggctgtgtgagccgccgcttctaccacctggccaatgacaacttcatctggattggcatctacagcacagccttcagccctgcccggagcaactggaagttcaacagcgtggagaagatcgccatgtccatgtccttcctgtctgtgcaggacaaggaggccggctactggaagaaggagtacatcaccaagcagatcgcctctgtgaaggccgccctggccgacatcctgaagcctgtgaacccctacacaggcctgcctgtgaagaccaaggaggccctgcgcatcttcggcctgggctgggccatcatcctgaaggagaagggcggcaaggagtacatcatggagcacgtggacctgagcatcaatgacacctctgtgaccgtcatctggtacggcaagaagtggccctgcctggccagcctgagcaccctggacctgtgtggcatgacccctgtgttcacagactggtacaagacccccaccaagcaccggctgcgctggcacagcctgattgccaagtacaacctgagccacctgaccatcagcaccatgattggctgtgacaggctcatccgcatcttctgcctgcaccctggcctgctggtgggcgtgtggaagaaggaggaggagctggcctttgtgatggccaacctgcacttccaccacctggtggagaggagcaccctgggcagcgccaccatcccctatgagctgcccccccacagccccttcctggatgacagcccagaatatggcctgcacggctaccagctgcacgtggacctgcacagcggcggcgtcttctacctgtgtggcaccttcaggaacctcttcaccaagaggggcaacattgaaaatggccacgtgaagctgattgtcatccacctgaagaacaaccgggagcacctgcccctcatcggcaaggtgggcctgtcctggaagacagacatctttgatggctgcatcaagagctgcagcatgatggatgtgaccctgctggatgagcacggcaagcccttctggtgcttcagcagccctgtgtgcctgcggagccctgccacccccagcgacagcagcagcttcctgggccagacctacaacgtggactatgtggatgctgagggccgggtgcacgtggagctggtgtggatccgggagacagaggagtacctgattgtgaacctggtgctgtacctgagcatcgccaagatcaaccactggtttggaacagagtactag

SEQ ID NO: 54959 - DNA, 1533 bp, Artificial Sequence
  derived and/or modified sequence
atggccaccggccggggccggatcctgcagcagcactggctgggcttacaaactcttcgcggcccctcacggggtgggggggccgccagaggcagagcccgggcttttggctgcagaaaaggccccggagttaaactgagcgccggcagcgctgcgctgcgctgtcacgccgggggcggtcagcactgggagagcagtttcagttgttgttccgggttcttggatggcatgcctagcgaaatactcctcaaaatcttcagctacctggatgccgtttctctgctgtgtacaggttgtgtttccaggcggttttatcatctggctaatgataattttatatggataggtatttattcgacggcctttagccccgcaagatcaaactggaaatttaacagtgtcgaaaaaatcgccatgtcaatgagctttctgagtgtgcaggataaggaagctgggtactggaagaaggaatatatcactaagcaaatagcctcagtgaaggcagccctagcagatatcctcaagcccgttaatccgtacaccgggctgcccgtcaagactaaagaggcgctaagaatctttggcctggggtgggccataatactcaaagagaaaggtggaaaggagtatattatggagcacgtggatctgagcatcaacgacacttcagtcacggtaatctggtacggaaagaaatggccctgtcttgctagcctgtctacactcgatttatgcggaatgacaccggtgtttacagactggtacaagacacccaccaaacatagacttagatggcattccctgattgcgaaatacaacctgagtcacctgacaatctcaacaatgatcgggtgtgatagactgatcagaatcttctgcctacatcctgggttgcttgtgggagtctggaaaaaagaggaggagctggcatttgtaatggctaatcttcacttccatcaccttgttgaacggtcaacactgggttctgctacaatcccatatgaacttccgccccattcaccctttctcgatgattcccctgaatatgggcttcacggctatcagttacacgtcgacttgcacagcggcggcgtgttttacttatgtggtacgtttcgcaatctgttcaccaaaaggggaaatattgagaatggccatgtgaaactgattgtcatacatctcaagaataacagagagcacctccctctgatcggcaaggtagggctcagctggaaaacggatatttttgatggctgcatcaagtcttgttccatgatggatgtgacgcttcttgatgaacatggaaagcctttttggtgcttctcctcccctgtgtgtcttaggtcacccgccacaccatctgactcaagctcatttctgggtcagacttacaacgtcgattacgttgatgctgaaggcagggtccacgtggaattggtatggattcgcgaaacggaagaatatctgatagttaacctggtactgtacctaagcattgctaagattaatcattggttcgggaccgagtactag

SEQ ID NO: 54960 - DNA, 1533 bp, Artificial Sequence
  derived and/or modified sequence
atggcaactgggagaggtaggattctgcagcaacattggttagggctccagacacttaggggtccgtctcgcggagggggtgccgctaggggccgagctagggccttcggatgtcgcaagggtcccggagtgaagctgagcgcaggcagtgctgcgctgaggtgccacgccggaggtggccaacactgggagtctagcttcagctgttgttctggctttctggacggaatgccatccgagattctgctgaaaatattttcctatctggacgcagtgagccttctgtgcactggctgcgtgagtaggcgcttctaccatctggccaatgataattttatctggatcggaatatacagtaccgcttttagcccggctaggtctaattggaaatttaattccgtagagaagattgccatgagcatgtcattcctgtctgtacaagataaggaggctggctattggaaaaaggaatatatcaccaaacagatagcgagcgtaaaagcggctttagccgatatcctgaaacctgtgaacccatacaccggtctcccggtaaagactaaggaagccttaagaatatttggattaggttgggcaataattctgaaagagaagggaggcaaagagtatattatggagcacgtggacctttctatcaatgacactagcgttaccgtgatttggtacggaaagaaatggccctgtctagcttccctatctacacttgacctgtgtggcatgaccccagtgtttacagactggtacaaaaccccaacaaagcacagactccgctggcattcccttatcgctaagtacaatctctctcacctcacaatcagcacaatgatcggttgtgacaggctgattaggatcttttgtctccatccagggctgttagtcggcgtgtggaaaaaagaagaagagctggccttcgttatggctaatctgcactttcaccaccttgttgagcgatccaccctcggttctgccacaataccctacgagctccctccacacagtcctttcttggacgactccccagaatatggcctgcatggatatcagttgcacgttgaccttcactctggcggtgtcttctacctttgcggcactttccgcaaccttttcactaagcgcggtaatatcgaaaacggccatgtcaagctgatagtcatccatttgaaaaacaaccgcgagcacctccctcttatcggtaaagtcgggctgtcctggaagacagatattttcgatggctgtataaaatcctgctccatgatggacgttaccctattagacgagcatggtaagcccttctggtgctttagctctcctgtttgcctgagaagtcccgcaaccccctctgactcgagtagcttcctgggccaaacctacaatgtcgattacgtagatgccgaggggagggtgcatgtggaattggtttggattcgggagaccgaagaatatttaattgtcaacctcgttctctacttgagtattgctaagataaaccattggttcggaaccgagtattag

SEQ ID NO: 54961 - DNA, 1533 bp, Artificial Sequence
  derived and/or modified sequence
atggccaccggcagaggcagaatcctgcagcagcactggctgggcctgcagaccctgagaggccccagcagaggcggcggcgccgccagaggcagagccagagccttcggctgcagaaagggccccggcgtgaagctgagcgccggcagcgccgccctgagatgccacgccggcggcggccagcactgggagagcagcttcagctgctgcagcggcttcctggacggcatgcccagcgagatcctgctgaagatcttcagctacctggacgccgtgagcctgctgtgcaccggctgcgtgagcagaagattctaccacctggccaacgacaacttcatctggatcggcatctacagcaccgccttcagccccgccagaagcaactggaagttcaacagcgtggagaagatcgccatgagcatgagcttcctgagcgtgcaggacaaggaggccggctactggaagaaggagtacatcaccaagcagatcgccagcgtgaaggccgccctggccgacatcctgaagcccgtgaacccctacaccggcctgcccgtgaagaccaaggaggccctgagaatcttcggcctgggctgggccatcatcctgaaggagaagggcggcaaggagtacatcatggagcacgtggacctgagcatcaacgacaccagcgtgaccgtgatctggtacggcaagaagtggccctgcctggccagcctgagcaccctggacctgtgcggcatgacccccgtgttcaccgactggtacaagacccccaccaagcacagactgagatggcacagcctgatcgccaagtacaacctgagccacctgaccatcagcaccatgatcggctgcgacagactgatcagaatcttctgcctgcaccccggcctgctggtgggcgtgtggaagaaggaggaggagctggccttcgtgatggccaacctgcacttccaccacctggtggagagaagcaccctgggcagcgccaccatcccctacgagctgcccccccacagccccttcctggacgacagccccgagtacggcctgcacggctaccagctgcacgtggacctgcacagcggcggcgtgttctacctgtgcggcaccttcagaaacctgttcaccaagagaggcaacatcgagaacggccacgtgaagctgatcgtgatccacctgaagaacaacagagagcacctgcccctgatcggcaaggtgggcctgagctggaagaccgacatcttcgacggctgcatcaagagctgcagcatgatggacgtgaccctgctggacgagcacggcaagcccttctggtgcttcagcagccccgtgtgcctgagaagccccgccacccccagcgacagcagcagcttcctgggccagacctacaacgtggactacgtggacgccgagggcagagtgcacgtggagctggtgtggatcagagagaccgaggagtacctgatcgtgaacctggtgctgtacctgagcatcgccaagatcaaccactggttcggcaccgagtactag

SEQ ID NO: 54962 - protein, 693 aa, Artificial Sequence
  derived and/or modified sequence
MIAPLLCILSYNFNTFAILNVYSKLTMFCTTNSLPMDLLLKQGSLKQEVESFCYQIVSESNDQKVGILQSEDKQLQPSVSKKSEGELSRVKFISNSNKITFSKKPKRRKYDESYLSFGFTYFGNRDAPHAQCVLCKKILSNSSLAPSKLRRHLETKHAAYKDKDISFFKQHLDSPENNKPPTPKIVNTDNESATEASYNVSYHIALSGEAHTIGELLIKPCAKDVVMRMFDEQYSKKIDAVQLSNSTVARRIKDLAADIEEELVCRLKICDGFSLQLDESADVSGLAVLLVFVRYRFNKSIEEDLLLCESLQSNATGEEIFNCINSFMQKHEIEWEKCVDVCSDASRAVDGKIAEAVTLIKYVAPESTSSHCLLYRHALAVKIMPTSLKNVLDQAVQIINYIKARPHQSRLLKILCEEMGAQHTALLLNTEVRWLSRGKVLVRLFELRRELLVFMDSAFRLSDCLTNSSWLLRLAYLADIFTKLNEVNLSMQGKNVTVFTVFDKMSSLLRKLEFWASSVEEENFDCFPTLSDFLTEINSTVDKDICSAIVQHLRGLRATLLKYFPVTNDNNAWVRNPFTVTVKPASLVARDYESLIDLTSDSQVKQNFSELSLNDFWSSLIQEYPSIARRAVRVLLPFATMHLCETGFSYYAATKTKYRKRLDAAPHMRIRLSNITPNIKRICDKKTQKHCSH

SEQ ID NO: 54963 - DNA, 2082 bp, Artificial Sequence
  derived and/or modified sequence
atgatcgcccccctgctgtgcatcctgagctacaacttcaacaccttcgccatcctgaacgtgtacagcaagctgaccatgttctgcaccaccaacagcctgcccatggacctgctgctgaagcagggcagcctgaagcaggaggtggagagcttctgctaccagatcgtgagcgagagcaacgaccagaaggtgggcatcctgcagagcgaggacaagcagctgcagcccagcgtgagcaagaagagcgagggcgagctgagcagagtgaagttcatcagcaacagcaacaagatcaccttcagcaagaagcccaagagaagaaagtacgacgagagctacctgagcttcggcttcacctacttcggcaacagagacgccccccacgcccagtgcgtgctgtgcaagaagatcctgagcaacagcagcctggcccccagcaagctgagaagacacctggagaccaagcacgccgcctacaaggacaaggacatcagcttcttcaagcagcacctggacagccccgagaacaacaagccccccacccccaagatcgtgaacaccgacaacgagagcgccaccgaggccagctacaacgtgagctaccacatcgccctgagcggcgaggcccacaccatcggcgagctgctgatcaagccctgcgccaaggacgtggtgatgagaatgttcgacgagcagtacagcaagaagatcgacgccgtgcagctgagcaacagcaccgtggccagaagaatcaaggacctggccgccgacatcgaggaggagctggtgtgcagactgaagatctgcgacggcttcagcctgcagctggacgagagcgccgacgtgagcggcctggccgtgctgctggtgttcgtgagatacagattcaacaagagcatcgaggaggacctgctgctgtgcgagagcctgcagagcaacgccaccggcgaggagatcttcaactgcatcaacagcttcatgcagaagcacgagatcgagtgggagaagtgcgtggacgtgtgcagcgacgccagcagagccgtggacggcaagatcgccgaggccgtgaccctgatcaagtacgtggcccccgagagcaccagcagccactgcctgctgtacagacacgccctggccgtgaagatcatgcccaccagcctgaagaacgtgctggaccaggccgtgcagatcatcaactacatcaaggccagaccccaccagagcagactgctgaagatcctgtgcgaggagatgggcgcccagcacaccgccctgctgctgaacaccgaggtgagatggctgagcagaggcaaggtgctggtgagactgttcgagctgagaagagagctgctggtgttcatggacagcgccttcagactgagcgactgcctgaccaacagcagctggctgctgagactggcctacctggccgacatcttcaccaagctgaacgaggtgaacctgagcatgcagggcaagaacgtgaccgtgttcaccgtgttcgacaagatgagcagcctgctgagaaagctggagttctgggccagcagcgtggaggaggagaacttcgactgcttccccaccctgagcgacttcctgaccgagatcaacagcaccgtggacaaggacatctgcagcgccatcgtgcagcacctgagaggcctgagagccaccctgctgaagtacttccccgtgaccaacgacaacaacgcctgggtgagaaaccccttcaccgtgaccgtgaagcccgccagcctggtggccagagactacgagagcctgatcgacctgaccagcgacagccaggtgaagcagaacttcagcgagctgagcctgaacgacttctggagcagcctgatccaggagtaccccagcatcgccagaagagccgtgagagtgctgctgcccttcgccaccatgcacctgtgcgagaccggcttcagctactacgccgccaccaagaccaagtacagaaagagactggacgccgccccccacatgagaatcagactgagcaacatcacccccaacatcaagagaatctgcgacaagaagacccagaagcactgcagccactag

SEQ ID NO: 54964 - DNA, 2082 bp, Artificial Sequence
  derived and/or modified sequence
atgattgcccctctgttatgtatattgtcttacaacttcaacacatttgccatcctgaatgtttattccaagcttaccatgttctgtacaaccaattcattaccgatggaccttcttcttaaacagggttccctaaaacaagaggtcgagtcattctgttatcaaatcgtgagcgagtctaacgatcagaaggtgggcatcttacaaagtgaggacaaacagttgcagccatccgtgtctaagaaatctgagggggaactttcacgcgtgaaattcatctcgaattccaacaagatcacttttagcaaaaaacctaagcggcgcaagtacgatgagagctatctgagtttcggcttcacctattttggcaaccgagacgccccccacgctcagtgtgttctctgcaaaaagattctgtcaaatagttccctggcgcccagtaagttgagacgacatttagagaccaaacatgctgcatacaaggacaaagacatctcgttcttcaagcagcatttggatagccctgagaataataagcctcctactcccaagatcgttaacactgataacgagtccgccaccgaggctagctataatgtctcctaccacattgccttatctggggaggcccacaccatcggtgagttgctgattaaaccgtgtgccaaagacgtcgttatgcggatgtttgatgagcagtatagtaagaaaatcgacgccgtgcagcttagcaactcaaccgtagcccgccgcataaaagaccttgccgcagatatcgaggaggagctcgtctgccgtcttaaaatttgcgacgggttttccctgcaactggacgaatcagcagatgtgtctgggctggcagtgttgttagtcttcgtacggtaccgatttaacaaaagtatcgaagaagatctgctgttatgtgagagtctgcagagcaatgccacgggagaagaaattttcaactgtatcaactcttttatgcaaaagcatgaaattgagtgggaaaagtgtgtcgatgtttgctccgatgcctctcgcgctgtggacggcaagattgcggaagctgtcacattgatcaagtacgtggccccagaatctactagctcacactgcctgctgtaccggcacgccctggcagtgaaaattatgcctacatccctaaagaacgtccttgatcaggccgtgcagatcattaattatatcaaggctcggcctcaccagagccgactgttgaagattctatgtgaggagatgggcgctcaacacacagcactgttacttaatacggaggtgcgttggttgagtagaggcaaggttctggtgcggctgttcgaactgagacgtgagttgctggtctttatggactcagctttcagactgagcgattgtctaacgaactcctcctggcttctgcggcttgcatatctggctgacatctttaccaagttgaatgaggtgaacctgtctatgcaaggtaagaacgtgacagtgtttacggtattcgataagatgagctccttactgaggaaactagagttttgggcctcctcagtcgaggaagagaacttcgactgttttccaaccctgtctgacttcctcaccgagataaacagcactgttgacaaggatatctgttccgctatcgttcaacatctgcggggcttgagagcaactctgctcaaatactttcctgtgacgaacgataataatgcctgggtacgtaaccccttcactgttaccgtgaaacccgcttcactggtggcacgcgattatgagagcctgatcgatcttacatccgactcacaggtcaagcagaactttagcgaactgtcactcaatgatttctggtcctctctgatccaggagtatccaagcattgcaagacgagccgtgagagtgctgctcccattcgccacaatgcacttatgtgagaccgggttttcatattatgctgccacaaagactaaatatcgcaagagactggacgcagcaccccacatgaggatccggttgagcaatatcacaccgaacattaagagaatttgcgacaagaaaacgcagaagcattgcagccactag

SEQ ID NO: 54965 - DNA, 2082 bp, Artificial Sequence
  derived and/or modified sequence
atgattgccccactgctgtgtatcttgagctataattttaacacgttcgctattctcaacgtctactctaagctcaccatgttctgcaccactaatagtctgcctatggatctgctccttaaacaggggtctttgaaacaggaggtcgaaagcttctgttaccagattgtgagcgagtctaacgatcaaaaggtcgggatccttcagagcgaggacaaacaactacagccgagcgtttccaaaaaaagtgaaggagagttgagtcgggtcaaatttatttcgaatagtaataagatcacgttctccaagaagccaaaacggaggaaatatgatgagtcctatctcagttttggtttcacatatttcgggaaccgagacgctcctcacgcccaatgtgttctctgcaagaaaattctgtctaattccagcctggctccatccaagctgagacgccatctggaaaccaagcacgctgcctacaaagacaaagacattagcttctttaagcaacacctcgattctcccgagaacaacaagccgcctacccccaaaatcgtgaacacggataacgagtcagcaacagaagccagctacaacgtgtcgtaccatatagctctcagcggggaggcacataccattggggaactcctgatcaaaccctgtgccaaagacgtggtgatgaggatgtttgacgagcaatacagcaagaaaatcgacgccgttcagttatctaattccacagttgcccgcaggataaaagatcttgccgccgacatcgaggaagaactggtgtgtaggctgaagatttgtgacggtttcagcctgcagctcgatgagtctgccgacgtgagtggcctcgcagtgctgctcgtttttgtccgctaccggtttaacaagagcatcgaggaggacctgctgctgtgtgagagtttgcagtccaatgccaccggagaggaaattttcaactgcatcaactcgttcatgcagaaacacgaaatcgaatgggaaaaatgcgttgatgtgtgtagcgacgcctctagagccgtcgacggaaaaatcgcagaggcagttactttgatcaagtacgtggccccagagagtacaagtagccattgcctcctgtaccgccacgcactcgcagtcaagatcatgcccaccagcttaaagaacgtcctggaccaggccgtgcagataattaattacatcaaggcccggccgcatcagagcagattgctcaagatcctttgtgaagagatgggcgcccagcacacggcattgttgctgaatactgaagtccgctggctctctcgagggaaagtgttagttcggttgttcgaactgagaagagagctcctagtcttcatggattccgcattccgcttaagcgactgcctgaccaacagtagctggctgcttcggctggcctatctcgccgatatcttcacaaaactgaatgaagtcaacttgtccatgcagggtaaaaatgttaccgtgtttaccgtgttcgacaagatgtcctccctgctccgaaaactggaattctgggccagtagtgttgaagaagagaattttgattgctttccgaccctgtccgatttcctgaccgagatcaacagcactgtcgataaggatatatgtagcgccattgtccagcacctgcgagggctccgcgctaccttgcttaagtactttccagtaaccaatgacaacaacgcatgggttcggaacccgttcactgtcacagtgaaacctgcctcactagtcgcgagggactatgagtcactgattgatctgacatccgacagccaggtgaaacagaacttctctgagctgtcccttaatgatttttggtcttcccttatccaggagtacccatcaattgcaagaagagcggtccgagtgttactccccttcgccaccatgcatctatgtgagacagggtttagttactacgcagcgacgaagaccaagtacaggaaacgccttgacgcggccccccacatgcggattcgcctatcaaatatcacccccaacatcaaacgcatctgtgacaagaaaacacagaagcactgcagccattag

SEQ ID NO: 54966 - DNA, 2082 bp, Artificial Sequence
  derived and/or modified sequence
atgattgcccccctgctgtgcatcctgagctacaacttcaacacctttgccatcctgaatgtgtacagcaagctgaccatgttctgcaccaccaacagcctgcccatggacctgctgctgaagcagggcagcctgaagcaggaggtggagagcttctgctaccagatcgtgtctgagagcaatgaccagaaggtgggcatcctgcagagcgaggacaagcagctgcagcccagcgtgtccaagaagtctgagggggagctgagccgggtgaagttcatcagcaacagcaacaagatcaccttcagcaagaagcccaagaggaggaaatatgatgagagctacctgagctttggcttcacctacttcggcaacagagatgcccctcatgcccagtgtgtgctgtgcaagaagatcctgagcaacagcagcctggcccccagcaagctgcggcggcacctggagaccaagcacgccgcctacaaggacaaggacatctccttcttcaagcagcacctggacagccctgagaacaacaagccacccacccccaagatcgtgaacacagacaatgaaagtgccacagaggccagctacaacgtgtcctaccacatcgccctgtctggagaggcccacaccatcggggagctgctgatcaagccctgtgccaaggatgtggtgatgaggatgtttgatgagcagtacagcaagaagattgatgctgtgcagctgagcaacagcacagtggcccggcgcatcaaggacctggccgctgacatcgaggaggagctggtgtgccgcctgaagatctgtgatggcttcagcctgcagctggatgagagcgcagatgtgtctggcctggccgtgctgctggtgtttgtgcgctaccgcttcaacaagagcattgaggaggacctgctgctgtgtgagagcctgcagagcaatgccaccggggaggagatcttcaactgcatcaacagcttcatgcagaagcatgaaattgagtgggagaagtgtgtggatgtgtgcagtgatgccagcagagctgtggatggcaagattgctgaggccgtgaccctcatcaagtatgtggcccctgagagcaccagcagccactgcctgctgtacagacatgccctggccgtgaagatcatgcccaccagcctgaagaatgtgctggaccaggccgtgcagatcatcaactacatcaaggcccggccccaccagagccggctgctgaagatcctgtgtgaggagatgggcgcccagcacacagccctgctgctgaacacagaggtgcgctggctgagccggggcaaggtgctggtgcggctgtttgagctgcggcgggagctgctggtgttcatggattctgccttccggctgagtgactgcctgaccaacagctcctggctgctgcggctggcctacctggccgacatcttcaccaagctgaatgaggtgaacctgtccatgcagggcaagaatgtgacagtgttcaccgtgtttgacaagatgagcagcctgctgaggaagctggagttctgggccagctctgtggaggaggagaactttgactgcttccccaccctgagtgacttcctgacagagatcaacagcacagtggacaaggacatctgcagcgccatcgtgcagcacctgcggggcctgcgggccaccctgctgaagtacttccctgtgaccaatgacaacaatgcctgggtgaggaaccccttcaccgtgacagtgaagccagccagcctggtggcccgggactatgagagcctgattgacctgaccagtgacagccaggtgaagcagaacttcagcgagctgagcctgaatgacttctggagcagcctcatccaggagtaccccagcatcgccaggagagctgtgcgggtgctgctgccctttgccaccatgcacctgtgtgagaccggcttctcctactatgctgccaccaagaccaagtacaggaagaggctggatgctgccccccacatgaggatccggctgagcaacatcacccccaacatcaagaggatctgtgacaagaagacccagaagcactgcagccactag

SEQ ID NO: 54967 - DNA, 2082 bp, Artificial Sequence
  derived and/or modified sequence
atgatcgcccccctgctgtgcatcctgagctacaacttcaacacctttgctatattaaatgtttacagcaagcttactatgttctgtacgacaaattccctgccaatggatctcttgctcaagcagggttctctcaagcaggaagttgaatccttctgctatcagatcgtgagtgagagtaacgatcagaaagtgggaatcctgcaaagcgaagacaaacagctacaacccagtgtatctaaaaaatcagaaggagagctgagtagggtgaaattcattagcaactctaataagataacatttagcaaaaagcccaagcgccgcaagtacgacgaaagttacctgtctttcgggtttacgtattttggaaatagagacgcccctcatgcccaatgcgtgctgtgcaagaagatcctgagcaacagctccttggccccctccaaacttcgtcgacatctcgagactaaacacgcggcctataaggataaggacatctcctttttcaagcagcacttggacagccctgagaacaataagccgccaactccaaagatagtcaatacggacaacgagtcagcgactgaggccagctataacgtgtcttatcacatagcactctccggcgaagctcataccataggggagctgcttatcaaaccctgcgctaaggacgtggtgatgcgtatgttcgacgagcagtacagtaagaaaatcgacgctgtacagcttagcaatagcaccgttgctcggaggatcaaagatctcgcggccgatatagaggaagaactggtttgcagattaaagatttgcgatgggttcagtctgcagctcgacgaatccgcagacgtgtcaggtctcgcagtgttgctggtgtttgtaaggtatcggttcaacaaatctattgaagaagaccttctgctgtgcgaatctcttcagtcaaacgccacaggagaagaaatctttaattgtatcaattctttcatgcaaaagcacgaaatcgaatgggaaaaatgtgtcgacgtgtgtagcgacgccagccgggccgtggatggaaagatcgccgaggcagtcaccctcatcaaatatgtggctccggaatcaacctcttctcactgcctgctgtatagacatgctctagctgtgaagattatgcctacctcattgaagaacgtgctcgatcaggccgtccagattattaactacattaaggcacgcccgcaccaaagtcgtttgctgaagatactttgtgaggagatgggcgctcagcatacagcactactcctcaacaccgaggttcggtggttatcccggggaaaagtcctggtccgattgtttgagctccgcagagagcttctggtttttatggactccgccttccggctgtccgactgcctcactaattcttcatggttactacggctcgcgtacttggctgacattttcacaaagctgaacgaagtgaatctgtctatgcaagggaaaaacgtaaccgtcttcaccgtctttgacaaaatgtcatcgttattgcggaagctcgagttttgggcaagcagtgtcgaggaggaaaattttgattgtttcccaacgttgtccgactttctcaccgaaattaattccactgtagacaaggacatctgctccgccatcgttcagcatcttcgtggcctccgcgctaccctactcaagtactttcctgtgacaaacgacaataacgcgtgggttaggaatccctttactgtcaccgtgaagcccgcctcactggtggctcgggattatgagtccttaatcgacctgacctccgacagccaagttaaacagaattttagtgaactcagcctgaacgatttttggagtagtctcatccaagagtatcccagtatcgctcgccgcgctgtcagagtcttattgccttttgcaacgatgcacttgtgtgagacgggtttctcctattacgctgcaacaaagaccaagtaccggaagcggttggacgcagccccgcatatgcgaattcgactgagcaacatcacacctaatatcaaaaggatatgcgataagaaaactcaaaaacactgcagtcactag

SEQ ID NO: 54968 - DNA, 2082 bp, Artificial Sequence
  derived and/or modified sequence
atgatcgcccccctgctgtgcatcctgagctacaacttcaacacctttgcgatcctgaatgtgtactcaaaacttaccatgttttgcaccactaactcactgccgatggatctactcctgaagcagggttcactcaaacaggaggtcgagtcgttctgttatcagatcgtgagcgagtccaacgaccaaaaagtaggtatactgcagtcggaggacaaacaactccaaccttctgtgtccaaaaaatcggagggggaattgagtcgggtaaagttcatctctaactctaacaagattacattttctaagaagcctaaaaggcggaaatacgacgagagctacctgtcattcgggtttacctactttggcaatagggacgcgcctcacgctcagtgtgtactgtgtaagaaaattctaagtaacagctcactggcaccatcaaagctgaggcggcaccttgagaccaaacacgccgcctacaaagataaagacatcagcttctttaagcagcatctagattcccccgaaaataacaagccaccaactcccaaaatagtgaacaccgacaacgagtccgctactgaggcgagctataacgtgagctatcacatcgccctctccggagaggctcatacgatcggggagttactgattaaaccatgcgcaaaggacgtggtcatgaggatgtttgacgagcaatacagcaaaaagatagacgcagtgcagctgtctaatagcactgtcgccaggcggatcaaggacctcgccgcagatatcgaagaagagctagtttgtcgcctgaaaatttgtgacggttttagtctgcagttagatgaatcagccgacgtctccgggttggcagtgctgctggtttttgttcggtatcgatttaacaaatccattgaagaagatctattactgtgcgagagcctccagtctaatgcaactggcgaggagatattcaattgcatcaatagtttcatgcagaaacacgaaattgagtgggaaaaatgcgtggatgtgtgctctgacgcttctagggccgtggatgggaaaatcgccgaggcagtcaccctcatcaaatacgttgcccctgagtctactagctcccattgtctcctatatcggcacgccctggcagtcaagattatgcccactagccttaaaaatgtgctggaccaggctgtgcaaattatcaattacattaaggcccgcccccatcagagcaggctgctgaagattctttgtgaggagatgggggcgcaacataccgcccttctgctcaatacagaggttcgctggctgagccgcgggaaagtgctcgtgcgcctcttcgaactgagaagagaactgctcgtgtttatggactccgcgtttcgcctcagcgactgcctaacaaatagctcctggctgcttaggttggcctatctggcagatattttcaccaaactgaacgaggtgaacctaagcatgcagggcaagaacgttactgtgtttacagtgttcgacaaaatgagcagcctccttagaaagctggaattctgggcctcttctgtggaggaagagaattttgactgctttcccacgctgagcgactttctaaccgaaataaatagcactgtcgacaaggatatctgttcagcgatcgtacaacatctgcgaggcctgcgggccacactacttaaatattttcccgtgacaaacgataataatgcgtgggtgcgcaaccctttcacggtgaccgtcaaaccagccagcctcgtagcgcgagattacgagagcttgattgacctgactagcgatagccaggttaaacaaaatttctctgagctaagtttgaatgatttctggagctcattgatccaggagtaccccagcatcgcgaggagggctgtacgtgtgcttctcccattcgcaactatgcacctttgcgagaccggcttcagttactacgcagctaccaaaacaaaatacagaaagaggctggacgcggccccgcacatgagaattcggctgtcaaatatcactccaaatataaagcgtatctgtgacaaaaagacacagaaacattgctcccattag

SEQ ID NO: 54969 - DNA, 2082 bp, Artificial Sequence
  derived and/or modified sequence
atgatcgctccattgctgtgtatccttagctacaacttcaatacttttgcaatcctcaatgtctacagtaaactcactatgttttgtacaacgaacagcctgccaatggatctgttgctgaagcagggcagccttaaacaggaggtggaatcattttgttaccaaatcgtcagtgagagcaatgatcagaaggtcgggattcttcagagtgaggataagcagttgcagccgtcggtgtcaaagaaatccgagggcgagttgagcagagttaaattcatcagcaacagcaacaaaatcactttcagcaaaaagcctaaacggaggaaatacgacgagtcatacctgagttttggttttacttattttggaaaccgggatgccccacacgctcagtgtgttctctgcaaaaagatcctctcgaacagctccctggctccatccaagttaagaaggcacctggaaaccaagcatgccgcttataaagacaaggatatatcgttcttcaaacaacatctggacagcccagagaacaataagccaccgacacccaaaatcgtcaatactgataatgagagtgctacagaggcgagctacaacgtgtcataccacatcgcattaagcggggaagctcatactataggggagctcttaatcaaaccatgtgccaaggacgtagtgatgcggatgttcgacgaacaatatagcaaaaagatcgatgctgttcagttatccaactcaaccgtggcaagacggataaaggacctggctgcagacattgaggaggagcttgtgtgtcgtttgaaaatttgcgacgggttttctctgcagctggatgagagcgccgacgtgtcaggcttagctgtgcttttggttttcgtgagataccgtttcaataagagcatcgaggaagacctactgctttgcgaatcacttcagtccaacgccactggtgaagagatctttaactgcatcaactctttcatgcaaaagcacgagatcgaatgggaaaagtgtgtggatgtgtgttccgacgcatcaagggccgtcgatggaaaaatcgcagaggcagtgacactgatcaagtatgttgcacctgagtcaacttcttcacactgcctgttataccgccacgccctagcagttaagatcatgcccacgtcgctgaagaatgtactggatcaggccgtacagattatcaattatatcaaggcacgccctcatcagtcaagactgctgaaaattctgtgtgaggagatgggggctcaacacacagcattattactgaacacggaagttaggtggctctcccggggaaaagtcctggtgcgcctgttcgagctgcggagagagcttttggtgttcatggactccgcctttcggctttctgactgcctcacaaactcttcctggctgctgcgcctggcctatttggccgatatatttacaaagctgaatgaggttaacctgagcatgcagggcaagaatgtgaccgtgttcaccgtcttcgataagatgtcttccctcctgcgaaagctcgaattctgggcttcttccgtcgaggaagagaactttgattgtttccctactctttctgactttcttactgagattaattcaacagtcgacaaggacatatgtagtgcgatcgtgcagcatctgcgtggcctccgagctacactgctaaagtacttcccagtgacaaacgacaataacgcctgggtgagaaatcctttcacagtcacagtgaaaccagcttcactggtggcccgagattacgaatcattaatcgacttaacctctgactctcaggtcaaacagaatttctccgagctttctttgaacgacttctggtccagcctcattcaggaatatcctagcattgctcgacgagccgttcgcgtattactgcccttcgcaacaatgcacctttgtgaaactggcttttcatactacgctgccacgaagaccaaataccgcaagcgacttgatgcagccccacacatgaggatccgactgtccaacatcacccctaacatcaagaggatctgcgataaaaaaacccagaaacactgctcacactag

SEQ ID NO: 54970 - DNA, 2082 bp, Artificial Sequence
  derived and/or modified sequence
atgatcgctccgctgctgtgtattcttagttacaactttaatacattcgcaattctcaatgtttactcaaaacttacgatgttctgcacaacaaattctctcccaatggacttgttgctgaaacagggtagtctgaagcaagaggtggaaagtttctgttatcaaatagtgtcagagtctaacgaccaaaaagtgggcattctgcagtccgaagacaagcagcttcagccgtcagtctcaaaaaaaagtgaaggggagctatcccgtgtcaaatttatcagtaattctaataaaattacattctctaaaaagcctaaacgcaggaagtacgatgaatcatatttgagtttcggctttacatactttggtaacagggacgcaccccatgcccagtgtgtactctgcaaaaagattctgtctaatagctctctggcgccttccaagcttaggagacacctcgagaccaagcatgccgcttacaaggacaaggatatctctttctttaagcagcatctggactctccagaaaacaataaaccaccgacccctaaaatcgtgaacacagataacgagagtgcaactgaagcctcatataatgtctcctatcacatagctctgagcggagaagcacatacaattggggagctcttaatcaaaccatgtgctaaagatgtcgtcatgcgaatgtttgacgagcaatatagtaaaaagatcgacgccgtccagttaagtaatagcaccgtggcacgcaggatcaaggatctggctgccgacatagaggaagaactggtctgccgactcaagatctgcgacggattcagccttcagttagatgagtccgccgatgtaagcggtttggcagtgttactcgtgtttgtgcgatatagatttaataaatctattgaggaagatttattactatgcgaatctctacagtccaatgccaccggagaggaaatttttaattgcattaactccttcatgcaaaaacacgagattgaatgggagaagtgtgtcgatgtgtgtagcgacgcatcccgcgcagtcgatggcaagatcgcagaagccgtaaccctgattaagtacgtagcaccagagagtactagcagccattgcctgctgtacagacacgccttggctgtgaagatcatgccaacaagcctcaagaatgtgctggatcaggctgtccagatcattaactatatcaaggctcggcctcatcaatccaggctgttgaagatcctatgcgaagagatgggtgcccagcataccgctctgcttctcaataccgaagtgaggtggctgtccaggggaaaggtactggtgcggctatttgagctgaggagggaactccttgtgtttatggacagcgcttttagactatcggattgcctgacaaactcctcatggttgctacggcttgcctatttggcagacatcttcaccaaactgaatgaagtcaacctgtccatgcagggaaagaacgtaacagtattcaccgtcttcgataaaatgagctccctgcttcggaagctggagttttgggcttcaagtgtggaagaggaaaattttgactgtttcccaaccttgagcgactttttgaccgagatcaatagtacagtggacaaagacatctgttctgccattgtccaacacctgcggggattgagggcaaccctcctaaaatacttcccggttacaaatgacaataatgcttgggtccgcaatcccttcactgtgacagtgaagcctgcatccctggtggctagagactacgagtcactcatcgatctcacaagcgactcccaggtgaagcagaattttagcgagctttccttaaatgacttttggtcatccctgattcaggaatacccttctattgccagacgggctgtgagagtgctgttgccatttgctactatgcacctgtgtgagaccggttttagctattatgcggctaccaagaccaaataccggaaacggctggatgctgcccctcacatgaggattaggttgtctaacattactcctaatattaagcggatctgcgacaagaagactcagaagcattgttcgcactag

SEQ ID NO: 54971 - DNA, 2512 bp, Artificial Sequence
  derived and/or modified sequence
agccgcgaatcggatctctatggagatggcctaggcgatatccctgagctgagagcatcaccctgtccccgaatccttctttcctctctgttttgtttttcattcccctccctctctcccctccccctccagtccacgacgactggctgttgaccctgttcaggcctcggtgaaggcttttggttactccccttcccaccccatcccttaattttattcttttgaagagtgcatttcaagctgccaaggtggagagagggattacagaaaggagaacaccttatttcagaaaaggtgtaccatacctgagagcaccaggaagtcgcatgagagatcacctgatacatgaacgtatgatgttccatctgcgcattgatgaataggcagcatttacaaattaactgatgtgttgctgtatatcatctctttgatgattgctcctcttctttgtatcctgtcttataatttcaacacatttgcgatactcaatgtctattctaaattaaccatgttttgtaccacaaactcattgcccatggatctgttgctgaaacaaggaagtcttaaacaagaagtggaatctttctgttatcagattgtgtctgaatcaaatgatcagaaggttggaatattacaaagtgaagataagcagttgcaaccttcagtttctaaaaaatcagaaggtgagctttccagggtcaaatttatatccaattccaacaaaataacatttagtaaaaaaccaaaaagaagaaaatatgatgaaagttatttgtcttttggatttacttacttcggaaatagagatgcacctcatgctcagtgtgtattatgtaagaaaattttatcaaatagctctttagcccctagtaagcttcgaagacatttggaaactaaacatgctgcatataaagacaaagacataagctttttcaagcaacatctcgattcacctgaaaataataaacccccaacacctaaaattgtgaatacagataatgaaagtgctacagaagcatcatacaatgtaagttaccatatagcgctgagtggagaggctcatactattggagaattgcttatcaaaccttgtgcaaaagatgtagtgatgcggatgtttgatgaacaatatagtaaaaaaatagatgcagtacagctatcaaacagtactgttgcacgtcgaattaaggatctagctgctgacattgaagaagagcttgtttgtagactgaaaatttgcgatgggttttcactgcaactagatgaatcagctgatgtttcaggacttgctgtgctgcttgtgtttgttcgttataggtttaataagtctattgaggaagacctactcctgtgtgaatctttgcaaagtaatgctaccggtgaagaaatattcaactgtatcaacagttttatgcagaaacatgaaattgaatgggaaaaatgtgttgatgtttgtagtgatgcttctagggcagtggatgggaaaattgccgaagctgtcaccttaataaaatatgtggctcccgaaagcaccagtagtcactgcctattatacagacatgcactggcagttaaaataatgcctacatctctaaaaaatgtgctagaccaggcagtacaaatcatcaattatattaaagctcgaccacatcaatccagactattaaaaattttatgtgaggaaatgggtgctcagcacacagcacttcttctaaatacagaggtgaggtggctttctcgaggtaaagttcttgtaagactttttgaacttcgtcgtgaacttttggttttcatggattctgcttttcgactatctgattgtttaacaaattcatcttggctgctaagacttgcatatcttgcagatatttttactaaattaaatgaagttaatttgtcaatgcaaggaaaaaatgtgaccgtttttacagtatttgataaaatgtcgtcattgttaagaaaattggaattttgggcctcatctgtagaagaagaaaactttgattgttttcctacactcagtgattttttgactgaaattaattctacagttgataaagatatttgcagtgccattgtgcagcacctaaggggtttgcgcgctactctgttaaaatactttcctgtaacaaatgacaataatgcttgggttagaaatccatttacagttactgttaaaccagcttcattagtagcacgggactatgagagcctgattgatttaacatctgattctcaagtgaagcaaaattttagtgaactttcactaaatgatttttggagtagcctaattcaggaatacccaagcattgcaaggcgtgcagtgcgtgtacttcttccttttgctacaatgcacctgtgtgaaacggggttttcatattacgctgcaacaaaaacaaaatataggaaaagacttgatgctgcacctcatatgcgaatccgacttagcaatattacacctaatattaagcggatatgtgataaaaagacacaaaaacactgttctcattaa

SEQ ID NO: 54972 - DNA, 2741 bp, Artificial Sequence
  derived and/or modified sequence
agagtgctaaatttatcttcagaccggcgaccgcgccagccgcgaatcggatctctatggagatggcctaggcgatatccctgagctgagagcatcaccctgtccccgaatccttctttcctctctgttttgtttttcattcccctccctctctcccctccccctccagtccacgacgactggctgttgaccctgttcaggcctcggtgaaggcttttggttactccccttcccaccccatcccttaattttattcttttgaagagtgcatttcaagctgccaaggtggagagagggattacagaaaggagaacaccttatttcagcttttatttttatgtgataatctacctttaagaaaaggtgtaccatacctgagagcaccaggaagtcgcatgagagatcacctgatacatgaacgtatgatgttccatctgcgcattgatgaataggcagcatttacaaattaactgatgtgttgctgtatatcatctctttgatgattgctcctcttctttgtatcctgtcttataatttcaacacatttgcgatactcaatgtctattctaaattaaccatgttttgtaccacaaactcattgcccatggatctgttgctgaaacaaggaagtcttaaacaagaagtggaatctttctgttatcagattgtgtctgaatcaaatgatcagaaggttggaatattacaaagtgaagataagcagttgcaaccttcagtttctaaaaaatcagaaggtgagctttccagggtcaaatttatatccaattccaacaaaataacatttagtaaaaaaccaaaaagaagaaaatatgatgaaagttatttgtcttttggatttacttacttcggaaatagagatgcacctcatgctcagtgtgtattatgtaagaaaattttatcaaatagctctttagcccctagtaagcttcgaagacatttggaaactaaacatgctgcatataaagacaaagacataagctttttcaagcaacatctcgattcacctgaaaataataaacccccaacacctaaaattgtgaatacagataatgaaagtgctacagaagcatcatacaatgtaagttaccatatagcgctgagtggagaggctcatactattggagaattgcttatcaaaccttgtgcaaaagatgtagtgatgcggatgtttgatgaacaatatagtaaaaaaatagatgcagtacagctatcaaacagtactgttgcacgtcgaattaaggatctagctgctgacattgaagaagagcttgtttgtagactgaaaatttgcgatgggttttcactgcaactagatgaatcagctgatgtttcaggacttgctgtgctgcttgtgtttgttcgttataggtttaataagtctattgaggaagacctactcctgtgtgaatctttgcaaagtaatgctaccggtgaagaaatattcaactgtatcaacagttttatgcagaaacatgaaattgaatgggaaaaatgtgttgatgtttgtagtgatgcttctagggcagtggatgggaaaattgccgaagctgtcaccttaataaaatatgtggctcccgaaagcaccagtagtcactgcctattatacagacatgcactggcagttaaaataatgcctacatctctaaaaaatgtgctagaccaggcagtacaaatcatcaattatattaaagctcgaccacatcaatccagactattaaaaattttatgtgaggaaatgggtgctcagcacacagcacttcttctaaatacagaggtgaggtggctttctcgaggtaaagttcttgtaagactttttgaacttcgtcgtgaacttttggttttcatggattctgcttttcgactatctgattgtttaacaaattcatcttggctgctaagacttgcatatcttgcagatatttttactaaattaaatgaagttaatttgtcaatgcaaggaaaaaatgtgaccgtttttacagtatttgataaaatgtcgtcattgttaagaaaattggaattttgggcctcatctgtagaagaagaaaactttgattgttttcctacactcagtgattttttgactgaaattaattctacagttgataaagatatttgcagtgccattgtgcagcacctaaggggtttgcgcgctactctgttaaaatactttcctgtaacaaatgacaataatgcttgggttagaaatccatttacagttactgttaaaccagcttcattagtagcacgggactatgagagcctgattgatttaacatctgattctcaagtgaagcaaaattttagtgaactttcactaaatgatttttggagtagcctaattcaggaatacccaagcattgcaaggcgtgcagtgcgtgtacttcttccttttgctacaatgcacctgtgtgaaacggggttttcatattacgctgcaacaaaaacaaaatataggaaaagacttgatgctgcacctcatatgcgaatccgacttagcaatattacacctaatattaagcggatatgtgataaaaagacacaaaaacactgttctcattaaaattggaggagtttgcatgtctcatgataaccaaatgtaagatgaaaataaaagatgatttacttcatctctggtatttgggggatttaaataaaatgattccatttttttatactatttagattttaagaaggctaaagaatcaaacgttttaaacata

SEQ ID NO: 54973 - protein, 127 aa, Artificial Sequence [sequence omitted]

SEQ ID NO: 54974 - protein, 105 aa, Artificial Sequence
  derived and/or modified sequence
MSAAGARGLRATYHRLLDKVELMLPEKLRPLYNHPAGPRTVFFWAPIMKWGLVCAGLADMARPAEKLSTAQSAVLMATGFIWSRYSLVIIPKNWSLFAVNFFVGA

SEQ ID NO: 54975 - DNA, 384 bp, Artificial Sequence
  derived and/or modified sequence
atgagcgccgccggcgccagaggcctgagagccacctaccacagactgctggacaaggtggagctgatgctgcccgagaagctgagacccctgtacaaccaccccgccggccccagaaccgtgttcttctgggcccccatcatgaagtggggcctggtgtgcgccggcctggccgacatggccagacccgccgagaagctgagcaccgcccagagcgccgtgctgatggccaccggcttcatctggagcagatacagcctggtgatcatccccaagaactggagcctgttcgccgtgaacttcttcgtgggcgccgccggcgccagccagctgttcagaatctggagatacaaccaggagctgaaggccaaggcccacaagtag

SEQ ID NO: 54976 - DNA, 318 bp, Artificial Sequence
  derived and/or modified sequence
atgagcgccgccggcgccagaggcctgagagccacctaccacagactgctggacaaggtggagctgatgctgcccgagaagctgagacccctgtacaaccaccccgccggccccagaaccgtgttcttctgggcccccatcatgaagtggggcctggtgtgcgccggcctggccgacatggccagacccgccgagaagctgagcaccgcccagagcgccgtgctgatggccaccggcttcatctggagcagatacagcctggtgatcatccccaagaactggagcctgttcgccgtgaacttcttcgtgggcgcctag

SEQ ID NO: 54977 - DNA, 384 bp, Artificial Sequence
  derived and/or modified sequence
atgagtgccgccggcgcccgggggctgcgggcaacgtaccaccgcctcctggataaagtagagctaatgctgccagaaaaactcaggccgctctacaaccacccagcaggaccacgcacagtgttcttctgggcacccatcatgaaatggggtctggtgtgtgctggtcttgctgacatggcccggcccgccgaaaagctgtccactgcacaatcagcagtattgatggcaacgggctttatctggtctcggtacagcctggtgattattccaaaaaactggagcttgttcgctgtgaactttttcgtgggcgctgccggggcttcccagcttttccgcatttggcggtacaatcaggaactgaaagcgaaagcccacaaatag

SEQ ID NO: 54978 - DNA, 384 bp, Artificial Sequence
  derived and/or modified sequence
atgtccgccgcgggcgcccgcgggttgcgggctacctatcaccggttactggacaaggtcgagctgatgctgcccgaaaaacttagacctctgtacaaccacccagccgggcctcgtacagtgtttttctgggcccctattatgaagtgggggctcgtttgtgccggattagctgacatggcccgacccgctgaaaaactctccacagcacagtcagccgtcctgatggcaaccgggtttatatggagcaggtactcccttgtcattatccccaaaaactggagtctgttcgcagtgaattttttcgtgggtgcagcaggtgcatcccagctgttccgaatttggcgctacaatcaggagttgaaagctaaggcccacaagtag

SEQ ID NO: 54979 - DNA, 318 bp, Artificial Sequence
  derived and/or modified sequence
atgtcagcagctggggcgagaggcctgcgcgcaacctatcaccgactgctggacaaggtggaactaatgcttccagaaaaattgcgtcccctgtataaccaccctgccggcccacggactgtgttcttctgggcccctattatgaagtggggactggtctgcgcaggtctggctgatatggctaggccagctgagaagctctccaccgcacagagcgctgtccttatggccaccggattcatttggagccgctactccttggtgatcatccctaagaattggtccctgtttgctgtaaatttctttgtgggagcatag

SEQ ID NO: 54980 - DNA, 384 bp, Artificial Sequence
  derived and/or modified sequence
atgtctgctgctggggcccggggcctgcgggccacctaccaccggctgctggacaaggtggagctgatgctgcctgagaagctgcggcccctgtacaaccaccctgctggccccaggacagtgttcttctgggcccccatcatgaagtggggcctggtgtgtgccggcctggccgacatggcccggcctgctgagaagctgagcacagcccagagcgctgtgctgatggccaccggcttcatctggagccgctacagcctggtgatcatccccaagaactggagcctgtttgctgtgaacttctttgtgggcgccgccggggccagccagctgttccgcatctggagatacaaccaggagctgaaggccaaggcccacaagtag

SEQ ID NO: 54981 - DNA, 318 bp, Artificial Sequence
  derived and/or modified sequence
atgtctgctgctggggcccggggcctgcgggccacctaccaccggctgctggacaaggtggagctgatgctgcctgagaagctgcggcccctgtacaaccaccctgctggccccaggacagtgttcttctgggcccccatcatgaagtggggcctggtgtgtgccggcctggccgacatggcccggcctgctgagaagctgagcacagcccagagcgctgtgctgatggccaccggcttcatctggagccgctacagcctggtgatcatccccaagaactggagcctgtttgctgtgaacttctttgtgggcgcctag

SEQ ID NO: 54982 - DNA, 384 bp, Artificial Sequence
  derived and/or modified sequence
atgagcgccgccggcgcccggggcctgcgggccacctaccaccggctcctcgataaggtagaacttatgttgccagaaaaactgaggccactctacaatcatccagccggcccaaggaccgtgtttttttgggctccaattatgaaatgggggctagtatgcgcggggctggctgacatggctagaccggcagaaaagctgagtactgcccagtcagcagtgctcatggccactggtttcatctggtcccgatatagcttggttataattccaaaaaattggagtttgttcgcagtgaatttttttgtaggcgcagccggtgcttcacaactgttcagaatctggcgttataatcaggaactcaaggccaaggcccataagtag

SEQ ID NO: 54983 - DNA, 384 bp, Artificial Sequence
  derived and/or modified sequence
atgagcgccgccggcgcccggggcctgcgggccacctaccaccggttgttagataaggtagagctcatgcttccggagaagctccggcctctgtacaatcatccagctgggcctcgcacagtgttcttttgggcgccgattatgaagtggggcctggtctgcgcaggccttgctgacatggcgaggccagcggagaaactctcgacggcccagagcgcagtgttaatggccaccggctttatttggagccgttattctttggttatcattccaaagaactggtctcttttcgctgttaatttcttcgtcggtgctgccggtgcttcgcagctctttcgaatatggagatacaaccaggagctgaaggccaaagcccataagtag

SEQ ID NO: 54984 - DNA, 318 bp, Artificial Sequence
  derived and/or modified sequence
atgagcgccgccggcgcccggggcctgcgggccacctaccaccggctgttggacaaggtagagctgatgctgccagaaaaactgcggcctttgtacaatcatcccgcgggacctagaacggtttttttttgggcaccgattatgaaatggggcctcgtgtgtgcaggcctcgcagacatggctcggcctgctgagaagctgtctaccgctcaaagcgccgttttgatggcaaccgggtttatctggagcagatacagtctggtgatcattcccaaaaactggagtctctttgcggtgaatttcttcgtgggtgcatag

SEQ ID NO: 54985 - DNA, 384 bp, Artificial Sequence
  derived and/or modified sequence
atgagcgcggcaggtgctcggggactgcgggcaacttaccatcgtctgctggataaagtagagttaatgctgcccgaaaaattaagaccactgtataatcaccccgctggacccagaaccgtgttcttctgggccccaatcatgaaatggggtcttgtgtgtgcgggactggcagacatggcacgaccggcagagaaactctcaaccgctcagtctgcagttcttatggctaccgggtttatctggagtcgatattctctcgtgattatacccaagaattggtcactgtttgccgtgaatttcttcgtcggagccgctggcgctagccagctctttcgtatctggagatataatcaggaactgaaggctaaagcgcacaaatag

SEQ ID NO: 54986 - DNA, 384 bp, Artificial Sequence
  derived and/or modified sequence
atgagcgccgcaggtgccaggggactgagggctacttaccaccgactactggacaaagtcgagttaatgcttccagagaaactgcgacccctgtacaaccatcccgcaggcccaagaacagtattcttctgggctcctataatgaagtggggcttagtttgcgctggcttagccgacatggcacgtccagccgagaaactttcaacggcacaaagtgctgttttgatggccaccgggtttatctggtcccgttattctcttgtgatcattcccaaaaattggtctctctttgccgtgaatttctttgttggtgctgccggagcgtcacaactgtttcggatctggaggtacaatcaggagctaaaggcaaaggcacataaatag

SEQ ID NO: 54987 - DNA, 318 bp, Artificial Sequence
  derived and/or modified sequence
atgtctgcagccggtgctagaggcctgcgtgccacataccacagactgctggataaagttgagctcatgctgcctgaaaaactgagacctttatacaaccatcccgctgggcctcgaactgtcttcttctgggccccaatcatgaagtgggggctggtgtgcgcaggactggccgatatggcccgacctgcagaaaagctgagcactgcccaatcagcagttttgatggccacaggctttatttggtctagatacagcctcgtgatcattcctaaaaactggtcacttttcgccgtaaatttttttgtgggagcttag

SEQ ID NO: 54988 - DNA, 798 bp, Artificial Sequence
  derived and/or modified sequence
ctcagcgcctccgccccggggcccccgctcacccaggtatcgactccgcagccgggacgggtcctccagcccgagggaccttttcctcacgtcccacaacagccagggacgagaacacagccacgctcccacccggctgccaacgatccctcggcggcgatgtcggccgccggtgcccgaggcctgcgggccacctaccaccggctcctcgataaagtggagctgatgctgcccgagaaattgaggccgttgtacaaccatccagcaggtcccagaacagttttcttctgggctccaattatgaaatgggggttggtgtgtgctggattggctgatatggccagacctgcagaaaaacttagcacagctcaatctgctgttttgatggctacagggtttatttggtcaagatactcacttgtaattattccaaaaaattggagtctgtttgctgttaatttctttgtgggggcagcaggagcctctcagctttttcgtatttggagatataaccaagaactaaaagctaaagcacacaaataaaagagttcctgatcacctgaacaatctagatgtggacaaaaccattgggacctagtttattatttggttattgataaagcaaagctaactgtgtgtttagaaggcactgtaactggtagctagttcttgattcaatagaaaaatgcagcaaacttttaataacagtctctctacatgacttaaggaacttatctatggatattagtaacatttttctaccatttgtccgtaataaaccatacttgctcgtatata

SEQ ID NO: 54989 - DNA, 2177 bp, Artificial Sequence
  derived and/or modified sequence
cgccccctcaaccttcgcggggcgcgggccgcagcttttcggttcacagcgggcagggaaagccgcgggaagggtactccaggcgagaggcggacgcgagtcgtcgtggcaggaaaagtgactagctccccttcgttgtcagccagggacgagaacacagccacgctcccacccggctgccaacgatccctcggcggcgatgtcggccgccggtgcccgaggcctgcgggccacctaccaccggctcctcgataaagtggagctgatgctgcccgagaaattgaggccgttgtacaaccatccagcaggtcccagaacagttttcttctgggctccaattatgaaatgggggttggtgtgtgctggattggctgatatggccagacctgcagaaaaacttagcacagctcaatctgctgttttgatggctacagggtttatttggtcaagatactcacttgtaattattccaaaaaattggagtctgtttgctgttaatttctttgtgggggcagcaggagcctctcagctttttcgtatttggagatataaccaagaactaaaagctaaagcacacaaataaaagagttcctgatcacctgaacaatctagatgtggacaaaaccattgggacctagtttattatttggttattgataaagcaaagctaactgtgtgtttagaaggcactgtaactggtagctagttcttgattcaatagaaaaatgcagcaaacttttaataacagtctctctacatgacttaaggaacttatctatggatattagtaacatttttctaccatttgtccgtaataaaccatacttgctcgtatataccccctgcctccttctgttccagtcagccaacatatgtacataaaagaacacacaaattcaagaagttggaagattaaattatctgcttatttagtgtaggatggtcaggtagctagctataagtgaaaggaaattttgctgaagagactgagaaatgggtagtggaatgactatcaagatgacctcaaactatttaaaaacattttaacttgccatgaagaatcttgatgatttttgtataaatgttgtataaaattcttttacagctacagatttttaaataggatcattgtaaagattaatgagataatgttttaacatagtgcctggtccatgataagtgttaaatttttcaattaccctcagtaactgataatgtagcagaaaatactctatattcagacagacctgaatttgaatcccagctctatgacttatctgttgtgactttttttttttttttttttttgagacagggtctcgctctgtggcccaggctggagtgcagtggcacaatctcggctcactgcaaaccctacctcctgggctcaagtgatcctcctgcctcagcctcccgagcagctgggactacaggcacacaccaccacacccagctaatttttgtatttttgtagaggtagggttttgtcatgttgcccaggctggtctcgaactcctgggctcaggtgatctgcccgcctcgtcctgtcaaagtgctggaatacaggcatgagccaccatacccagcctatgctgtgactttagacaagttaggaaagtacctagcagagtacctgggacataagtaggttttctgtaaatgtttgtgacctttggctccgttgtgaggagagactgagcatacattactccacgctacaaataattaactatctatttgatttgactttcagtgtggagtgcagagctttttttctaaaagtgctaataaagccagtcctcattaaaaatatagtcagatgagtcagcaaagcaagttatttcaaaatttgaagaaatgagacaaaacaactttttgagtaatactataacctatgaaaatttggcagttagcaattgaaaaccttgtactttatcatctgtcccttaaccatggcctaccattgaggagaaaagattagagagcttgacataggccacaatgaagaggttctgaagagtcaaactattattgctttcatttcataaaccacactgttaaattcatttgtgtgtttggcatgggtgtgcacacatgtgtttcctaggttaagcatttaggaaaaacattatgaaatatgacatagacacaaaaaagtttattaaaaatttatgtga

SEQ ID NO: 54990 - DNA, 645 bp, Artificial Sequence
  derived and/or modified sequence
ccgggcctccagggcgcagcgttagatggcggtggcagcagcggcgcctgggcccctgaagcccggccgcacccgggccggagctcgcctcatactctccttcttagactaaccagaacatccaaagatcagcaacagtctcctccctcagcccccctccaacaggaggaggcggaggcggaggcgatggcgactcctccctctcctcgtcctggataccctccccgccaaccctttctcgcgagatgacgaccaccctggggactgaggctgccagggacgagaacacagccacgctcccacccggctgccaacgatccctcggcggcgatgtcggccgccggtgcccgaggcctgcgggccacctaccaccggctcctcgataaagtggagctgatgctgcccgagaaattgaggccgttgtacaaccatccagcaggtcccagaacagttttcttctgggctccaattatgaaatgggggttggtgtgtgctggattggctgatatggccagacctgcagaaaaacttagcacagctcaatctgctgttttgatggctacagggtttatttggtcaagatactcacttgtaattattccaaaaaattggagtctgtttgctgttaatttctttgtgggggca

SEQ ID NO: 54991 - protein, 526 aa, Artificial Sequence
  derived and/or modified sequence
MVNKDMNGFPVKKCSAFQFFKKRVRRWIKSPMVSVDKHQSPSLKYTGSSMVHIPPGEPDFESSLCQTCLGEHAFQRGVLPQENESCSWETQSGCEVREPCNHANILTKPDPRTFWTNDDPAFMKQRRMGLNDFIQKIANNSYACKHPEVQSILKISQPQEPELMNANPSPPPSPSQQINLGPSSNPHAKPSDFHFLKVIGKGSFGKVLLARHKAEEVFYAVKVLQKKAILKKKEEKHIMSERNVLLKNVKHPFLVGLHFSFQTADKLYFVLDYINGGELFYHLQRERCFLEPRARFYAAEIASALGYLHSLNIVYRDLKPENILLDSQGHIVLTDFGLCKENIEHNSTTSTFCGTPEYLAPEVLHKQPYDRTVDWWCLGAVLYEMLYGLPPFYSRNTAEMYDNILNKPLQLKPNITNSARHLLEGLLQKDRTKRLGAKDDFMEIKSHVFFSLINWDDLINKKITPPFNPNVSGPNDLRHFDPEFTEEPVPNSIGKSPDSVLVTASVKEAAEAFLGFSYAPPTDSFL

SEQ ID NO: 54992 - protein, 144 aa, Artificial Sequence
  derived and/or modified sequence
MVSVDKHQSPSLKYTGSSMVHIPPGEPDFESSLCQTCLGEHAFQRGVLPQENESCSWETQSGCEVREPCNHANILTKPDPRTFWTNDDPAFMKQRRMGLNDFIQKIANNSYACKHPEVQSILKISQPQEPELMNANPSPPPSPS

SEQ ID NO: 54993 - protein, 60 aa, Artificial Sequence
  derived and/or modified sequence
MVNKDMNGFPVKKCSAFQFFKKRVRRWIKSPMVSVDKHQSPSLKYTGSSMVHIPPGEPDF

SEQ ID NO: 54994 - DNA, 1581 bp, Artificial Sequence
  derived and/or modified sequence
atggttaacaaggacatgaacggttttcccgtcaaaaagtgttctgcatttcagtttttcaagaagcgggtgaggaggtggatcaagtcgcccatggtgagcgtggacaaacatcaatctccaagcctgaaatacaccgggagctccatggtgcacattccgccaggcgaacctgacttcgagagttccttatgccagacctgtctgggcgaacatgctttccagagaggggttctgccccaggagaacgagtcttgttcttgggagacacagtccggctgtgaggtgagggaaccgtgtaatcacgccaatatcctaactaagccagatccaaggaccttttggacaaacgacgatcccgcctttatgaagcaaagacgcatgggtttgaatgattttattcagaagatcgcgaacaattcatatgcttgtaagcaccccgaagtgcagagcattcttaaaatcagtcagccgcaggagccggagctgatgaacgccaatccatcacccccgcctagtccttcccagcagatcaatttgggcccgtctagcaatcctcacgctaagccttcggactttcacttcctgaaagttatcggcaagggcagctttggcaaggttctcttagcacggcacaaagccgaggaggtcttctacgccgtgaaagtcctacagaagaaggctatactcaagaagaaagaggaaaagcatattatgagtgagagaaacgtgctcctcaaaaacgtgaagcaccccttcctggtagggctgcacttttccttccagacagcggacaagctctactttgtgcttgactatatcaacgggggagagcttttttaccacctacagagagagagatgctttctcgagccccgcgcccggttttacgctgccgagatcgccagtgctttgggctatctccactccctcaatattgtataccgggatctgaaaccagagaatatcctgctggattcccaaggccatatcgtactcactgatttcggattgtgcaaggagaacattgagcataacagcacaaccagcaccttttgcgggacgcctgaatatctcgctcctgaagtgctccataagcagccctatgacagaacggtggactggtggtgtctcggagccgttttgtatgaaatgctctatggactgcccccgttctatagccgcaacacagccgaaatgtacgacaacatcctgaataaaccgcttcaactgaagcctaatattactaactctgcccgacacttgctcgaaggtctcctccaaaaggaccggactaagcgactgggcgctaaagacgatttcatggagattaagagtcatgtcttcttctccctaattaattgggacgatctgatcaataagaaaattacccccccctttaaccccaacgtctccggccccaacgatctccgtcactttgatcctgaattcactgaggagcctgtacctaatagcatcggcaaaagcccagatagcgtcctggtcaccgcctccgtcaaggaggcagcagaagccttcctcggtttctcttacgcgccacccacggactccttcctttag

SEQ ID NO: 54995 - DNA, 435 bp, Artificial Sequence
  derived and/or modified sequence
atggtgtccgtggacaagcatcagtccccctctctcaaatacacaggatcaagtatggttcatattccccccggggaacccgatttcgaatccagcctatgtcagacttgcttgggagaacacgcctttcagcggggcgtactcccacaagagaacgaatcatgttcgtgggaaactcagtcggggtgcgaggtccgggagccttgtaaccacgcaaatattcttactaaacccgacccacgaacattctggacaaacgacgaccctgcttttatgaaacaaagaagaatgggactaaacgactttatccaaaaaattgccaataactcctacgcctgtaagcacccggaggtccagtccatcttaaagatcagccagcctcaagaacccgagcttatgaatgctaatccttcgcccccccccagcccgagttag

SEQ ID NO: 54996 - DNA, 183 bp, Artificial Sequence
  derived and/or modified sequence
atggtgaataaggatatgaacggcttcccagtcaagaagtgcagcgcctttcagttcttcaaaaagcgggtaagacgctggatcaagtcccctatggtatcagttgataagcaccagagtccttcactgaagtacaccgggtcatctatggtccacatcccacctggggagccagatttctag

SEQ ID NO: 54997 - DNA, 1581 bp, Artificial Sequence
  derived and/or modified sequence
atggtgaacaaggacatgaatggcttccctgtgaagaagtgcagcgccttccagttcttcaagaagagggtgcggcgctggatcaagagccccatggtgtctgtggacaagcaccagagccccagcctgaagtacacaggcagctccatggtgcacatccccccaggagagccagactttgagagcagcctgtgccagacctgcctgggggagcacgccttccagaggggcgtgctgccccaggagaatgaaagctgctcctgggagacccagagcggctgtgaggtgcgggagccctgcaaccacgccaacatcctgaccaagccagaccccaggaccttctggaccaatgatgatcctgccttcatgaagcagaggaggatgggcctgaatgacttcatccagaagatcgccaacaacagctatgcctgcaagcaccctgaggtgcagagcatcctgaagatcagccagccccaggagcctgagctgatgaatgccaaccccagccccccacccagccccagccagcagatcaacctgggccccagcagcaacccccacgccaagcccagcgacttccacttcctgaaggtgattggcaagggcagctttgggaaggtgctgctggcccggcacaaggccgaggaggtgttctatgctgtgaaggtgctgcagaagaaggccatcctgaagaagaaggaggagaagcacatcatgtctgaaagaaatgtgctgctgaagaatgtgaagcaccccttcctggtgggcctgcacttctccttccagacagctgacaagctgtactttgtgctggactacatcaatggaggagagctgttctaccacctgcagcgggagcgctgcttcctggagccccgggcccgcttctacgccgctgagatcgccagcgccctgggctacctgcacagcctgaacatcgtgtacagagacctgaagccagagaacatcctgctggacagccagggccacatcgtgctgacagactttggcctgtgcaaggaaaatattgagcacaacagcaccaccagcaccttctgtggcaccccagagtacctggcccctgaggtgctgcacaagcagccctatgacagaacagtggactggtggtgcctgggcgctgtgctgtatgagatgctgtatggcctgccccccttctacagcaggaacacagctgagatgtatgacaacatcctgaacaagcccctgcagctgaagcccaacatcaccaacagcgcccggcacctgctggagggcctgctgcagaaggacaggaccaagaggctgggcgccaaggatgacttcatggagatcaagagccacgtgttcttcagcctcatcaactgggatgacctgatcaacaagaagatcaccccacccttcaaccccaacgtgtctggccccaatgacctgcggcactttgatcctgagttcacagaggagcctgtgcccaacagcatcggcaagagcccagattctgtgctggtgacagcctctgtgaaggaggccgctgaggccttcctgggcttctcctatgccccacccacagacagcttcctgtag

SEQ ID NO: 54998 - DNA, 435 bp, Artificial Sequence
  derived and/or modified sequence
atggtgtctgtggacaagcaccagagccccagcctgaagtacacaggcagctccatggtgcacatccccccaggagagccagactttgagagcagcctgtgccagacctgcctgggggagcacgccttccagaggggcgtgctgccccaggagaatgaaagctgctcctgggagacccagagcggctgtgaggtgcgggagccctgcaaccacgccaacatcctgaccaagccagaccccaggaccttctggaccaatgatgatcctgccttcatgaagcagaggaggatgggcctgaatgacttcatccagaagatcgccaacaacagctatgcctgcaagcaccctgaggtgcagagcatcctgaagatcagccagccccaggagcctgagctgatgaatgccaaccccagccccccacccagccccagctag

SEQ ID NO: 54999 - DNA, 183 bp, Artificial Sequence
  derived and/or modified sequence
atggtgaacaaggacatgaatggcttccctgtgaagaagtgcagcgccttccagttcttcaagaagagggtgcggcgctggatcaagagccccatggtgtctgtggacaagcaccagagccccagcctgaagtacacaggcagctccatggtgcacatccccccaggagagccagacttctag

SEQ ID NO: 55000 - DNA, 1581 bp, Artificial Sequence
  derived and/or modified sequence
atggtgaacaaggacatgaacggcttccccgtgaagaagtgcagcgcctttcagttctttaagaaaagggtgcggcgctggatcaaatcaccaatggtcagtgtggataaacaccaaagcccgagcctgaagtacaccggtagttctatggttcacatcccgcctggcgaaccagattttgaatcttccttgtgtcagacatgcctgggggaacatgccttccagagaggagttctccctcaggaaaacgagtcctgcagctgggagactcaatcaggttgcgaggtgagagaaccatgcaatcatgccaatattttgacaaagcctgatcctcgtactttctggactaacgacgaccctgcgttcatgaagcagcgacgaatgggactgaacgatttcattcagaaaatagccaacaacagttatgcgtgcaaacaccccgaagttcagagtattttgaagatttcacagccacaggagcccgagctcatgaatgccaacccaagcccacccccttctcctagtcaacagatcaacctaggccctagttctaatccgcacgcaaagccgtccgattttcattttctgaaagttataggtaagggatccttcggcaaagtccttctggccagacataaggctgaagaggtcttctatgccgtgaaagtcttgcagaaaaaagcgatcctgaagaaaaaggaggagaaacacattatgagcgaaaggaatgtactgctgaagaatgtaaagcacccgtttctcgtgggcctgcatttttcgttccagaccgctgataagttgtacttcgttttggattacatcaacggcggcgaattgttctatcatttacagagagagcggtgctttttggagccaagggcccggttttatgctgctgagatagccagcgctctgggctacctgcactcattgaatattgtctatagagatctgaaacctgagaatattcttctggattcacaggggcatatagtgctgactgattttggcctttgtaaagaaaacattgagcataattctacaactagtacattctgtggcaccccggaatatttggcccctgaagtgctccataagcaaccatatgatcggaccgtcgattggtggtgtctcggtgccgtgctgtatgaaatgctttatggactgccccccttttactcccggaatactgccgaaatgtacgataacatcctgaataagccattgcagctgaagccaaacattacaaattctgcaagacacctgctggaagggctgctgcaaaaggacagaacaaagaggttgggtgccaaggatgactttatggagattaaatcacacgtattttttagtctgatcaactgggatgacctcattaataagaagatcacccctccattcaaccccaacgtgtccgggcctaatgatttaagacatttcgaccctgaatttacagaagagcccgtaccgaactcaatcgggaaatcccctgacagcgtgttagtaacagctagcgtaaaagaagccgctgaagcatttctgggcttcagttatgccccacctaccgacagtttcttatag

SEQ ID NO: 55001 - DNA, 435 bp, Artificial Sequence
  derived and/or modified sequence
atggtgagcgtggacaagcaccagagccccagcctgaagtacaccggttcatcaatggtgcatattccaccaggagaacccgactttgaatcaagtctctgtcaaacctgcctgggcgaacatgctttccaacgtggggtgctgccccaagaaaacgagagttgctcttgggagacacagagcggttgcgaagtgcgggagccatgtaaccatgcgaacatactgaccaagcccgatccacgcacattttggaccaacgacgacccagcattcatgaagcaaagacgaatgggcctcaatgactttatacagaagatcgctaacaatagctacgcctgcaaacacccagaagtgcagtctattctcaagatttctcagcctcaagaacccgaactgatgaatgcaaatccctcaccccccccttcacctagctag

SEQ ID NO: 55002 - DNA, 183 bp, Artificial Sequence
  derived and/or modified sequence
atggtgaacaaggacatgaacggcttccccgtgaagaagtgcagcgctttccagttcttcaagaaacgggtgcgaaggtggattaaatcccctatggtctccgtggataagcaccagtctccttctcttaaatataccggcagcagcatggtccatataccgccgggggagcccgacttttag

SEQ ID NO: 55003 - DNA, 1581 bp, Artificial Sequence
  derived and/or modified sequence
atggtaaataaagatatgaacggatttcctgtgaagaagtgttccgcgttccaattcttcaaaaagcgcgtccgacggtggataaagagcccaatggtgtccgtagataagcatcagagtcccagcctcaaatacacaggaagctctatggtgcatattccccctggcgagccggatttcgagagtagcctgtgtcaaacatgcctgggggaacacgcatttcagcgcggtgtgcttccccaggaaaacgagagttgctcatgggagacgcagtctgggtgcgaagtgcgggagccgtgtaaccacgctaatatcttaaccaagccagaccccagaaccttctggacaaacgacgatccagcctttatgaagcagcggcgtatggggctgaatgactttatacagaaaattgcaaacaacagctatgcttgcaaacaccctgaagtccagagcattcttaagatctcacaacctcaggaacctgagctaatgaatgcaaacccttctcccccaccaagtccaagtcagcaaatcaatctggggccatctagtaatcctcacgccaaaccatctgatttccactttctaaaagtgattggaaaaggatcttttggtaaggtgctcctggccagacacaaggccgaggaggtattctatgccgtgaaggtgttacagaagaaagcgatcctcaaaaaaaaggaagaaaagcatattatgagcgagcgcaatgtgcttctaaagaacgtcaagcatccctttctggtgggtctgcacttcagctttcagacagcagacaagctgtatttcgtcctggactatataaatggcggagagctgttctatcacctccagcgggagcgttgctttctggagcctcgcgcacggttttacgctgccgagatcgcaagcgctctcggatatttgcactcactgaatattgtgtaccgcgacctcaagcctgaaaacatcctgctcgactctcagggccacattgtcctgactgattttggtctttgcaaagagaatatcgagcacaactcgacaacctccaccttctgtggcacccctgagtacctggcccctgaggttctgcacaagcagccttatgaccgaacagtagattggtggtgtctaggtgccgtgctgtatgaaatgctgtacggcctgcctcctttctactcccgcaacacagccgagatgtacgacaatatcctgaataagccgctgcaactcaagcctaatattaccaatagtgccagacacctcctcgaaggtttactgcagaaggataggaccaagcgccttggcgctaaggatgacttcatggagatcaagagtcacgtttttttctcgctgatcaattgggatgacctgatcaacaaaaagatcacgccaccgttcaaccctaatgtgtccggtcccaacgatctgcgccactttgaccccgaattcactgaggaacccgtgccgaactctatcgggaaaagtccagatagcgtgctcgtgaccgccagtgtgaaagaagcagcggaagccttcctgggctttagctatgctccccctaccgactctttcctttag

SEQ ID NO: 55004 - DNA, 435 bp, Artificial Sequence
  derived and/or modified sequence
atggtctcagtggacaagcatcagtccccttccctgaagtataccggcagttcaatggtgcacattcctccaggggagccagacttcgagagctctctctgccagacgtgcctcggagaacacgccttccagagaggggttcttccacaggagaatgagtcatgttcttgggagacacaatctgggtgtgaggtgagggaaccgtgcaatcatgccaacatccttacaaagcccgacccccgaacgttctggactaatgatgacccggcattcatgaaacagcgtcgaatggggctgaacgattttatacaaaagattgccaacaattcatacgcatgtaaacaccctgaggtgcaaagcatcctaaagatttcccagccccaggagcccgaactgatgaacgcaaatccaagtcctcccccttccccaagctag

SEQ ID NO: 55005 - DNA, 183 bp, Artificial Sequence
  derived and/or modified sequence
atggtgaacaaggacatgaatggatttcctgtgaagaagtgttcagcattccaattttttaagaaacgggtgcggagatggatcaaatcccccatggtttctgtcgacaagcaccagtcaccttctctgaaatataccggctcctcgatggtgcacatcccacccggagagcccgacttttag

SEQ ID NO: 55006 - DNA, 3201 bp, Artificial Sequence
  derived and/or modified sequence
agatattcatgaaccgttgcttcttccagcctcgccttctcgctccctctgcctttctggcgctgttctccctccctccctctggcttctgctctttcttactccttctctcagctgcttaactacagctcccactggaacttgcacaatcaaaaacaactctcctctctcaagccgcctccaggagcgcatcacctggagaagagcgactcgctccccgcgccggccgcggaagagcagccaggtagctgggggcggggaggcgtacccttctcccgctcggtaagagccacagcatctccccggagattggccgtatcccaccgtccggcccccagggtcctgcagcggtgatgcatatgtttcggagcaatgatggaaggagaaaagccgctgtcggtggcaactgaaagtggggagaggttgctgcagtagctggtgctgcagaatgcgcgagtgaagaactgagccccgctagattctccatcccgctcagtcttcattaactgtctgcaggaggtaaaccggggaaacagatatgcactaaccaggcgggtgccaacctggatctataactgtgaattccccacggtggaaaatggtaaacaaagacatgaatggattcccagtcaagaaatgctcagccttccaattttttaagaagcgggtacgaaggtggatcaagagcccaatggtcagtgtggacaagcatcagagtcccagcctgaagtacaccggctcctccatggtgcacatccctccaggggagccagacttcgagtcttccttgtgtcaaacatgcctgggtgaacatgctttccaaagaggggttctccctcaggagaacgagtcatgttcatgggaaactcaatctgggtgtgaagtgagagagccatgtaatcatgccaacatcctgaccaagcccgatccaagaaccttctggactaatgatgatccagctttcatgaagcagaggaggatgggtctgaacgactttattcagaagattgccaataactcctatgcatgcaaacaccctgaagttcagtccatcttgaagatctcccaacctcaggagcctgagcttatgaatgccaacccttctcctccaccaagtccttctcagcaaatcaaccttggcccgtcgtccaatcctcatgctaaaccatctgactttcacttcttgaaagtgatcggaaagggcagttttggaaaggttcttctagcaagacacaaggcagaagaagtgttctatgcagtcaaagttttacagaagaaagcaatcctgaaaaagaaagaggagaagcatattatgtcggagcggaatgttctgttgaagaatgtgaagcaccctttcctggtgggccttcacttctctttccagactgctgacaaattgtactttgtcctagactacattaatggtggagagttgttctaccatctccagagggaacgctgcttcctggaaccacgggctcgtttctatgctgctgaaatagccagtgccttgggctacctgcattcactgaacatcgtttatagagacttaaaaccagagaatattttgctagattcacagggacacattgtccttactgacttcggactctgcaaggagaacattgaacacaacagcacaacatccaccttctgtggcacgccggagtatctcgcacctgaggtgcttcataagcagccttatgacaggactgtggactggtggtgcctgggagctgtcttgtatgagatgctgtatggcctgccgcctttttatagccgaaacacagctgaaatgtacgacaacattctgaacaagcctctccagctgaaaccaaatattacaaattccgcaagacacctcctggagggcctcctgcagaaggacaggacaaagcggctcggggccaaggatgacttcatggagattaagagtcatgtcttcttctccttaattaactgggatgatctcattaataagaagattactcccccttttaacccaaatgtgagtgggcccaacgacctacggcactttgaccccgagtttaccgaagagcctgtccccaactccattggcaagtcccctgacagcgtcctcgtcacagccagcgtcaaggaagctgccgaggctttcctaggcttttcctatgcgcctcccacggactctttcctctgaaccctgttagggcttggttttaaaggattttatgtgtgtttccgaatgttttagttagccttttggtggagccgccagctgacaggacatcttacaagagaatttgcacatctctggaagcttagcaatcttattgcacactgttcgctggaagctttttgaagagcacattctcctcagtgagctcatgaggttttcatttttattcttccttccaacgtggtgctatctctgaaacgagcgttagagtgccgccttagacggaggcaggagtttcgttagaaagcggacgctgttctaaaaaaggtctcctgcagatctgtctgggctgtgatgacgaatattatgaaatgtgccttttctgaagagattgtgttagctccaaagcttttcctatcgcagtgtttcagttctttattttcccttgtggatatgctgtgtgaaccgtcgtgtgagtgtggtatgcctgatcacagatggattttgttataagcatcaatgtgacacttgcaggacactacaacgtgggacattgtttgtttcttccatatttggaagataaatttatgtgtagacttttttgtaagatacggttaataactaaaatttattgaaatggtcttgcaatgactcgtattcagatgcttaaagaaagcattgctgctacaaatatttctatttttagaaagggtttttatggaccaatgccccagttgtcagtcagagccgttggtgtttttcattgtttaaaatgtcacctgtaaaatgggcattatttatgtttttttttttgcattcctgataattgtatgtattgtataaagaacgtctgtacattgggttataacactagtatatttaaacttacaggcttatttgtaatgtaaaccaccattttaatgtactgtaattaacatggttataatacgtacaatccttccctcatcccatcacacaactttttttgtgtgtgataaactgattttggtttgcaataaaaccttgaaaaatatttacatata

SEQ ID NO: 55007 - DNA, 553 bp, Artificial Sequence
  derived and/or modified sequence
aatcaaaaacaactctcctctctcaagccgcctccaggagcgcatcacctggagaagagcgactcgctccccgcgccggccgcggaagagcagccaggtacgaaggtggatcaagagcccaatggtcagtgtggacaagcatcagagtcccagcctgaagtacaccggctcctccatggtgcacatccctccaggggagccagacttcgagtcttccttgtgtcaaacatgcctgggtgaacatgctttccaaagaggggttctccctcaggagaacgagtcatgttcatgggaaactcaatctgggtgtgaagtgagagagccatgtaatcatgccaacatcctgaccaagcccgatccaagaaccttctggactaatgatgatccagctttcatgaagcagaggaggatgggtctgaacgactttattcagaagattgccaataactcctatgcatgcaaacaccctgaagttcagtccatcttgaagatctcccaacctcaggagcctgagcttatgaatgccaacccttctcctccaccaagtccttct

SEQ ID NO: 55008 - DNA, 560 bp, Artificial Sequence
  derived and/or modified sequence
aactgctcttcagtgtgccctgagccggctgtgccttctctccatccgctgctcagatattcatgaaccgttgcttcttccagcctcgccttctcgctccctctgcctttctggcgctgttctccctccctccctctggcttctgctctttcttactccttctctcagctgcttaactacagctcccactggaacttgcacaatcaaaaacaactctcctctctcaagccgcctccaggagcgcatcacctggagaagagcgactcgctccccgcgccggccgcggaagagcagccaggaggtaaaccggggaaacagatatgcactaaccaggcgggtgccaacctggatctataactgtgaattccccacggtggaaaatggtaaacaaagacatgaatggattcccagtcaagaaatgctcagccttccaattttttaagaagcgggtacgaaggtggatcaagagcccaatggtcagtgtggacaagcatcagagtcccagcctgaagtacaccggctcctccatggtgcacatccctccaggggagccagacttc

SEQ ID NO: 55009 - DNA, 1581 bp, Artificial Sequence
  derived and/or modified sequence
atggtgaacaaggacatgaacggcttccccgtgaagaagtgcagcgccttccagttcttcaagaagagagtgagaagatggatcaagagccccatggtgagcgtggacaagcaccagagccccagcctgaagtacaccggcagcagcatggtgcacatcccccccggcgagcccgacttcgagagcagcctgtgccagacctgcctgggcgagcacgccttccagagaggcgtgctgccccaggagaacgagagctgcagctgggagacccagagcggctgcgaggtgagagagccctgcaaccacgccaacatcctgaccaagcccgaccccagaaccttctggaccaacgacgaccccgccttcatgaagcagagaagaatgggcctgaacgacttcatccagaagatcgccaacaacagctacgcctgcaagcaccccgaggtgcagagcatcctgaagatcagccagccccaggagcccgagctgatgaacgccaaccccagccccccccccagccccagccagcagatcaacctgggccccagcagcaacccccacgccaagcccagcgacttccacttcctgaaggtgatcggcaagggcagcttcggcaaggtgctgctggccagacacaaggccgaggaggtgttctacgccgtgaaggtgctgcagaagaaggccatcctgaagaagaaggaggagaagcacatcatgagcgagagaaacgtgctgctgaagaacgtgaagcaccccttcctggtgggcctgcacttcagcttccagaccgccgacaagctgtacttcgtgctggactacatcaacggcggcgagctgttctaccacctgcagagagagagatgcttcctggagcccagagccagattctacgccgccgagatcgccagcgccctgggctacctgcacagcctgaacatcgtgtacagagacctgaagcccgagaacatcctgctggacagccagggccacatcgtgctgaccgacttcggcctgtgcaaggagaacatcgagcacaacagcaccaccagcaccttctgcggcacccccgagtacctggcccccgaggtgctgcacaagcagccctacgacagaaccgtggactggtggtgcctgggcgccgtgctgtacgagatgctgtacggcctgccccccttctacagcagaaacaccgccgagatgtacgacaacatcctgaacaagcccctgcagctgaagcccaacatcaccaacagcgccagacacctgctggagggcctgctgcagaaggacagaaccaagagactgggcgccaaggacgacttcatggagatcaagagccacgtgttcttcagcctgatcaactgggacgacctgatcaacaagaagatcaccccccccttcaaccccaacgtgagcggccccaacgacctgagacacttcgaccccgagttcaccgaggagcccgtgcccaacagcatcggcaagagccccgacagcgtgctggtgaccgccagcgtgaaggaggccgccgaggccttcctgggcttcagctacgccccccccaccgacagcttcctgtag

SEQ ID NO: 55010 - DNA, 435 bp, Artificial Sequence
  derived and/or modified sequence
atggtgagcgtggacaagcaccagagccccagcctgaagtacaccggcagcagcatggtgcacatcccccccggcgagcccgacttcgagagcagcctgtgccagacctgcctgggcgagcacgccttccagagaggcgtgctgccccaggagaacgagagctgcagctgggagacccagagcggctgcgaggtgagagagccctgcaaccacgccaacatcctgaccaagcccgaccccagaaccttctggaccaacgacgaccccgccttcatgaagcagagaagaatgggcctgaacgacttcatccagaagatcgccaacaacagctacgcctgcaagcaccccgaggtgcagagcatcctgaagatcagccagccccaggagcccgagctgatgaacgccaaccccagccccccccccagccccagctag

SEQ ID NO: 55011 - DNA, 183 bp, Artificial Sequence
  derived and/or modified sequence
atggtgaacaaggacatgaacggcttccccgtgaagaagtgcagcgccttccagttcttcaagaagagagtgagaagatggatcaagagccccatggtgagcgtggacaagcaccagagccccagcctgaagtacaccggcagcagcatggtgcacatcccccccggcgagcccgacttctag

SEQ ID NO: 55012 - protein, 459 aa, Artificial Sequence
  derived and/or modified sequence
MSSQSSSLSEACSREAYSSHNWALPPASRSNPQPAYPWATRRMKEEAIKPPLKAFMKQRRMGLNDFIQKIANNSYACKHPEVQSILKISQPQEPELMNANPSPPPSPSQQINLGPSSNPHAKPSDFHFLKVIGKGSFGKVLLARHKAEEVFYAVKVLQKKAILKKKEEKHIMSERNVLLKNVKHPFLVGLHFSFQTADKLYFVLDYINGGELFYHLQRERCFLEPRARFYAAEIASALGYLHSLNIVYRDLKPENILLDSQGHIVLTDFGLCKENIEHNSTTSTFCGTPEYLAPEVLHKQPYDRTVDWWCLGAVLYEMLYGLPPFYSRNTAEMYDNILNKPLQLKPNITNSARHLLEGLLQKDRTKRLGAKDDFMEIKSHVFFSLINWDDLINKKITPPFNPNVSGPNDLRHFDPEFTEEPVPNSIGKSPDSVLVTASVKEAAEAFLGFSYAPPTDSFL

SEQ ID NO: 55013 - DNA, 1380 bp, Artificial Sequence
  derived and/or modified sequence
atgtcctctcagtcaagttcgctgtctgaggcttgctcccgcgaggcctacagttcccataactgggctttgcccccagctagccgctcgaatccacaacccgcctacccatgggccacaaggagaatgaaagaggaagcgataaagccacccctcaaggcgtttatgaaacagagacgaatggggctgaatgattttattcagaaaatcgccaacaatagttacgcttgtaagcaccccgaggtgcagtcgattttgaagattagccagccccaggagcctgagctcatgaacgcaaacccttcgccccctccttcgccttctcagcagatcaacctaggaccatctagtaacccgcatgcaaaacccagtgacttccatttcctcaaagtgattgggaagggaagcttcggcaaagtgctactggctagacataaggccgaggaggtcttttacgccgtcaaagttctgcagaagaaagccatcctaaagaaaaaggaggagaagcacatcatgagcgagaggaacgttctcctgaagaacgtgaaacacccgtttttggtgggcttgcacttttcattccagactgctgacaaactgtattttgtccttgattacattaatggcggcgaattgttctatcatttacaacgagagagatgtttcctggaaccacgagctcggttctacgcggctgagatcgcctctgcgctaggataccttcatagtttgaacatcgtatatagggatctgaagcccgagaatatcttgctggattctcagggtcacatcgtgctgacagactttggtctttgtaaggaaaatatcgaacataactctactaccagcaccttctgcggtacccctgaatatttggcccccgaggtgcttcacaagcagccctatgacaggacggtcgactggtggtgcctgggagccgtgctttacgaaatgctctacggtctgccccccttttacagcagaaacaccgccgagatgtatgacaacatccttaacaaacccctgcagctaaagcccaacattaccaattccgcaaggcacctgttagaaggacttctccaaaaagacagaacaaaaaggctgggggctaaagatgactttatggaaatcaaatcacacgtgtttttttcgctaattaactgggacgacctgattaataagaagatcacacctccttttaacccgaatgtctcggggcctaatgatcttcgacactttgaccccgagttcactgaggagccagtgcccaattccattggaaaatctcccgatagcgtgctggtgacagcttctgttaaagaggcagctgaggcatttcttggtttctcttacgcgcctcctacagattcatttctttag

SEQ ID NO: 55014 - DNA, 1380 bp, Artificial Sequence
  derived and/or modified sequence
atgagcagccagagcagcagcctgtctgaggcctgcagccgggaggcctacagcagccacaactgggccctgcccccagccagccgcagcaacccccagcctgcctacccctgggccaccaggaggatgaaggaggaggccatcaagccacccctgaaggccttcatgaagcagaggaggatgggcctgaatgacttcatccagaagatcgccaacaacagctatgcctgcaagcaccctgaggtgcagagcatcctgaagatcagccagccccaggagcctgagctgatgaatgccaaccccagccccccacccagccccagccagcagatcaacctgggccccagcagcaacccccacgccaagcccagcgacttccacttcctgaaggtgattggcaagggcagctttgggaaggtgctgctggcccggcacaaggccgaggaggtgttctatgctgtgaaggtgctgcagaagaaggccatcctgaagaagaaggaggagaagcacatcatgtctgaaagaaatgtgctgctgaagaatgtgaagcaccccttcctggtgggcctgcacttctccttccagacagctgacaagctgtactttgtgctggactacatcaatggaggagagctgttctaccacctgcagcgggagcgctgcttcctggagccccgggcccgcttctatgctgctgagatcgccagcgccctgggctacctgcacagcctgaacatcgtgtacagagacctgaagccagagaacatcctgctggacagccagggccacatcgtgctgacagactttggcctgtgcaaggagaacatcgagcacaacagcaccaccagcaccttctgtggcaccccagagtacctggcccctgaggtgctgcacaagcagccctatgacagaacagtggactggtggtgcctgggcgctgtgctgtatgagatgctgtatggcctgccccccttctacagcaggaacacagctgagatgtatgacaacatcctgaacaagcccctgcagctgaagcccaacatcaccaacagcgcccggcacctgctggagggcctgctgcagaaggacaggaccaagaggctgggcgccaaggatgacttcatggagatcaagagccacgtgttcttcagcctcatcaactgggatgacctgatcaacaagaagatcaccccacccttcaaccccaacgtgtctggccccaatgacctgcggcactttgatcctgagttcacagaggagcctgtgcccaacagcatcggcaagagcccagacagcgtgctggtgacagcctctgtgaaggaggccgctgaggccttcctgggcttctcctatgccccacccacagacagcttcctgtag

SEQ ID NO: 55015 - DNA, 1380 bp, Artificial Sequence
  derived and/or modified sequence
atgagcagccagagcagcagcctgagcgaggcctgcagccgggaggcatacagcagtcacaattgggctttgccccccgcgtcaaggtctaacccccagcccgcctatccctgggcgacccggcggatgaaagaggaagcaattaagcctcctctgaaagcattcatgaagcaacgcaggatgggattgaatgatttcatccaaaaaatcgcaaataacagctatgcgtgtaaacatccagaagtgcaatctattctcaagatctcccagcctcaggagcctgagctgatgaacgccaatccctctcctccaccatcacctagtcaacaaattaacttggggcccagttccaatccgcatgcaaaaccaagcgactttcatttccttaaggtgatcggaaagggctcattcgggaaagtacttctggcgcgacataaggctgaggaagtattctacgccgtcaaagtactacaaaaaaaggcgatcctgaaaaaaaaggaggaaaagcatatcatgtctgagaggaacgtactgctgaagaacgtgaaacaccctttcctagtgggccttcattttagcttccagaccgctgacaagttatacttcgtgctagactatatcaacggaggtgagcttttttaccaccttcaacgagagaggtgttttctggaaccccgggctaggttctatgccgctgagatagcttctgctctgggatatctgcatagcctcaacatagtgtatcgtgatcttaagcctgagaatattcttttagacagtcagggccatatcgtgctgacagacttcggactttgcaaggaaaacatagagcacaactccactacctccaccttttgcggaacgccagaatacttagcgcccgaggtcctccacaaacagccttacgacagaactgtcgactggtggtgcttgggggccgtgctgtatgaaatgctatacggcctaccacccttctactcaaggaataccgccgagatgtatgacaatattttaaacaaacctttgcaattaaaacccaacatcactaattcagcccgtcatctgctggaaggcctgttacagaaggacagaaccaagcgtttgggagccaaagatgattttatggagatcaagagccacgtgttcttttctttgatcaactgggatgacctcatcaacaagaagatcacacctccttttaacccaaatgtgagcggccccaacgaccttagacactttgacccagagtttacagaagagccggtaccaaattccattggaaagtctccggattcggtacttgtgacggccagtgtaaaggaggccgccgaagcgttcttgggcttctcttatgccccacctacagactcattcctttag

SEQ ID NO: 55016 - DNA, 1380 bp, Artificial Sequence
  derived and/or modified sequence
atgtcatctcaaagctccagcctgtcagaggcctgcagccgagaggcgtactctagtcataattgggcactccccccagcgtcccgatcaaatccacagcctgcatatccgtgggctacacgcagaatgaaagaggaggccataaaaccccctctgaaagcctttatgaagcaacgtagaatgggccttaatgattttattcagaagatcgcaaataatagctacgcctgcaaacaccctgaagtccagtccattctcaagataagtcagccgcaggagcccgaacttatgaacgcgaatcctagtccgccaccttctcccagccaacaaatcaacctgggaccaagttcgaatccccacgctaagcctagtgatttccatttcttgaaagtgatcggaaaggggagctttggcaaggtactgctcgctcgccataaggccgaagaggtgttttacgccgtgaaagtgctgcagaagaaagcaatcctgaaaaagaaagaggagaagcacatcatgagcgagaggaatgttctcctgaaaaatgtcaaacacccatttctcgtgggccttcacttctcattccagaccgcagataaactgtacttcgtcctggactacattaatggtggagaactgttctatcatcttcagcgagagagatgcttcctagaacccagggcgcgattctatgccgctgaaattgctagtgccctgggatacctgcacagcctaaatatcgtatatcgcgacctaaaacccgagaacatcttgctggattcccaaggacacatcgtcctgaccgatttcgggctgtgcaaggagaacatcgagcacaatagcaccacctccacattctgcgggactcccgagtacctggcaccagaggttctgcataagcagccttatgatcgcacagtggattggtggtgcctcggggcagtgttgtatgagatgttatacggattaccgccattctacagtcgcaacacagccgaaatgtacgataatatactgaacaaacccctacagctgaaacctaacattacaaactccgctagacacctcctggagggcctgctccagaaggaccggaccaaacggcttggagccaaagatgattttatggagattaaatcccacgttttcttctctctcatcaattgggacgaccttattaacaagaaaatcacccctccctttaaccccaatgtgtctggtcctaacgatctgaggcatttcgatcctgaattcacagaggaacctgtgccaaacagcattggaaaaagcccggattccgtactggtgacagccagcgtcaaagaggctgctgaggccttcctgggattctcgtacgctcccccaacagactccttcctctag

SEQ ID NO: 55017 - DNA, 1850 bp, Artificial Sequence
  derived and/or modified sequence
gctcccttcctgtacttaaattgccttgatataaagtggggttcataacagaacagggatagccgtctctggctcgtgctctcatgtcatctcagagttccagcttatcagaggcatgtagcagggaggcttattccagccataactgggctctacctccagcctccagaagtaatccccaacctgcatatccttgggcaacccgaagaatgaaagaagaagctataaaaccccctttgaaagctttcatgaagcagaggaggatgggtctgaacgactttattcagaagattgccaataactcctatgcatgcaaacaccctgaagttcagtccatcttgaagatctcccaacctcaggagcctgagcttatgaatgccaacccttctcctccaccaagtccttctcagcaaatcaaccttggcccgtcgtccaatcctcatgctaaaccatctgactttcacttcttgaaagtgatcggaaagggcagttttggaaaggttcttctagcaagacacaaggcagaagaagtgttctatgcagtcaaagttttacagaagaaagcaatcctgaaaaagaaagaggagaagcatattatgtcggagcggaatgttctgttgaagaatgtgaagcaccctttcctggtgggccttcacttctctttccagactgctgacaaattgtactttgtcctagactacattaatggtggagagttgttctaccatctccagagggaacgctgcttcctggaaccacgggctcgtttctatgctgctgaaatagccagtgccttgggctacctgcattcactgaacatcgtttatagagacttaaaaccagagaatattttgctagattcacagggacacattgtccttactgacttcggactctgcaaggagaacattgaacacaacagcacaacatccaccttctgtggcacgccggagtatctcgcacctgaggtgcttcataagcagccttatgacaggactgtggactggtggtgcctgggagctgtcttgtatgagatgctgtatggcctgccgcctttttatagccgaaacacagctgaaatgtacgacaacattctgaacaagcctctccagctgaaaccaaatattacaaattccgcaagacacctcctggagggcctcctgcagaaggacaggacaaagcggctcggggccaaggatgacttcatggagattaagagtcatgtcttcttctccttaattaactgggatgatctcattaataagaagattactcccccttttaacccaaatgtgagtgggcccaacgacctacggcactttgaccccgagtttaccgaagagcctgtccccaactccattggcaagtcccctgacagcgtcctcgtcacagccagcgtcaaggaagctgccgaggctttcctaggcttttcctatgcgcctcccacggactctttcctctgaaccctgttagggcttggttttaaaggattttatgtgtgtttccgaatgttttagttagccttttggtggagccgccagctgacaggacatcttacaagagaatttgcacatctctggaagcttagcaatcttattgcacactgttcgctggaagctttttgaagagcacattctcctcagtgagctcatgaggttttcatttttattcttccttccaacgtggtgctatctctgaaacgagcgttagagtgccgccttagacggaggcaggagtttcgttagaaagcggacgctgttctaaaaaaggtctcctgcagatctgtctgggctgtgatgacgaatattatgaaatgtgccttttctgaagagattgtgttagctccaaag

SEQ ID NO: 55018 - DNA, 1380 bp, Artificial Sequence
  derived and/or modified sequence
atgagcagccagagcagcagcctgagcgaggcctgcagcagagaggcctacagcagccacaactgggccctgccccccgccagcagaagcaacccccagcccgcctacccctgggccaccagaagaatgaaggaggaggccatcaagccccccctgaaggccttcatgaagcagagaagaatgggcctgaacgacttcatccagaagatcgccaacaacagctacgcctgcaagcaccccgaggtgcagagcatcctgaagatcagccagccccaggagcccgagctgatgaacgccaaccccagccccccccccagccccagccagcagatcaacctgggccccagcagcaacccccacgccaagcccagcgacttccacttcctgaaggtgatcggcaagggcagcttcggcaaggtgctgctggccagacacaaggccgaggaggtgttctacgccgtgaaggtgctgcagaagaaggccatcctgaagaagaaggaggagaagcacatcatgagcgagagaaacgtgctgctgaagaacgtgaagcaccccttcctggtgggcctgcacttcagcttccagaccgccgacaagctgtacttcgtgctggactacatcaacggcggcgagctgttctaccacctgcagagagagagatgcttcctggagcccagagccagattctacgccgccgagatcgccagcgccctgggctacctgcacagcctgaacatcgtgtacagagacctgaagcccgagaacatcctgctggacagccagggccacatcgtgctgaccgacttcggcctgtgcaaggagaacatcgagcacaacagcaccaccagcaccttctgcggcacccccgagtacctggcccccgaggtgctgcacaagcagccctacgacagaaccgtggactggtggtgcctgggcgccgtgctgtacgagatgctgtacggcctgccccccttctacagcagaaacaccgccgagatgtacgacaacatcctgaacaagcccctgcagctgaagcccaacatcaccaacagcgccagacacctgctggagggcctgctgcagaaggacagaaccaagagactgggcgccaaggacgacttcatggagatcaagagccacgtgttcttcagcctgatcaactgggacgacctgatcaacaagaagatcaccccccccttcaaccccaacgtgagcggccccaacgacctgagacacttcgaccccgagttcaccgaggagcccgtgcccaacagcatcggcaagagccccgacagcgtgctggtgaccgccagcgtgaaggaggccgccgaggccttcctgggcttcagctacgccccccccaccgacagcttcctgtag

SEQ ID NO: 55019 - protein, 445 aa, Artificial Sequence
  derived and/or modified sequence
MGEMQGALARARLESLLRPRHKKRAEAQKRSESFLLSGLAFMKQRRMGLNDFIQKIANNSYACKHPEVQSILKISQPQEPELMNANPSPPPSPSQQINLGPSSNPHAKPSDFHFLKVIGKGSFGKVLLARHKAEEVFYAVKVLQKKAILKKKEEKHIMSERNVLLKNVKHPFLVGLHFSFQTADKLYFVLDYINGGELFYHLQRERCFLEPRARFYAAEIASALGYLHSLNIVYRDLKPENILLDSQGHIVLTDFGLCKENIEHNSTTSTFCGTPEYLAPEVLHKQPYDRTVDWWCLGAVLYEMLYGLPPFYSRNTAEMYDNILNKPLQLKPNITNSARHLLEGLLQKDRTKRLGAKDDFMEIKSHVFFSLINWDDLINKKITPPFNPNVSGPNDLRHFDPEFTEEPVPNSIGKSPDSVLVTASVKEAAEAFLGFSYAPPTDSFL

SEQ ID NO: 55020 - DNA, 1266 bp, Artificial Sequence
  derived and/or modified sequence
atgaaacccagcaaaagattttttatctcaccccccagcagcacggcctttatgaaacagagaaggatgggactgaatgattttatccagaagatagctaataacagctatgcttgcaagcacccagaggtccaaagcatcctcaaaatatctcagcctcaagagcccgagctgatgaacgccaacccatcacctccacctagtccatcccagcagatcaatctcggaccttctagcaaccctcacgctaagccttccgattttcatttcttgaaggtcataggtaagggttcatttggaaaagtgctccttgcacgccacaaggccgaggaggtgttctacgccgtgaaagttctgcagaaaaaggcgattttaaagaagaaggaagagaagcacatcatgtcagaacgcaatgtcttgctaaagaacgtgaagcatccttttcttgtcggcctgcacttcagctttcagacagcagacaaattgtacttcgtactggattacatcaatggtggcgaattgttctaccacttacagcgggagcggtgtttcctggagccaagggccagattttacgcagcggaaatcgccagcgccttggggtacctccacagcctaaatatcgtatatcgcgatcttaagcctgagaatatcctcctggattcacagggacacatcgtgctgacggacttcggactatgtaaggaaaacatagaacacaattcgaccacatccacattctgtggcacacctgagtacctggcgcctgaagtcttacacaagcagccatatgatcggacagtggattggtggtgcttgggggcggtcctgtatgagatgttatatggattgcccccgttctactcccgtaacacagccgagatgtatgacaatattctgaataagcctctccaactcaagcccaatatcacaaacagcgctaggcatttacttgagggcctgttgcagaaagatagaactaaacggctcggagcgaaggacgactttatggagatcaagagtcacgtgtttttctctctcatcaactgggatgatttgataaataagaagattacccccccattcaacccaaacgtaagcgggcccaatgatctgaggcacttcgatcccgaattcacagaggagccagtgcctaactcgatcggtaaaagcccagacagcgtgctggtcactgcaagtgtgaaggaggccgctgaggcatttcttggattcagctacgcacccccaactgactcctttctttag

SEQ ID NO: 55021 - DNA, 1338 bp, Artificial Sequence
  derived and/or modified sequence
atgggcgagatgcagggtgcattggcaagagctcggcttgaaagcttgctccggcctagacacaagaaaagagctgaggcccaaaaacgttctgagtcatttctgctatctggactcgcgtttatgaagcagagacggatggggctcaacgactttatccagaaaattgctaacaattcttatgcctgcaaacatcccgaggtgcagagcatcctgaaaatttcacagccccaggagcctgagctgatgaacgcgaacccctcaccacccccttcgccctcacaacagatcaatctggggccctcctcaaatcctcacgctaagccctccgattttcattttctaaaggtgatcggaaaggggagtttcggaaaggtgcttctcgcgagacacaaggccgaggaggtcttctacgctgtgaaagtgctgcagaagaaagccatactaaagaagaaggaggagaaacatattatgtctgagcgcaacgttctcctgaaaaatgtgaaacacccatttctcgttggcctgcacttcagtttccagacagcggacaagctgtattttgtgcttgattacatcaacggaggcgagctgttctaccacttgcaacgtgagcggtgttttctggagccaagggcaaggttttacgccgccgagatcgccagtgccctcggctacctgcactctctcaatattgtgtaccgcgacctgaaacccgaaaatattttgctggatagccaggggcatattgtactgactgatttcgggctctgcaaggaaaatatcgaacacaattccacgacatcaaccttctgtggtacgcctgaatacttggctcccgaggtgctgcacaagcagccttacgatcgaaccgtagattggtggtgtctcggtgccgtgctgtacgaaatgctgtatggtctgccccccttttacagtcgcaatactgctgaaatgtatgacaacattctaaataagccccttcagttaaaacctaatattactaatagcgcaaggcatcttctggaaggcctgctgcaaaaggatagaaccaagagactgggcgcaaaggatgactttatggaaattaaatcccatgtctttttttccctcattaattgggacgacttgataaacaaaaagataactcccccatttaaccccaacgtctctggccctaatgacctgcggcatttcgatcctgaatttactgaggaaccagtccccaattctattgggaagtccccagatagcgtgctcgtaaccgctagcgtcaaggaggccgccgaggccttcttaggattttcgtacgctccaccaacggactccttcctgtag

SEQ ID NO: 55022 - DNA, 1266 bp, Artificial Sequence
  derived and/or modified sequence
atgaagcccagcaagcgcttcttcatcagcccccccagcagcacagccttcatgaagcagaggaggatgggcctgaatgacttcatccagaagatcgccaacaacagctatgcctgcaagcaccctgaggtgcagagcatcctgaagatcagccagccccaggagcctgagctgatgaatgccaaccccagccccccacccagccccagccagcagatcaacctgggccccagcagcaacccccacgccaagcccagcgacttccacttcctgaaggtgattggcaagggcagctttgggaaggtgctgctggcccggcacaaggccgaggaggtgttctatgctgtgaaggtgctgcagaagaaggccatcctgaagaagaaggaggagaagcacatcatgtctgaaagaaatgtgctgctgaagaatgtgaagcaccccttcctggtgggcctgcacttctccttccagacagctgacaagctgtactttgtgctggactacatcaatggaggagagctgttctaccacctgcagcgggagcgctgcttcctggagccccgggcccgcttctatgctgctgagatcgccagcgccctgggctacctgcacagcctgaacatcgtgtacagagacctgaagccagagaacatcctgctggacagccagggccacatcgtgctgacagactttggcctgtgcaaggagaacatcgagcacaacagcaccaccagcaccttctgtggcaccccagagtacctggcccctgaggtgctgcacaagcagccctatgacagaacagtggactggtggtgcctgggcgctgtgctgtatgagatgctgtatggcctgccccccttctacagcaggaacacagctgagatgtatgacaacatcctgaacaagcccctgcagctgaagcccaacatcaccaacagcgcccggcacctgctggagggcctgctgcagaaggacaggaccaagaggctgggcgccaaggatgacttcatggagatcaagagccacgtgttcttcagcctcatcaactgggatgacctgatcaacaagaagatcaccccacccttcaaccccaacgtgtctggccccaatgacctgcggcactttgatcctgagttcacagaggagcctgtgcccaacagcatcggcaagagcccagacagcgtgctggtgacagcctctgtgaaggaggccgctgaggccttcctgggcttctcctatgccccacccacagacagcttcctgtag

SEQ ID NO: 55023 - DNA, 1338 bp, Artificial Sequence
  derived and/or modified sequence
atgggagagatgcagggcgccctggcccgggcccggctggagagcctgctgcggcccaggcacaagaagagagctgaggcccagaagaggtctgagagcttcctgctgagcggcctggccttcatgaagcagaggaggatgggcctgaatgacttcatccagaagatcgccaacaacagctatgcctgcaagcaccctgaggtgcagagcatcctgaagatcagccagccccaggagcctgagctgatgaatgccaaccccagccccccacccagccccagccagcagatcaacctgggccccagcagcaacccccacgccaagcccagcgacttccacttcctgaaggtgattggcaagggcagctttgggaaggtgctgctggcccggcacaaggccgaggaggtgttctatgctgtgaaggtgctgcagaagaaggccatcctgaagaagaaggaggagaagcacatcatgtctgaaagaaatgtgctgctgaagaatgtgaagcaccccttcctggtgggcctgcacttctccttccagacagctgacaagctgtactttgtgctggactacatcaatggaggagagctgttctaccacctgcagcgggagcgctgcttcctggagccccgggcccgcttctatgctgctgagatcgccagcgccctgggctacctgcacagcctgaacatcgtgtacagagacctgaagccagagaacatcctgctggacagccagggccacatcgtgctgacagactttggcctgtgcaaggagaacatcgagcacaacagcaccaccagcaccttctgtggcaccccagagtacctggcccctgaggtgctgcacaagcagccctatgacagaacagtggactggtggtgcctgggcgctgtgctgtatgagatgctgtatggcctgccccccttctacagcaggaacacagctgagatgtatgacaacatcctgaacaagcccctgcagctgaagcccaacatcaccaacagcgcccggcacctgctggagggcctgctgcagaaggacaggaccaagaggctgggcgccaaggatgacttcatggagatcaagagccacgtgttcttcagcctcatcaactgggatgacctgatcaacaagaagatcaccccacccttcaaccccaacgtgtctggccccaatgacctgcggcactttgatcctgagttcacagaggagcctgtgcccaacagcatcggcaagagcccagacagcgtgctggtgacagcctctgtgaaggaggccgctgaggccttcctgggcttctcctatgccccacccacagacagcttcctgtag

SEQ ID NO: 55024 - DNA, 1266 bp, Artificial Sequence
  derived and/or modified sequence
atgaagcccagcaagcggttcttcatcagcccccccagcagcaccgcttttatgaaacaacggagaatggggttgaatgactttatccagaagatagcaaacaacagctatgcatgtaagcacccagaggtccagtccatcctcaagatcagtcagccacaggagccggagttgatgaatgccaaccctagcccgcctccatccccttcccagcagatcaacctcggtccaagttccaatccacacgctaagccaagcgatttccactttctcaaagtgataggcaaaggtagttttggcaaggtgttactcgccaggcacaaagccgaggaggtcttttacgccgtgaaggtgctgcaaaaaaaagcaattttaaagaaaaaggaagaaaagcatatcatgagtgaacggaacgtcctcctcaagaacgtgaagcatccattcttggtaggactacatttctctttccagaccgccgacaagctgtacttcgtgctggattatatcaacggcggggagctgttttaccacctgcagcgagagcgatgtttccttgaacctcgggcgcgcttttacgcagctgaaattgcctctgcattgggctatctgcactcgcttaacattgtttacagagacctgaaaccggaaaatatactgcttgactctcagggccacatagtgcttaccgacttcggcttgtgcaaagagaacatcgagcacaattcgaccactagcacattctgcggcacaccagagtacttagcaccagaagtgctgcacaaacagccatacgacaggacagtagattggtggtgtctgggggcagtgctgtacgagatgctctatggcctgcctcctttttactcgaggaacaccgcagaaatgtacgacaatattctgaacaaaccattgcaactgaagccaaatatcacaaactccgcacggcatttgctggagggtctgcttcagaaggatcgaaccaagcgtctcggtgcgaaagatgatttcatggaaataaagtctcatgtgttcttctccttgatcaattgggacgatttaatcaacaaaaagatcacacccccctttaacccgaatgtgagtgggcccaacgacctccggcacttcgacccggagtttactgaagagccggtacctaacagtataggaaaaagtcccgacagtgtcttagtaacagcaagcgtaaaagaagcggccgaggccttcctggggttctcgtatgcaccgcccactgattcttttctgtag

SEQ ID NO: 55025 - DNA, 1338 bp, Artificial Sequence
  derived and/or modified sequence
atgggcgagatgcagggcgccctggcccgggcccggctggagagcctgcttagaccacggcataagaagcgtgcagaagcccagaagcgatcagagtctttcttgctctccgggttagcctttatgaagcaaagacgtatggggctcaacgactttatacagaaaattgcaaacaactcctatgcttgcaaacaccccgaagtgcagagtatacttaaaatctctcagccacaggaaccggaactcatgaacgcaaatccaagccctccccccagcccttcccagcagattaacctgggccccagttcaaaccctcatgccaagccctctgactttcactttctcaaagtaatcggcaaaggctcattcgggaaagtgttgctcgcacggcacaaggcagaggaggtattttacgcagtaaaagttttacaaaagaaggccattctgaagaaaaaagaagagaaacatatcatgtcagagcgtaacgtcctgctaaaaaacgtcaaacacccttttctggtggggctgcacttcagcttccagacggcagacaagctgtacttcgttctggactatataaatggcggggaactgttctaccatcttcagagagaacgttgttttcttgagcctcgtgcaaggttctacgcagccgagatagcctctgccctcggttaccttcactctcttaacatagtctatcgcgacttgaaacccgagaatattctgcttgatagccaggggcatatcgtgctgaccgattttggtctgtgtaaagagaatatcgaacacaactccacaacctccaccttctgcggcacccccgaatacctcgcaccagaggtacttcacaagcagccttatgatcgaaccgtggattggtggtgcctgggagcagtgctgtacgaaatgctctatggcctacctcctttctatagcagaaacactgctgagatgtacgacaatatccttaataagcccctgcagttaaagcccaatataaccaattccgcacgtcatctgctcgagggcttactacagaaagatagaaccaaaaggcttggagctaaagatgacttcatggagatcaagtcgcatgtttttttttctctgattaactgggatgatctgattaacaaaaagatcactcctccattcaacccaaacgtaagcggccctaatgacctacggcattttgatccagagtttaccgaagagcctgttcctaacagcatcggcaagagccctgactctgttctagtaactgctagtgtgaaggaggctgctgaagctttcctcggattctcctacgccccccctaccgatagctttttgtag

SEQ ID NO: 55026 - DNA, 1266 bp, Artificial Sequence
  derived and/or modified sequence
atgaaaccatccaagcggttcttcatctcccccccttcgagtaccgctttcatgaagcagaggaggatggggttgaatgactttatacagaaaatagcaaacaatagctacgcgtgtaagcatccggaggtccagtccatattaaaaatctcccagccccaagagcccgagctaatgaatgcaaacccaagcccacccccatctccaagccagcagatcaatcttggcccttcctcaaatcctcacgccaaaccgtccgattttcacttcctcaaagtcatcgggaagggctcctttggaaaagtgctgcttgctcgacacaaggcagaggaagtattttatgcagtcaaagtgttacaaaaaaaagcaatattaaagaaaaaggaagaaaagcatataatgtctgagagaaatgtcctactcaagaacgtgaaacatccattcttggttggcctccatttctcctttcagacagccgataagctctacttcgtgctggactatatcaacggtggcgaactattttatcatctgcagcgtgagaggtgctttcttgagcctcgggcaaggttttacgccgcagaaatcgccagtgcgctcggttatctccactctctgaatattgtttatcgggatctcaagcctgagaatatcttgctggatagccagggccacatcgtgctgacggatttcggcctttgtaaggaaaacattgaacacaattctacaacatccactttctgtgggacaccagagtacttagctcctgaggttttgcacaagcaaccttacgatcggactgtcgattggtggtgtctgggagctgtgctgtacgaaatgctctatggcttgcccccattctacagtaggaacacagcagaaatgtacgacaacatcctgaacaaaccactacagctgaagccaaatataactaattctgcacggcacctcctcgagggcttgttgcagaaagaccgcaccaagagactaggggctaaagatgatttcatggaaatcaagtcgcatgtcttcttctctttaataaactgggatgatttgataaataaaaagattacaccacctttcaatcctaacgtgtcagggcctaatgatctgaggcattttgatcccgaatttaccgaagaacctgttcccaactcaatcggtaagagtcctgattctgtgttggtgacagcttctgtaaaggaagccgcagaagcttttctgggttttagttacgcaccgccaactgatagcttcctttag

SEQ ID NO: 55027 - DNA, 1338 bp, Artificial Sequence
  derived and/or modified sequence
atgggggagatgcagggcgctctggccagagctcgcctcgaatctctcctcagaccacggcataagaaacgagccgaagcacagaagaggtcagaaagctttctgctctctggcttggcctttatgaaacagcgtagaatggggcttaatgactttattcagaagattgctaataattcctacgcatgcaaacatcccgaggtccagtccatcctgaagatctctcagcctcaagaacccgagttaatgaatgccaatccctcacctccaccttctccttcacagcagatcaatctcgggcctagttctaatccacacgcgaagccgagcgacttccactttcttaaagtgatcggtaaaggaagcttcggaaaggtgctgcttgctcgacacaaggctgaagaggtgttttatgccgtgaaggtactgcaaaaaaaagctattctcaaaaaaaaggaggagaagcacatcatgtctgaacggaatgtgctgttaaaaaatgttaaacacccgtttcttgttggcctgcatttttccttccagaccgcagataagctatacttcgtactcgactatattaacggcggtgagctcttctaccacctccagagagaacgatgcttcttggagccaagagcgcgattctacgccgcagagatcgcaagtgctctcggttatctccacagccttaacatcgtgtacagggatctcaagccagaaaacattctactggattctcaaggccacatagtactcaccgactttggcctgtgtaaggagaatattgaacataactctacaacgagtactttctgcgggacacccgaatacctggccccagaagtccttcacaaacagccgtacgaccggaccgtcgattggtggtgcctgggcgctgttctctatgaaatgctctacggtctccccccattttacagcagaaacactgcggaaatgtacgataacatcctgaacaaacccctgcaactgaagcccaatatcaccaactctgctagacatctgctagaaggcttgttacagaaggaccgaacgaagagattgggagccaaagacgatttcatggagataaaatcgcacgtcttcttcagtctcataaattgggacgacctgatcaacaagaagataactcccccatttaatcccaacgtgtcgggcccaaatgatctcaggcatttcgaccctgagttcacagaagagcccgtgccaaactctattggcaaaagccccgactctgtcttggtgacagccagcgtcaaggaggcagctgaggcctttctgggcttctcttacgctccccctaccgatagtttcctttag

SEQ ID NO: 55028 - DNA, 2414 bp, Artificial Sequence
  derived and/or modified sequence
cagcatacgccgagccggtctttgagcgctaacgtctttctgtctccccgcggtggtgatgacggtgaaaactgaggctgctaagggcaccctcacttactccaggatgaggggcatggtggcaattctcatcggtgagtgcaggaatcttgcgggacttctgctccaggagacgcaaagtggaaattttttgaaagtcccggatcagattagtgtgtgtggcgccggacgttatgaagccgtctaaacgtttctttatttctcctccttcatccacagctttcatgaagcagaggaggatgggtctgaacgactttattcagaagattgccaataactcctatgcatgcaaacaccctgaagttcagtccatcttgaagatctcccaacctcaggagcctgagcttatgaatgccaacccttctcctccaccaagtccttctcagcaaatcaaccttggcccgtcgtccaatcctcatgctaaaccatctgactttcacttcttgaaagtgatcggaaagggcagttttggaaaggttcttctagcaagacacaaggcagaagaagtgttctatgcagtcaaagttttacagaagaaagcaatcctgaaaaagaaagaggagaagcatattatgtcggagcggaatgttctgttgaagaatgtgaagcaccctttcctggtgggccttcacttctctttccagactgctgacaaattgtactttgtcctagactacattaatggtggagagttgttctaccatctccagagggaacgctgcttcctggaaccacgggctcgtttctatgctgctgaaatagccagtgccttgggctacctgcattcactgaacatcgtttatagagacttaaaaccagagaatattttgctagattcacagggacacattgtccttactgacttcggactctgcaaggagaacattgaacacaacagcacaacatccaccttctgtggcacgccggagtatctcgcacctgaggtgcttcataagcagccttatgacaggactgtggactggtggtgcctgggagctgtcttgtatgagatgctgtatggcctgccgcctttttatagccgaaacacagctgaaatgtacgacaacattctgaacaagcctctccagctgaaaccaaatattacaaattccgcaagacacctcctggagggcctcctgcagaaggacaggacaaagcggctcggggccaaggatgacttcatggagattaagagtcatgtcttcttctccttaattaactgggatgatctcattaataagaagattactcccccttttaacccaaatgtgagtgggcccaacgacctacggcactttgaccccgagtttaccgaagagcctgtccccaactccattggcaagtcccctgacagcgtcctcgtcacagccagcgtcaaggaagctgccgaggctttcctaggcttttcctatgcgcctcccacggactctttcctctgaaccctgttagggcttggttttaaaggattttatgtgtgtttccgaatgttttagttagccttttggtggagccgccagctgacaggacatcttacaagagaatttgcacatctctggaagcttagcaatcttattgcacactgttcgctggaagctttttgaagagcacattctcctcagtgagctcatgaggttttcatttttattcttccttccaacgtggtgctatctctgaaacgagcgttagagtgccgccttagacggaggcaggagtttcgttagaaagcggacgctgttctaaaaaaggtctcctgcagatctgtctgggctgtgatgacgaatattatgaaatgtgccttttctgaagagattgtgttagctccaaagcttttcctatcgcagtgtttcagttctttattttcccttgtggatatgctgtgtgaaccgtcgtgtgagtgtggtatgcctgatcacagatggattttgttataagcatcaatgtgacacttgcaggacactacaacgtgggacattgtttgtttcttccatatttggaagataaatttatgtgtagacttttttgtaagatacggttaataactaaaatttattgaaatggtcttgcaatgactcgtattcagatgcttaaagaaagcattgctgctacaaatatttctatttttagaaagggtttttatggaccaatgccccagttgtcagtcagagccgttggtgtttttcattgtttaaaatgtcacctgtaaaatgggcattatttatgtttttttttttgcattcctgataattgtatgtattgtataaagaacgtctgtacattgggttataacactagtatatttaaacttacaggcttatttgtaatgtaaaccaccattttaatgtactgtaattaac

SEQ ID NO: 55029 - DNA, 2686 bp, Artificial Sequence
  derived and/or modified sequence
gcagattgtacttcttcctttagtgcagagacgacttttatttccgccccctcccctccacattcctgacctctccctcccccttttccctctttctttccttccttcctcctcttccaagttctgggatttttcagccttgcttggttttggccaaaagcacaaaaaaggcgttttcggaagcgacccgaccgtgcacaagggccatttgtttgttttgggactcggggcaggaaatcttgcccggcctgagtcacggcggctccttcaaggaaacgtcagtgctcgccggtcgctctcgtctgccgcgcgccccgccgcccgctgcccatgggggagatgcagggcgcgctggccagagcccggctcgagtccctgctgcggccccgccacaaaaagagggccgaggcgcagaaaaggagcgagtccttcctgctgagcggactggctttcatgaagcagaggaggatgggtctgaacgactttattcagaagattgccaataactcctatgcatgcaaacaccctgaagttcagtccatcttgaagatctcccaacctcaggagcctgagcttatgaatgccaacccttctcctccaccaagtccttctcagcaaatcaaccttggcccgtcgtccaatcctcatgctaaaccatctgactttcacttcttgaaagtgatcggaaagggcagttttggaaaggttcttctagcaagacacaaggcagaagaagtgttctatgcagtcaaagttttacagaagaaagcaatcctgaaaaagaaagaggagaagcatattatgtcggagcggaatgttctgttgaagaatgtgaagcaccctttcctggtgggccttcacttctctttccagactgctgacaaattgtactttgtcctagactacattaatggtggagagttgttctaccatctccagagggaacgctgcttcctggaaccacgggctcgtttctatgctgctgaaatagccagtgccttgggctacctgcattcactgaacatcgtttatagagacttaaaaccagagaatattttgctagattcacagggacacattgtccttactgacttcggactctgcaaggagaacattgaacacaacagcacaacatccaccttctgtggcacgccggagtatctcgcacctgaggtgcttcataagcagccttatgacaggactgtggactggtggtgcctgggagctgtcttgtatgagatgctgtatggcctgccgcctttttatagccgaaacacagctgaaatgtacgacaacattctgaacaagcctctccagctgaaaccaaatattacaaattccgcaagacacctcctggagggcctcctgcagaaggacaggacaaagcggctcggggccaaggatgacttcatggagattaagagtcatgtcttcttctccttaattaactgggatgatctcattaataagaagattactcccccttttaacccaaatgtgagtgggcccaacgacctacggcactttgaccccgagtttaccgaagagcctgtccccaactccattggcaagtcccctgacagcgtcctcgtcacagccagcgtcaaggaagctgccgaggctttcctaggcttttcctatgcgcctcccacggactctttcctctgaaccctgttagggcttggttttaaaggattttatgtgtgtttccgaatgttttagttagccttttggtggagccgccagctgacaggacatcttacaagagaatttgcacatctctggaagcttagcaatcttattgcacactgttcgctggaagctttttgaagagcacattctcctcagtgagctcatgaggttttcatttttattcttccttccaacgtggtgctatctctgaaacgagcgttagagtgccgccttagacggaggcaggagtttcgttagaaagcggacgctgttctaaaaaaggtctcctgcagatctgtctgggctgtgatgacgaatattatgaaatgtgccttttctgaagagattgtgttagctccaaagcttttcctatcgcagtgtttcagttctttattttcccttgtggatatgctgtgtgaaccgtcgtgtgagtgtggtatgcctgatcacagatggattttgttataagcatcaatgtgacacttgcaggacactacaacgtgggacattgtttgtttcttccatatttggaagataaatttatgtgtagacttttttgtaagatacggttaataactaaaatttattgaaatggtcttgcaatgactcgtattcagatgcttaaagaaagcattgctgctacaaatatttctatttttagaaagggtttttatggaccaatgccccagttgtcagtcagagccgttggtgtttttcattgtttaaaatgtcacctgtaaaatgggcattatttatgtttttttttttgcattcctgataattgtatgtattgtataaagaacgtctgtacattgggttataacactagtatatttaaacttacaggcttatttgtaatgtaaaccaccattttaatgtactgtaattaacatggttataatacgtacaatccttccctcatcccatcacacaactttttttgtgtgtgataaactgattttggtttgcaataaaaccttgaaaaatatttaca

SEQ ID NO: 55030 - DNA, 1266 bp, Artificial Sequence
  derived and/or modified sequence
atgaagcccagcaagagattcttcatcagcccccccagcagcaccgccttcatgaagcagagaagaatgggcctgaacgacttcatccagaagatcgccaacaacagctacgcctgcaagcaccccgaggtgcagagcatcctgaagatcagccagccccaggagcccgagctgatgaacgccaaccccagccccccccccagccccagccagcagatcaacctgggccccagcagcaacccccacgccaagcccagcgacttccacttcctgaaggtgatcggcaagggcagcttcggcaaggtgctgctggccagacacaaggccgaggaggtgttctacgccgtgaaggtgctgcagaagaaggccatcctgaagaagaaggaggagaagcacatcatgagcgagagaaacgtgctgctgaagaacgtgaagcaccccttcctggtgggcctgcacttcagcttccagaccgccgacaagctgtacttcgtgctggactacatcaacggcggcgagctgttctaccacctgcagagagagagatgcttcctggagcccagagccagattctacgccgccgagatcgccagcgccctgggctacctgcacagcctgaacatcgtgtacagagacctgaagcccgagaacatcctgctggacagccagggccacatcgtgctgaccgacttcggcctgtgcaaggagaacatcgagcacaacagcaccaccagcaccttctgcggcacccccgagtacctggcccccgaggtgctgcacaagcagccctacgacagaaccgtggactggtggtgcctgggcgccgtgctgtacgagatgctgtacggcctgccccccttctacagcagaaacaccgccgagatgtacgacaacatcctgaacaagcccctgcagctgaagcccaacatcaccaacagcgccagacacctgctggagggcctgctgcagaaggacagaaccaagagactgggcgccaaggacgacttcatggagatcaagagccacgtgttcttcagcctgatcaactgggacgacctgatcaacaagaagatcaccccccccttcaaccccaacgtgagcggccccaacgacctgagacacttcgaccccgagttcaccgaggagcccgtgcccaacagcatcggcaagagccccgacagcgtgctggtgaccgccagcgtgaaggaggccgccgaggccttcctgggcttcagctacgccccccccaccgacagcttcctgtag

SEQ ID NO: 55031 - DNA, 1338 bp, Artificial Sequence
  derived and/or modified sequence
atgggcgagatgcagggcgccctggccagagccagactggagagcctgctgagacccagacacaagaagagagccgaggcccagaagagaagcgagagcttcctgctgagcggcctggccttcatgaagcagagaagaatgggcctgaacgacttcatccagaagatcgccaacaacagctacgcctgcaagcaccccgaggtgcagagcatcctgaagatcagccagccccaggagcccgagctgatgaacgccaaccccagccccccccccagccccagccagcagatcaacctgggccccagcagcaacccccacgccaagcccagcgacttccacttcctgaaggtgatcggcaagggcagcttcggcaaggtgctgctggccagacacaaggccgaggaggtgttctacgccgtgaaggtgctgcagaagaaggccatcctgaagaagaaggaggagaagcacatcatgagcgagagaaacgtgctgctgaagaacgtgaagcaccccttcctggtgggcctgcacttcagcttccagaccgccgacaagctgtacttcgtgctggactacatcaacggcggcgagctgttctaccacctgcagagagagagatgcttcctggagcccagagccagattctacgccgccgagatcgccagcgccctgggctacctgcacagcctgaacatcgtgtacagagacctgaagcccgagaacatcctgctggacagccagggccacatcgtgctgaccgacttcggcctgtgcaaggagaacatcgagcacaacagcaccaccagcaccttctgcggcacccccgagtacctggcccccgaggtgctgcacaagcagccctacgacagaaccgtggactggtggtgcctgggcgccgtgctgtacgagatgctgtacggcctgccccccttctacagcagaaacaccgccgagatgtacgacaacatcctgaacaagcccctgcagctgaagcccaacatcaccaacagcgccagacacctgctggagggcctgctgcagaaggacagaaccaagagactgggcgccaaggacgacttcatggagatcaagagccacgtgttcttcagcctgatcaactgggacgacctgatcaacaagaagatcaccccccccttcaaccccaacgtgagcggccccaacgacctgagacacttcgaccccgagttcaccgaggagcccgtgcccaacagcatcggcaagagccccgacagcgtgctggtgaccgccagcgtgaaggaggccgccgaggccttcctgggcttcagctacgccccccccaccgacagcttcctgtag

SEQ ID NO: 55032 - protein, 282 aa, Artificial Sequence
  derived and/or modified sequence
MGPLPRTVELFYDVLSPYSWLGFEILCRYQNIWNINLQLRPSLITGIMKDSGNKPPGLLPRKGLYMANDLKLLRHHLQIPIHFPKDFLSVMLEKGSLSAMRFLTAVNLEHPEMLEKASRELWMRVWSRVSVGLWESSGRTLDDFLTFPRHVFRVMILPPPGGSTVLPVTPLSPHRLPAVFSSSQNEDITEPQSILAAAEKAGMSAEQAQGLLEKIATPKVKNQLKETTEAACRYGAFGLPITVAHVDGQTHMLFGSDRMELLAHLLGEKWMGPIPPAVNARL

SEQ ID NO: 55033 - DNA, 849 bp, Artificial Sequence
  derived and/or modified sequence
atgggccccctgcccagaaccgtggagctgttctacgacgtgctgagcccctacagctggctgggcttcgagatcctgtgcagataccagaacatctggaacatcaacctgcagctgagacccagcctgatcaccggcatcatgaaggacagcggcaacaagccccccggcctgctgcccagaaagggcctgtacatggccaacgacctgaagctgctgagacaccacctgcagatccccatccacttccccaaggacttcctgagcgtgatgctggagaagggcagcctgagcgccatgagattcctgaccgccgtgaacctggagcaccccgagatgctggagaaggccagcagagagctgtggatgagagtgtggagcagagtgagcgtgggcctgtgggagagcagcggcagaaccctggacgacttcctgaccttccccagacacgtgttcagagtgatgatcctgcccccccccggcggcagcaccgtgctgcccgtgacccccctgagcccccacagactgcccgccgtgttcagcagcagccagaacgaggacatcaccgagccccagagcatcctggccgccgccgagaaggccggcatgagcgccgagcaggcccagggcctgctggagaagatcgccacccccaaggtgaagaaccagctgaaggagaccaccgaggccgcctgcagatacggcgccttcggcctgcccatcaccgtggcccacgtggacggccagacccacatgctgttcggcagcgacagaatggagctgctggcccacctgctgggcgagaagtggatgggccccatcccccccgccgtgaacgccagactgtag

SEQ ID NO: 55034 - DNA, 849 bp, Artificial Sequence
  derived and/or modified sequence
atgggacctctcccccggaccgtggagctgttctacgacgtgctgagtccctacagctggctcggcttcgaaattctctgccgctaccagaatatatggaacatcaaccttcagctaaggcccagtctcattaccggcatcatgaaggacagcggaaataaaccccctggactactccctagaaagggtttgtatatggcaaacgacctaaaattgcttagacaccatttacagatacccattcacttccctaaggatttcctgtcggtgatgctagagaaggggtccttgtcagctatgaggttcctgaccgccgttaatctcgaacatcctgagatgctcgaaaaagcctccagagaattgtggatgcgagtttggtcgcgtgtgagcgtgggcctctgggagtcttcaggtaggaccctagatgattttctgacatttcccagacacgttttcagagtgatgattctgcccccacccgggggatcgaccgtgctgcctgtgacccccctttccccacaccggcttcctgctgtgttcagtagctcacaaaacgaggatatcaccgagccacagagcatattagccgctgctgagaaagccgggatgtcagccgagcaggcgcagggactgctggagaagattgctacccccaaggttaaaaaccagctcaaggaaacaaccgaggccgcttgccggtacggagctttcggactgccaattacagtggctcacgttgacggtcagacccatatgcttttcggctccgatcgtatggagttgctggctcatcttttgggggagaaatggatgggtcccattccgcccgcagttaatgctaggctgtag

SEQ ID NO: 55035 - DNA, 849 bp, Artificial Sequence
  derived and/or modified sequence
atgggccccctgcccaggacagtggagctgttctatgatgtgctgagcccctacagctggctgggctttgagatcctgtgccgctaccagaacatctggaacatcaacctgcagctgcggcccagcctcatcaccggcatcatgaaggacagcggcaacaagcccccaggcctgctgcccaggaagggcctgtacatggccaatgacctgaagctgctgcggcaccacctgcagatccccatccacttccccaaggacttcctgtctgtgatgctggagaagggcagcctgagcgccatgaggttcctgacagctgtgaacctggagcaccctgagatgctggagaaggccagccgggagctgtggatgagggtgtggagccgggtgtctgtgggcctgtgggagagcagcggccgcaccctggatgacttcctgaccttccccaggcatgtgttccgggtgatgatcctgcccccacctgggggcagcacagtgctgcctgtgacccccctgagcccccaccggctgcctgctgtgttcagcagcagccagaatgaagacatcacagagccccagagcatcctggccgctgctgagaaggccggcatgtctgctgagcaggcccagggcctgctggagaagatcgccacccccaaggtgaagaaccagctgaaggagaccacagaggccgcctgccgctacggggccttcggcctgcccatcaccgtggcccacgtggatggccagacccacatgctgtttggaagtgacaggatggagctgctggcccacctgctgggggagaagtggatgggccccatccccccagctgtgaatgcccggctgtag

SEQ ID NO: 55036 - DNA, 849 bp, Artificial Sequence
  derived and/or modified sequence
atgggccccctgccccggaccgtggagctgttctacgacgtgctgtccccatactcatggctcggttttgagatcctctgcaggtaccaaaacatctggaacattaacctgcagctccggccttctctcatcacagggataatgaaggactccggtaataagccgccaggtctccttccccgtaagggactttacatggccaatgacctcaagttgctgagacaccaccttcagatccccatccatttcccaaaagatttcttgtcggtgatgctggagaaggggagcctcagtgccatgcgattcctcacagccgtgaacctagagcatcccgagatgctggagaaggcttcaagagaactttggatgagagtttggtcacgtgtgagtgttggactttgggagagcagtggtcgcacactcgacgatttcctcactttcccccggcacgtgttcagggtgatgatacttcctccccctggcgggtccaccgtactccccgtgacccccctcagtccccatcgcctgcccgctgtgttcagctcctcccaaaacgaggatatcacagagccacagtcgatcctggctgccgcagagaaggcagggatgtcagcagagcaggcccagggactccttgaaaagatcgctacccccaaggttaaaaatcagctgaaagagacaacagaagcagcatgtcgctatggagcctttggcttgccaattaccgtggctcacgtggacggacaaacccatatgctgttcggtagcgaccggatggaacttttagctcatcttttgggagaaaaatggatgggcccaattccacctgcagtaaatgcccgactgtag

SEQ ID NO: 55037 - DNA, 849 bp, Artificial Sequence
  derived and/or modified sequence
atgggtcctctgccgcgaacggtcgagctgttctacgacgttttgagtccttattcatggctaggattcgaaatactttgtaggtatcaaaacatctggaacatcaacctgcagctaagaccaagtctgatcactgggattatgaaagatagcggcaacaagcctcccggactgctgccccgaaaaggcctttatatggctaacgacctgaagctgttaagacatcatctgcagatccctatccacttcccaaaagacttcctgtctgtgatgctcgaaaaagggtccctgtctgctatgcgcttcctcacagccgttaacctcgagcaccctgaaatgctcgaaaaagcttccagggagctctggatgagggtgtggtctcgcgtgagcgttggtctctgggaaagctctggacgcactctagatgatttcttaactttccccaggcacgttttcagagttatgatcctccctccgcctggtgggtcgactgtgctgcctgtgacaccactgagtccgcacaggcttccagccgtgttttcttcttcccagaacgaagacattactgaacctcagagtatcctcgccgctgcggagaaggctggcatgagtgcggaacaggctcagggcttattggagaagatcgcaacaccaaaggtcaaaaaccagctgaaagagaccactgaggctgcatgtaggtacggagccttcgggttacccattacggtggcccacgtggacggacagacccatatgctctttggtagtgacagaatggagctcctggctcatctactcggcgagaagtggatgggccctatcccgccagccgtcaatgcacggttatag

SEQ ID NO: 55038 - DNA, 1185 bp, Artificial Sequence
  derived and/or modified sequence
tctgccgggttccgggaaaaggagctcctgctgccactgctcttccggagcctgcagcatggggcccctgccgcgcaccgtggagctcttctatgacgtgctgtccccctactcctggctgggcttcgagatcctgtgccggtatcagaatatctggaacatcaacctgcagttgcggcccagcctcataacagggatcatgaaagacagtggaaacaagcctccaggtctgcttccccgcaaaggactatacatggcaaatgacttaaagctcctgagacaccatctccagattcccatccacttccccaaggatttcttgtctgtgatgcttgaaaaaggaagtttgtctgccatgcgtttcctcaccgccgtgaacttggagcatccagagatgctggagaaagcgtcccgggagctgtggatgcgcgtctggtcaagggtgagtgtggggctctgggaatcctctgggaggaccttggatgactttctgaccttccccaggcacgttttcagggtcatgatcctgcccccgcccgggggatctactgtcctcccagtcacacccctctccccgcaccgccttcctgctgtcttctcttcttcccagaatgaagacatcaccgagccgcagagcatcctggcggctgcagagaaggctggtatgtctgcagaacaagcccagggacttctggaaaagatcgcaacgccaaaggtgaagaaccagctcaaggagaccactgaggcagcctgcagatacggagcctttgggctgcccatcaccgtggcccatgtggatggccaaacccacatgttatttggctctgaccggatggagctgctggcgcacctgctgggagagaagtggatgggccctatacctccagccgtgaatgccagactttaagattgcccggaggaagcaaactcttcgtataaaaaaagcaggccatctgcttaacccttggctccaccataaggcactgggactcggatttctctatctgatagaggtattttctgtggccctgggagctgtctgtctttcccctacccccaaggatgccaggaagacgtccaccattagccatgtggcaacctttacttctatgcctcacaagtgcctttcagagagccccaattctgctttcccacaaaataaacctaatgccatcaggcaaaaca

SEQ ID NO: 55039 - protein, 214 aa, Artificial Sequence
  derived and/or modified sequence
MGPLPRTVELFYDVLSPYSWLGFEILCRYQNIWNINLQLRPSLITGIMKDSGNKPPGLLPRKGLYMANDLKLLRHHLQIPIHFPKDFLSVMLEKGSLSAMRFLTAVNLEHPEMLEKASRELWMRVWSRAAEKAGMSAEQAQGLLEKIATPKVKNQLKETTEAACRYGAFGLPITVAHVDGQTHMLFGSDRMELLAHLLGEKWMGPIPPAVNARL

SEQ ID NO: 55040 - DNA, 645 bp, Artificial Sequence
  derived and/or modified sequence
atgggccccctgcccagaaccgtggagctgttctacgacgtgctgagcccctacagctggctgggcttcgagatcctgtgcagataccagaacatctggaacatcaacctgcagctgagacccagcctgatcaccggcatcatgaaggacagcggcaacaagccccccggcctgctgcccagaaagggcctgtacatggccaacgacctgaagctgctgagacaccacctgcagatccccatccacttccccaaggacttcctgagcgtgatgctggagaagggcagcctgagcgccatgagattcctgaccgccgtgaacctggagcaccccgagatgctggagaaggccagcagagagctgtggatgagagtgtggagcagagccgccgagaaggccggcatgagcgccgagcaggcccagggcctgctggagaagatcgccacccccaaggtgaagaaccagctgaaggagaccaccgaggccgcctgcagatacggcgccttcggcctgcccatcaccgtggcccacgtggacggccagacccacatgctgttcggcagcgacagaatggagctgctggcccacctgctgggcgagaagtggatgggccccatcccccccgccgtgaacgccagactgtag

SEQ ID NO: 55041 - DNA, 645 bp, Artificial Sequence
  derived and/or modified sequence
atgggaccacttcccaggacggtggagctcttttatgacgtcctgagcccttactcatggctgggattcgagatcctgtgccgttatcaaaacatctggaatattaatctccagctccgaccgtcactgatcactgggattatgaaggattccggcaataaaccaccagggctgttaccgcgcaaaggcctctacatggcaaatgaccttaagctgctccgccaccacctgcaaatccctatccatttcccaaaggattttttgtccgtcatgttggaaaaaggatcacttagtgccatgcgatttctaactgcagtgaacctcgaacatcccgagatgctggagaaagctagtcgtgagctgtggatgcgcgtttggagccgggccgccgaaaaggctggcatgagcgcggaacaggcacagggactactcgaaaagattgctacccccaaggtgaagaaccagctgaaagagacaacagaggccgcttgtagatatggggcctttggacttcccatcacggtcgcacatgtggacggacaaacacacatgcttttcggctccgatagaatggaactgctggcccacctcctgggggaaaagtggatgggtcctatccctccagcagttaacgcacgtctttag

SEQ ID NO: 55042 - DNA, 645 bp, Artificial Sequence
  derived and/or modified sequence
atgggccccctgcccaggacagtggagctgttctatgatgtgctgagcccctacagctggctgggctttgagatcctgtgccgctaccagaacatctggaacatcaacctgcagctgcggcccagcctcatcaccggcatcatgaaggacagcggcaacaagcccccaggcctgctgcccaggaagggcctgtacatggccaatgacctgaagctgctgcggcaccacctgcagatccccatccacttccccaaggacttcctgtctgtgatgctggagaagggcagcctgagcgccatgaggttcctgacagctgtgaacctggagcaccctgagatgctggagaaggccagccgggagctgtggatgagggtgtggagcagagctgctgagaaggccggcatgtctgctgagcaggcccagggcctgctggagaagatcgccacccccaaggtgaagaaccagctgaaggagaccacagaggccgcctgccgctacggggccttcggcctgcccatcaccgtggcccacgtggatggccagacccacatgctgtttggaagtgacaggatggagctgctggcccacctgctgggggagaagtggatgggccccatccccccagctgtgaatgcccggctgtag

SEQ ID NO: 55043 - DNA, 645 bp, Artificial Sequence
  derived and/or modified sequence
atgggccccctgccccggaccgtggagctgttctacgacgtgctgtcgccgtattcgtggctcggcttcgaaatcctgtgccgttatcagaacatctggaatattaacctccagcttagaccaagcctgattactggtataatgaaagactctgggaataagccaccaggcctgctcccacgcaagggactgtacatggcaaatgacctaaagcttctccgccatcatctccaaatacccattcattttccgaaggatttcctttcagtgatgctggagaaaggctccttgtcagctatgcgctttctgactgccgtgaacctggagcaccccgaaatgctggaaaaggcctctagagaactgtggatgagggtgtggtcaagggctgccgagaaagctgggatgtcagcagaacaggcgcagggattgttggagaaaatcgctacaccaaaggtgaaaaaccagttgaaggagaccacagaggccgcctgtaggtacggcgcttttgggcttccaataacagttgctcacgttgatggtcagactcatatgctgttcggctcagatcgcatggaactattggcacatctattgggcgaaaaatggatgggtcctatccctcctgccgtgaacgccaggctttag

SEQ ID NO: 55044 - DNA, 888 bp, Artificial Sequence
  derived and/or modified sequence
ccaggcaggcccagaagctgggcagcctctgccgggttccgggaaaaggagctcctgctgccactgctcttccggagcctgcagcatggggcccctgccgcgcaccgtggagctcttctatgacgtgctgtccccctactcctggctgggcttcgagatcctgtgccggtatcagaatatctggaacatcaacctgcagttgcggcccagcctcataacagggatcatgaaagacagtggaaacaagcctccaggtctgcttccccgcaaaggactatacatggcaaatgacttaaagctcctgagacaccatctccagattcccatccacttccccaaggatttcttgtctgtgatgcttgaaaaaggaagtttgtctgccatgcgtttcctcaccgccgtgaacttggagcatccagagatgctggagaaagcgtcccgggagctgtggatgcgcgtctggtcaagggctgcagagaaggctggtatgtctgcagaacaagcccagggacttctggaaaagatcgcaacgccaaaggtgaagaaccagctcaaggagaccactgaggcagcctgcagatacggagcctttgggctgcccatcaccgtggcccatgtggatggccaaacccacatgttatttggctctgaccggatggagctgctggcgcacctgctgggagagaagtggatgggccctatacctccagccgtgaatgccagactttaagattgcccggaggaagcaaactcttcgtataaaaaaagcaggccatctgcttaacccttggctccaccataaggcactgggactcggatttctctatctgatagaggtattttctgtggccctgggagctgtctgtctttcccctacccccaaggatg

SEQ ID NO: 55045 - DNA, 645 bp, Artificial Sequence
  derived and/or modified sequence
atgggacccttgccaaggactgtcgaactattctatgacgtcctttccccatactcttggttgggattcgagattctgtgccggtaccaaaatatttggaacataaacctgcaactgcggccttccctgatcacgggcatcatgaaagattcagggaataagccccctgggctgctgcctagaaagggactgtacatggcaaacgatctcaagctcctgcgccaccacctccagatccctattcatttccccaaggacttcctgtccgtgatgttggagaaggggtcactgagcgctatgcgatttctgactgctgtaaatctggagcacccagaaatgctggaaaaggctagtcgagaactgtggatgagggtgtggtcccgggcagcagaaaaagcagggatgtctgcagagcaggcgcagggattgctggagaaaatagcgacgcctaaggtgaagaaccagctgaaagagaccactgaggcggcatgccgatacggtgcatttggcctcccaattactgtcgcgcacgttgacgggcagacgcacatgctgttcggaagtgacaggatggagcttctagcacacctcctcggggagaaatggatgggcccaattcctcccgctgtgaatgccaggctttag

SEQ ID NO: 55046 - protein, 183 aa, Artificial Sequence
  derived and/or modified sequence
MGPLPRTVELFYDVLSPYSWLGFEILCRYQNIWNINLQLRPSLITGIMKDSGSLSAMRFLTAVNLEHPEMLEKASRELWMRVWSRNEDITEPQSILAAAEKAGMSAEQAQGLLEKIATPKVKNQLKETTEAACRYGAFGLPITVAHVDGQTHMLFGSDRMELLAHLLGEKWMGPIPPAVNARL

SEQ ID NO: 55047 - DNA, 552 bp, Artificial Sequence
  derived and/or modified sequence
atgggccccctgcccagaaccgtggagctgttctacgacgtgctgagcccctacagctggctgggcttcgagatcctgtgcagataccagaacatctggaacatcaacctgcagctgagacccagcctgatcaccggcatcatgaaggacagcggcagcctgagcgccatgagattcctgaccgccgtgaacctggagcaccccgagatgctggagaaggccagcagagagctgtggatgagagtgtggagcagaaacgaggacatcaccgagccccagagcatcctggccgccgccgagaaggccggcatgagcgccgagcaggcccagggcctgctggagaagatcgccacccccaaggtgaagaaccagctgaaggagaccaccgaggccgcctgcagatacggcgccttcggcctgcccatcaccgtggcccacgtggacggccagacccacatgctgttcggcagcgacagaatggagctgctggcccacctgctgggcgagaagtggatgggccccatcccccccgccgtgaacgccagactgtag

SEQ ID NO: 55048 - DNA, 552 bp, Artificial Sequence
  derived and/or modified sequence
atgggccctctgcctagaacagtggaactgttctatgacgtgctgtccccatacagctggctgggctttgaaatattgtgtcggtaccagaacatctggaacataaatctccagctacgccctagtctcatcaccggcatcatgaaggattcagggagtctgtcagccatgagatttctgaccgctgtcaacctcgagcatccagagatgctggagaaggcaagccgtgagttatggatgagggtctggtctcgcaatgaggatattactgaaccccagtccattctcgccgccgctgaaaaagctgggatgtccgccgaacaggcccagggcctgttggaaaaaatagccacaccaaaggttaagaaccagttgaaagagacaacagaagccgcctgtcggtacggtgcttttggcctaccaatcacagtggctcacgtggacgggcagactcatatgctgtttgggagcgatcgaatggagctgctcgcacacttgctaggggaaaaatggatggggccaatccccccagcggtcaacgctaggctctag

SEQ ID NO: 55049 - DNA, 552 bp, Artificial Sequence
  derived and/or modified sequence
atgggccccctgcccaggacagtggagctgttctatgatgtgctgagcccctacagctggctgggctttgagatcctgtgccgctaccagaacatctggaacatcaacctgcagctgcggcccagcctcatcaccggcatcatgaaggacagcggcagcctgagcgccatgaggttcctgacagctgtgaacctggagcaccctgagatgctggagaaggccagccgggagctgtggatgagggtgtggagcagaaatgaagacatcacagagccccagagcatcctggccgctgctgagaaggccggcatgtctgctgagcaggcccagggcctgctggagaagatcgccacccccaaggtgaagaaccagctgaaggagaccacagaagctgcctgccgctatggagccttcggcctgcccatcaccgtggcccacgtggatggccagacccacatgctgtttggaagtgacaggatggagctgctggcccacctgctgggggagaagtggatgggccccatccccccagctgtgaatgcccggctgtag

SEQ ID NO: 55050 - DNA, 552 bp, Artificial Sequence
  derived and/or modified sequence
atgggccccctgccccggaccgtggagctgttctacgacgtgctgagcccatattcatggcttgggtttgaaattttgtgcagataccagaacatttggaacatcaatctgcagttgcggccttctcttattaccgggatcatgaaggatagtgggtcgctgtcagctatgaggtttctgactgccgtcaatctcgagcacccagagatgctggagaaggctagcagggagctctggatgcgggtatggtctaggaatgaggacatcactgaaccccagagtatccttgctgccgcagaaaaagccggaatgagcgcagagcaggcccagggtctgctggagaagatcgctacccccaaagtgaagaaccagcttaaggagaccacagaggcagcctgtcgatatggcgcatttggccttcccattacagtggcccacgtggatggacagacacacatgttgtttgggtcagatagaatggaactactggctcacttgctaggagaaaagtggatgggaccaatcccacccgctgttaacgcaaggttgtag

SEQ ID NO: 55051 - DNA, 552 bp, Artificial Sequence
  derived and/or modified sequence
atggggccactgcctagaaccgtagaattattttacgacgtgctatctccctattcctggctcggattcgagatcctctgcaggtatcagaatatctggaatatcaacctgcaactcaggccaagccttatcaccgggatcatgaaagactctggctcattatctgcgatgaggttcctcacggccgtaaacctggaacacccagagatgctggagaaggcgagccgtgagctgtggatgcgggtctggtcaagaaacgaggacataacagagcctcagagcatcctggccgctgctgagaaagctggcatgagtgcggaacaagcccagggcttgctcgaaaaaattgccacacccaaggtgaagaaccagttaaaggagacaacggaagcagcctgtcgatatggagccttcgggcttcctatcactgtggcacacgtggatggtcagacccacatgctctttgggagcgacagaatggaactgctagctcaccttttgggggagaaatggatggggccaatacccccagccgtgaacgccaggctatag

SEQ ID NO: 55052 - DNA, 850 bp, Artificial Sequence
  derived and/or modified sequence
agaagctgggcagcctctgccgggttccgggaaaaggagctcctgctgccactgctcttccggagcctgcagcatggggcccctgccgcgcaccgtggagctcttctatgacgtgctgtccccctactcctggctgggcttcgagatcctgtgccggtatcagaatatctggaacatcaacctgcagttgcggcccagcctcataacagggatcatgaaagacagtggaagtttgtctgccatgcgtttcctcaccgccgtgaacttggagcatccagagatgctggagaaagcgtcccgggagctgtggatgcgcgtctggtcaaggaatgaagacatcaccgagccgcagagcatcctggcggctgcagagaaggctggtatgtctgcagaacaagcccagggacttctggaaaagatcgcaacgccaaaggtgaagaaccagctcaaggagaccactgaggcagcctgcagatacggagcctttgggctgcccatcaccgtggcccatgtggatggccaaacccacatgttatttggctctgaccggatggagctgctggcgcacctgctgggagagaagtggatgggccctatacctccagccgtgaatgccagactttaagattgcccggaggaagcaaactcttcgtataaaaaaagcaggccatctgcttaacccttggctccaccataaggcactgggactcggatttctctatctgatagaggtattttctgtggccctgggagctgtctgtctttcccctacccccaaggatgccaggaagacgtccaccattagccatgtggcaacctttacttctatgcctcacaagtgcctttcaga

SEQ ID NO: 55053 - protein, 606 aa, Artificial Sequence
  derived and/or modified sequence
MEESPLSRAPSRGGVNFLNVARTYIPNTKVECHYTLPPGTMPSASDWIGIFKVEAACVRDYHTFVWSSVPESTTDGSPIHTSVQFQEPRPMDELVTLEEADGGSDILLVVPKATVLQNQLDESQQERNDLMQLKLQLEGQVTELRSRVQELERALATARQEHTELMEQYKGISRSHGEITEERDILSRQQGDHVARILELEDDIQTISEKVLTKEVELDRLRDTVKALTREQEKLLGQLKEVQADKEQSEAELEPLKEQLRGAQELAASSQQKATLLGEELASAAAARDRTIAELHRSRLEVAEVNGRLAELGLHLKEEKCQWSKERAGLLQSVEAEKDKILKLSAEILRLEKAVQEERTQNQVFKTELAREKDSSLVQLSESKRELTELRSALRVLQKEKEQLQEEKQELLEYMRKLEARLEKVADEKWNEDATTEDEEAAVGLSCPAALTDSEDESPEDMRLPPYGLCERGDPGSSPAGPREASPLVVISQPAPISPHLSGPAEDSSSDSEAEDEKSVLMAAVQSGGEEANLLLPELGSAFYDMASGFTVGTLSETSTGGPATPTWKECPICKERFPAESDKDALEDHMDGHFFFSTQDPFTFE

SEQ ID NO: 55054 - DNA, 1821 bp, Artificial Sequence
  derived and/or modified sequence
atggaggagagccccctgagcagagcccccagcagaggcggcgtgaacttcctgaacgtggccagaacctacatccccaacaccaaggtggagtgccactacaccctgccccccggcaccatgcccagcgccagcgactggatcggcatcttcaaggtggaggccgcctgcgtgagagactaccacaccttcgtgtggagcagcgtgcccgagagcaccaccgacggcagccccatccacaccagcgtgcagttccaggagcccagacccatggacgagctggtgaccctggaggaggccgacggcggcagcgacatcctgctggtggtgcccaaggccaccgtgctgcagaaccagctggacgagagccagcaggagagaaacgacctgatgcagctgaagctgcagctggagggccaggtgaccgagctgagaagcagagtgcaggagctggagagagccctggccaccgccagacaggagcacaccgagctgatggagcagtacaagggcatcagcagaagccacggcgagatcaccgaggagagagacatcctgagcagacagcagggcgaccacgtggccagaatcctggagctggaggacgacatccagaccatcagcgagaaggtgctgaccaaggaggtggagctggacagactgagagacaccgtgaaggccctgaccagagagcaggagaagctgctgggccagctgaaggaggtgcaggccgacaaggagcagagcgaggccgagctggagcccctgaaggagcagctgagaggcgcccaggagctggccgccagcagccagcagaaggccaccctgctgggcgaggagctggccagcgccgccgccgccagagacagaaccatcgccgagctgcacagaagcagactggaggtggccgaggtgaacggcagactggccgagctgggcctgcacctgaaggaggagaagtgccagtggagcaaggagagagccggcctgctgcagagcgtggaggccgagaaggacaagatcctgaagctgagcgccgagatcctgagactggagaaggccgtgcaggaggagagaacccagaaccaggtgttcaagaccgagctggccagagagaaggacagcagcctggtgcagctgagcgagagcaagagagagctgaccgagctgagaagcgccctgagagtgctgcagaaggagaaggagcagctgcaggaggagaagcaggagctgctggagtacatgagaaagctggaggccagactggagaaggtggccgacgagaagtggaacgaggacgccaccaccgaggacgaggaggccgccgtgggcctgagctgccccgccgccctgaccgacagcgaggacgagagccccgaggacatgagactgcccccctacggcctgtgcgagagaggcgaccccggcagcagccccgccggccccagagaggccagccccctggtggtgatcagccagcccgcccccatcagcccccacctgagcggccccgccgaggacagcagcagcgacagcgaggccgaggacgagaagagcgtgctgatggccgccgtgcagagcggcggcgaggaggccaacctgctgctgcccgagctgggcagcgccttctacgacatggccagcggcttcaccgtgggcaccctgagcgagaccagcaccggcggccccgccacccccacctggaaggagtgccccatctgcaaggagagattccccgccgagagcgacaaggacgccctggaggaccacatggacggccacttcttcttcagcacccaggaccccttcaccttcgagtag

SEQ ID NO: 55055 - DNA, 1821 bp, Artificial Sequence
  derived and/or modified sequence
atggaagagtcgcccctttcacgggccccttcacgcgggggcgtgaactttttgaatgttgcgcggacatacattcccaacacgaaagtcgaatgccactatactttgccccctgggacaatgccctccgctagtgattggatcggaatattcaaagtggaggccgcttgtgtgagagactatcatacgttcgtctggtcgtccgtgcccgagtctacaacggacgggtctccaatccacacaagcgtgcagttccaggagccacgccctatggacgagctcgtcacactggaggaggctgatggaggaagcgacatattgctcgtggtgcccaaagccacagtgctgcagaaccagctagatgagtctcagcaagaacgcaatgatctcatgcagctaaaactgcagctcgagggacaggttacggagctcagatctcgcgtgcaggagctcgagcgcgctttggctaccgcaaggcaggaacataccgagctgatggaacaatataaagggattagcaggtctcatggggaaatcaccgaagagcgtgacatcctcagccgacagcaaggagatcacgttgcaaggattttagaactggaggatgatatccagaccattagtgaaaaagtcctcacgaaagaggtggagttggatcgtctgcgtgatacagtcaaagctctcacccgagagcaagaaaagctgctaggtcagcttaaagaggttcaggcggataaggagcaatctgaggccgaactggaaccactaaaagaacaacttaggggggctcaagagttggctgccagttcacaacagaaagccacactactgggcgaggagctggcaagcgcggccgcagccagagacagaaccatcgctgagttacatcggagcaggctcgaagtggcagaggtgaacggccgcttggcagagttggggctccatctgaaggaagagaaatgtcagtggtctaaggagagagcaggcctgctccagagcgtagaggcagagaaagataagatccttaagctgagcgcagaaattttaaggcttgaaaaggctgtgcaggaggagagaactcaaaatcaggtgttcaaaaccgagctggcccgtgagaaggattcctccctggtgcaactgtctgagtctaagcgggagttgactgaacttcgctccgcactgcgggtccttcaaaaagaaaaagaacagctccaagaagaaaagcaggaactccttgaatatatgcggaaactcgaagccagactggagaaggtcgcagacgagaaatggaatgaggacgctacaactgaggacgaggaggctgccgtgggcctaagttgtccagccgctttgacagatagcgaggacgagtctcccgaggacatgaggcttccaccatacggactgtgtgagcggggagacccagggagttcccccgccggtccacgggaggccagtcctctcgtcgtgatttctcagccagcccccatctcaccccatctgtctggcccagccgaagactcctcatcagactctgaggcggaggacgagaagagtgtcctcatggccgctgtgcaaagcggaggtgaggaggcgaatttgctgttgccagaactgggaagtgcgttctatgatatggcctctggtttcaccgtaggcaccctgagcgagactagtactggcggcccagcgacccccacctggaaggaatgtcccatttgtaaagagcgcttccctgccgagtcagataaggacgccctagaggatcacatggatggacactttttcttttctacccaggacccgtttactttcgagtag

SEQ ID NO: 55056 - DNA, 1821 bp, Artificial Sequence
  derived and/or modified sequence
atggaggagagccccctgagccgggcccccagcagaggaggagtgaacttcctgaatgtggcccggacctacatccccaacaccaaggtggagtgccactacaccctgcccccaggcaccatgcccagcgccagtgactggattggcatcttcaaggtggaggccgcctgtgtgcgggactaccacacctttgtgtggagctctgtgcctgagagcaccacagatggcagccccatccacacctctgtgcagttccaggagccccggcccatggatgagctggtgaccctggaggaggctgatggcggcagtgacatcctgctggtggtgcccaaggccaccgtgctgcagaaccagctggatgagagccagcaggagagaaatgacctgatgcagctgaagctgcagctggagggccaggtgacagagctgcggagccgggtgcaggagctggagcgggccctggccacagcccggcaggagcacacagagctgatggagcagtacaagggcatcagccgcagccacggggagatcacagaggagcgggacatcctgagccggcagcagggcgaccacgtggcccgcatcctggagctggaggatgacatccagaccatcagcgagaaggtgctgaccaaggaggtggagctggaccggctgcgggacacagtgaaggccctgacccgggagcaggagaagctgctgggccagctgaaggaggtgcaggccgacaaggagcagagcgaggccgagctggagcccctgaaggagcagctgcggggggcccaggagctggccgccagcagccagcagaaggccaccctgctgggggaggagctggccagcgctgctgctgcccgggacaggaccatcgccgagctgcacaggagccggctggaggtggccgaggtgaatggccgcctggccgagctgggcctgcacctgaaggaggagaagtgccagtggagcaaggagcgggccggcctgctgcagagcgtggaggccgagaaggacaagatcctgaagctgtctgctgagatcctgcggctggagaaggctgtgcaggaggagaggacccagaaccaggtgttcaagacagagctggcccgggagaaggacagcagcctggtgcagctgtctgagagcaagcgggagctgacagagctgcggagcgccctgcgggtgctgcagaaggagaaggagcagctgcaggaggagaagcaggagctgctggagtacatgaggaagctggaggcccggctggagaaggtggctgatgagaagtggaatgaagatgccaccacagaagatgaggaggccgctgtgggcctgagctgcccagctgccctgacagacagtgaagatgagagccctgaggacatgaggctgcccccctacggcctgtgtgagcggggggaccccggcagcagccctgctggcccccgggaggccagccccctggtggtgatcagccagcctgcccccatcagcccccacctgagcggccctgctgaggacagcagcagtgacagcgaggctgaagatgagaagtctgtgctgatggctgctgtgcagagcggcggggaggaggccaacctgctgctgcctgagctgggcagcgccttctatgacatggccagcggcttcaccgtgggcaccctgtctgagaccagcactggaggccctgccacccccacctggaaggagtgccccatctgcaaggagcgcttccctgctgagagtgacaaggatgccctggaggaccacatggatggccacttcttcttcagcacccaggaccccttcacctttgaatag

SEQ ID NO: 55057 - DNA, 1821 bp, Artificial Sequence
  derived and/or modified sequence
atggaggagagccccctgagccgggcccccagccggggcggcgtgaatttcctgaacgtggcgcggacatatatacctaatacaaaagtggagtgtcattatacactgcctcccggtaccatgccctcagcttcggattggattggaatcttcaaagtggaagcagcttgcgttcgagattatcacacctttgtttggtctagtgtccctgagtctactaccgatggcagtcccattcacaccagcgtccagtttcaagaacctcgccccatggatgaactggtcactctggaagaggctgacggcggctccgatattctgctggtagtgcctaaagccactgtactgcagaatcagctagacgagtcgcagcaggaacgtaacgacttaatgcaactgaagctgcagctggaaggccaggtgactgaactgagatcccgagttcaagagttggaacgagcattggctactgctagacaggaacatacagagctgatggagcagtacaagggaattagtcggagccacggcgagatcacagaggagagggacattctgtctcgccagcagggagatcatgtcgcaaggatattagaactggaagacgacatccagaccattagtgagaaagtactcacaaaggaggtcgagcttgacaggctaagggacactgtcaaggccctcactcgagagcaggagaagctgcttgggcagctaaaggaagtgcaagccgacaaggagcagagcgaggctgagctggagcccctcaaggaacagctgcgtggcgcacaggagttggccgcatcttcccagcagaaggctacgttgctaggtgaagagctggccagtgctgctgccgctcgagacaggactatcgccgagctgcaccggtcccgcctggaggtggcagaggttaacgggagactggccgagctcgggctgcaccttaaggaggaaaagtgtcagtggagtaaggaacgagcgggcctgctgcagtcagtggaagctgagaaagacaaaatcctcaagctttctgcagagattttacgcctggaaaaggccgtgcaagaggagagaacccagaaccaggtattcaaaactgagttggcccgcgagaaggacagtagcctggtccaactgtcggagtcaaagcgggaattaacggagctgagaagtgctctccgggtgctgcagaaagaaaaggagcaactccaagaggaaaaacaagaacttttggaatacatgcgcaagttggaggctcgcctggagaaagtggctgacgaaaaatggaacgaagacgcgactaccgaggacgaagaggctgctgttgggcttagctgtccagccgcactcaccgattcagaagacgagagcccagaagacatgcgtttgccaccgtatgggctgtgcgagcgcggggaccctggaagtagccccgcagggcccagggaggcatcccccctggtcgtgatcagccaacccgccccaatcagtccccacttatccggccccgccgaagactcgtcctcagactccgaagctgaagatgagaaatctgtattaatggcggctgtacagagcgggggcgaggaggcaaatctactcctgcctgagctggggtctgcattctacgacatggcatccggctttacggtcggaacgctgtccgagacatcaacagggggacccgcgactccaacctggaaagaatgtccaatctgtaaggagaggtttccagccgaatctgataaggacgccctcgaagaccatatggatgggcacttcttctttagtactcaggacccgtttacctttgagtag

SEQ ID NO: 55058 - DNA, 1821 bp, Artificial Sequence
  derived and/or modified sequence
atggaagaatctccgttgtctcgggctccaagccggggtggagtgaacttcctcaatgtggctcgaacttatatcccaaatacaaaagttgagtgtcactatacccttccaccaggtactatgccatcagcttctgattggattggcatatttaaggttgaagcagcctgtgtgagagattaccatacatttgtgtggagctcagttccagagtcaactactgatggcagtccaatccacacaagtgtgcaattccaagagcctcggcctatggatgagttagtgacactggaagaagccgatggaggctccgatatactgttggtggtccccaaggccaccgtcctgcagaaccagctggacgagagccaacaggaaaggaacgatctaatgcaactgaagctccagctggagggacaggttactgaactgcggtctcgcgttcaagagctggaaagggccctggcgacggctcgtcaggaacacaccgaactgatggagcaatataaaggcatcagccggtctcacggagaaattaccgaggagcgcgatattctatcgcgccaacaaggtgaccacgttgcccgaattcttgaactagaagacgatatccagaccatctcagaaaaggtccttacaaaggaagttgagctggatcgtcttcgcgatacggtgaaggctctgaccagagagcaggagaagttgctcggccagctgaaggaggttcaggcggataaggagcagagtgaagcggagctcgagcctctgaaggagcagctgaggggggcacaggaactcgccgcatctagccagcagaaggccacattactgggagaggagctggccagcgctgcagccgctcgggatcgtaccattgctgagttgcacaggtctagactggaagtggctgaggtaaacggcaggctggccgaattggggcttcaccttaaggaggaaaaatgccagtggtcaaaggaacgagccggtctattgcaatctgttgaagctgagaaggacaagatcctcaaattgagcgcagagattctcaggctggaaaaggcagtccaggaagagaggactcaaaaccaagtatttaagacggaactggccagggagaaagatagttctctggtccagctgtctgagagtaagagagagctgacagaactgagatccgccctgcgggtcttgcaaaaggaaaaggaacaattgcaagaggaaaagcaggagctattagagtacatgagaaagctcgaagcccgactagaaaaagttgcggacgagaagtggaacgaagacgctaccactgaagacgaggaggctgcagtgggcttgagctgcccagccgctctgacagactcagaggacgagtcacctgaagacatgaggctacccccatatgggctctgcgagcgcggtgatccaggctcttcacctgctggaccgagagaggcttccccgttagtggtgatctcccagcctgctcccattagtccgcacctgtcaggcccagctgaggactcgagctcggactccgaagctgaagacgaaaaaagcgtactaatggccgctgtgcagtcggggggagaggaagccaacctgcttttgccagagcttgggtcggccttctacgacatggcgtctgggttcaccgtaggtactcttagcgagacttcaactggtggcccagcaacgccgacctggaaggagtgccccatttgcaaagaacgctttccagccgaaagtgataaggacgctttggaggaccacatggatgggcactttttctttagtacgcaggacccttttacattcgagtag

SEQ ID NO: 55059 - DNA, 2706 bp, Artificial Sequence
  derived and/or modified sequence
gtgaaaggtgaggggaacagctgatccgtctgttgggaggacagatatctcaaggccaggatggaagaatcaccactaagccgggcaccatcccgtggtggagtcaactttctcaatgtagcccggacctacatccccaacaccaaggtggaatgtcactacacccttcccccaggcaccatgcccagtgccagtgactggattggcatcttcaaggtggaggctgcctgtgttcgggattaccacacatttgtgtggtcttccgtgcctgaaagtacaactgatggttcccccattcacaccagtgtccagttccaagagccaaggcccatggatgaactggtgaccctggaggaggctgatgggggctctgacatcctgctggttgtccccaaggcaactgtgttacagaaccagctcgatgagagccagcaagaacggaatgacctgatgcagctgaagctacagctggagggacaggtgacagagctgaggagccgagtgcaggagctcgagagggctctggcaactgccaggcaggagcacacggagctgatggaacagtacaaggggatttcccggtcccatggggagatcacagaagagagggacatcctgagccggcaacagggagaccatgtggcacgcatcctggagctagaggatgacatccagaccatcagtgagaaagtgctgacgaaggaagtggagctggacaggcttagagacacagtgaaggccctgactcgggaacaagagaagctccttgggcaactgaaagaagtacaagcagacaaggagcaaagtgaggccgagctggagcccttgaaggagcagcttcgaggggcccaggagcttgcagcctcaagccagcagaaagccacccttcttggggaggagttggccagtgcagcagcagccagggaccgcaccatagccgaactacaccgcagccgcctggaagtggctgaagttaacggcaggctggctgagctcggtttgcacttgaaggaagaaaaatgccaatggagcaaggagcgggcagggctgctgcagagtgtggaggcagagaaggacaagatcctgaagctgagtgcagagatacttcgattggagaaggcagttcaggaggagaggacccaaaaccaagtgttcaagactgagctggcccgggagaaggattctagcctggtacagttgtcagaaagtaagcgggagctgacagagctgcggtcagccctgcgtgtgctccagaaggaaaaggagcagttacaggaggagaaacaggaattgctagagtacatgagaaagctagaggcccgcctggagaaggtggcagatgagaagtggaatgaggatgccaccacagaggatgaggaggccgctgtggggctgagctgcccggcagctctgacagactcagaggacgagtccccagaagacatgaggctcccaccctatggcctttgtgagcgtggagacccaggctcctctcctgctgggcctcgagaggcttctccccttgttgtcatcagccagccggctcccatttctcctcacctctctgggccagctgaggacagtagctctgactcggaggctgaagatgagaagtcagtcctgatggcagctgtgcagagtgggggtgaggaggccaacttactgcttcctgaactgggcagtgccttctatgacatggccagtggctttacagtgggtaccctgtcagaaaccagcactgggggccctgccacccccacatggaaggagtgtcctatctgtaaggagcgctttcctgctgagagtgacaaggatgccctggaggaccacatggatggacacttctttttcagcacccaggaccccttcacctttgagtgatcttactccctcgtacatgcacaaatacacactcatgcacacacacactcacacacatgcatacacttaggtttcatgcccattttctatcacactgggctccatgatattctgttccctaagaactgcttctgtgtgccctgttttcatcccaagatttctcacttcatcctctcctacctggctcttttgtcccagggaggggtcctgttcggaagcagtggctgaatttatcccctgaaagtggttttggaggaaccgggatggaggaggccttcccctgtgggaatagaatcgtccactcctagccctggttgcttctgatacacagccactgcacacacacactcacactcacactcccttgtctgatgccccaaagccaattcctggggcaccctaccctctcttatttggagtttccgttggtttacctgagttttctctggggtctgcacagaggcagcagcatggacatcatggcctctcaggtcccttttggttctcagtttcattggttcctctttctgttcccccattgacttctgtgccccaccctagccttttccataaccttaggtattcagtttggaggggttttttgtatttttgaggattcctgtattctgtatcctctcctcgcatctcctcacatggaaagaaataatgtatttgtgccttctgtgaggaatggggggaacaagtggtcccaggtatccccatttccaaggcccccctccctctccaggtccccccacagcaataaaagcttccccctgatatccatccctttgtagtttgaacaaatatatttatatgatatgt

SEQ ID NO: 55060 - protein, 681 aa, Artificial Sequence
  derived and/or modified sequence
MDIKHHQNGTRGQRRKQPHTTVQRLLTWGLPVSCSWFLWRQPGEFPVTALLLGAGAGGLLAIGLGAMGWGTSPHIRCASLLLVPKMLGKEGRLFVLGYALAAIYVGPVANLRHNLNNVIASLGCTVELQINNTRAAWRISTAPLRAMFKDLLSSKELLRAETRNISATFEDLDAQVNSETGYTPEDTMDSGETAQGREARQAPASRLHLSTQKMYELKTKLRCSYVVNQAILSCRRWFDRKHEQCMKHIWVPLLTHLLCLPMKFKFFCGIAKVMEVWCRNRIPVEGNFGQTYDSLNQSIRGLDGEFSANIDFKEEKQAGVLGLNTSWERVSTEVRDYVYRQEARLEWALGLLHVLLSCTFLLVLHASFSYMDSYNHDIRFDNIYISTYFCQIDDRRKKLGKRTLLPLRKAEEKTVIFPCKPTIQASEMSNVVRELLETLPILLLLVVLCGLDWALYSIFDTIRHHSFLQYSFRSSHKLEVKVGGDSMLARLLRKTIGALNTSSETVMESNNMPCLPQPVGLDARAYWRAAVPIGLLVCLCLLQAFGYRLRRVIAAFYFPKREKKRILFLYNDLLKKRAAFTKLRRAAILRRERQQKAPRHPLADILHRGCPLLRRWLCRRCVVCQAPETPESYVCRTLDCEAVYCWSCWDDMRQRCPVCTPREELSSSAFSDSNDDTAYAG

SEQ ID NO: 55061 - DNA, 2046 bp, Artificial Sequence
  derived and/or modified sequence
atggacatcaagcaccaccagaacggcaccagaggccagagaagaaagcagccccacaccaccgtgcagagactgctgacctggggcctgcccgtgagctgcagctggttcctgtggagacagcccggcgagttccccgtgaccgccctgctgctgggcgccggcgccggcggcctgctggccatcggcctgggcgccatgggctggggcaccagcccccacatcagatgcgccagcctgctgctggtgcccaagatgctgggcaaggagggcagactgttcgtgctgggctacgccctggccgccatctacgtgggccccgtggccaacctgagacacaacctgaacaacgtgatcgccagcctgggctgcaccgtggagctgcagatcaacaacaccagagccgcctggagaatcagcaccgcccccctgagagccatgttcaaggacctgctgagcagcaaggagctgctgagagccgagaccagaaacatcagcgccaccttcgaggacctggacgcccaggtgaacagcgagaccggctacacccccgaggacaccatggacagcggcgagaccgcccagggcagagaggccagacaggcccccgccagcagactgcacctgagcacccagaagatgtacgagctgaagaccaagctgagatgcagctacgtggtgaaccaggccatcctgagctgcagaagatggttcgacagaaagcacgagcagtgcatgaagcacatctgggtgcccctgctgacccacctgctgtgcctgcccatgaagttcaagttcttctgcggcatcgccaaggtgatggaggtgtggtgcagaaacagaatccccgtggagggcaacttcggccagacctacgacagcctgaaccagagcatcagaggcctggacggcgagttcagcgccaacatcgacttcaaggaggagaagcaggccggcgtgctgggcctgaacaccagctgggagagagtgagcaccgaggtgagagactacgtgtacagacaggaggccagactggagtgggccctgggcctgctgcacgtgctgctgagctgcaccttcctgctggtgctgcacgccagcttcagctacatggacagctacaaccacgacatcagattcgacaacatctacatcagcacctacttctgccagatcgacgacagaagaaagaagctgggcaagagaaccctgctgcccctgagaaaggccgaggagaagaccgtgatcttcccctgcaagcccaccatccaggccagcgagatgagcaacgtggtgagagagctgctggagaccctgcccatcctgctgctgctggtggtgctgtgcggcctggactgggccctgtacagcatcttcgacaccatcagacaccacagcttcctgcagtacagcttcagaagcagccacaagctggaggtgaaggtgggcggcgacagcatgctggccagactgctgagaaagaccatcggcgccctgaacaccagcagcgagaccgtgatggagagcaacaacatgccctgcctgccccagcccgtgggcctggacgccagagcctactggagagccgccgtgcccatcggcctgctggtgtgcctgtgcctgctgcaggccttcggctacagactgagaagagtgatcgccgccttctacttccccaagagagagaagaagagaatcctgttcctgtacaacgacctgctgaagaagagagccgccttcaccaagctgagaagagccgccatcctgagaagagagagacagcagaaggcccccagacaccccctggccgacatcctgcacagaggctgccccctgctgagaagatggctgtgcagaagatgcgtggtgtgccaggcccccgagacccccgagagctacgtgtgcagaaccctggactgcgaggccgtgtactgctggagctgctgggacgacatgagacagagatgccccgtgtgcacccccagagaggagctgagcagcagcgccttcagcgacagcaacgacgacaccgcctacgccggctag

SEQ ID NO: 55062 - DNA, 2199 bp, Artificial Sequence
  derived and/or modified sequence
agttccgaggactggagaggggatagaaccttgtgtccaaggaggtccttcaggagacctgggatgagtggtgcttccccaaaacagactcatggacattaaacatcatcagaatggcacaagagggcaaagaagaaaacagcctcataccacggtgcagaggctcctgacctgggggctgccagtctcctgtagctggttcctgtggcgccagccgggcgagtttcctgtcactgctctcctgctgggggcaggcgctggggggctcctggccataggcttgggggccatgggctgggggacctcccctcacatccgctgtgccagcctcctactagtacccaagatgctgggcaaggaaggcaggctctttgtcctgggatacgccttggctgccatctatgtggggccagtagccaatctgcgacacaatctcaacaacgtgatcgcatcgctgggctgcaccgtggagctgcagatcaacaacacccgcgcagcttggcgcatctccacagcccccttacgggccatgttcaaggacctgctgagtagcaaagaattgctgagagcagagactcggaacatctccgccacttttgaggacctggatgcccaggtgaatagtgagacgggctacacgcctgaggataccatggactcaggggagacagcccagggcagggaggcccgccaagccccagcctccagactccacctgtcgacacagaagatgtatgagctgaagaccaagctgcgttgctcctatgtggtgaaccaggccatactcagctgccgtcgttggtttgaccgcaagcatgaacagtgcatgaagcacatctgggtcccactcctcacccacctgctctgcctgcctatgaagttcaagttcttctgtggcattgccaaggtgatggaggtttggtgccgcaatcgcatcccagtggaaggcaactttgggcagacctacgactccctcaaccagtctattcgtggcctggatggggaattttcagccaatattgacttcaaggaagagaagcaggctggggtgctggggctcaacacaagctgggagcgcgtgagcaccgaggtgcgggactacgtgtaccgccaggaggcccggctggagtgggccctggggctgctgcacgtgctgctctcctgcactttcctgctggtcctgcatgcgtctttctcctacatggacagctataaccatgacattcgttttgacaacatctacatcagtacctacttctgccagatcgatgaccgcaggaagaagctgggcaaacggactctgctgccactccgcaaagctgaggagaaaaccgtcatcttcccttgcaagcccaccatccaggcctcagaaatgagcaatgtggtgagggagctcctggagacactgcccattctgctgctgctggtggtgctgtgtggcttggactgggctctctactccatcttcgacaccatccgccaccactccttcctgcagtactccttccgcagcagtcataaactggaggtgaaggtcgggggagactccatgctagcccggcttcttcgaaaaaccattggggccctgaacacctcctcagagacagtgatggaatcaaacaacatgccctgcctgccccagcctgtgggcctggatgccagggcctactggagagctgcagtaccgattggcctgttagtgtgtctctgcctgttacaggcttttggctaccgactccggagggtcatcgcagccttctacttccccaagcgagagaagaagcggatcctgttcctctacaatgacctattgaagaaaagagcagccttcaccaaactcaggagggccgctatcctgaggcgggagcgacagcagaaggctccgcgccacccgctggcggatatcctgcaccgcggctgcccgctcctgcgccgctggctgtgccggcgctgcgtggtgtgccaggcacccgagacgcccgagtcctacgtgtgccggacgctggactgcgaggccgtgtactgctggtcgtgctgggacgacatgcggcagcggtgcccggtctgcacgccccgcgaagagctctcttcctccgcctttagtgacagcaacgacgacactgcctacgcggggtgaagaggcgtcctgctcgctcttccgcaccgtccttcccggttaataaaatgccctgtacgctt

SEQ ID NO: 55063 - DNA, 2046 bp, Artificial Sequence
  derived and/or modified sequence
atggacataaagcaccaccagaacggaacaagaggccaacgtcgaaagcagcctcatacgactgtgcagcgactgctgacatggggattacccgtatcttgctcatggttcttgtggcgccagcccggagagtttccagttacagccctcctactcggcgctggggcaggcggcctgctggccatagggctaggcgccatggggtggggtacgtctccgcacattagatgcgcaagcctgctgttggttcccaaaatgcttggcaaggaaggtagactgttcgtccttgggtacgctctcgctgcgatctacgttggtccggttgccaacttgagacataacctgaataatgtgatcgcaagcttaggctgcaccgtggagctgcagattaacaataccagagcggcctggagaataagcacggccccactgcgcgctatgtttaaggatctcctgtcaagcaaggagctgctgagagcggaaaccaggaacatcagtgctactttcgaagaccttgacgcccaggtgaattcagaaaccggttacacccccgaagacacgatggacagtggggagactgctcaggggcgggaagctcgccaggcacccgctagtcgattgcacctgagtactcagaaaatgtacgagctaaagaccaagctcaggtgtagctatgttgtcaatcaagccattttgtcatgtagaaggtggtttgacaggaaacacgagcagtgcatgaagcacatttgggtcccgctgcttacacacctactgtgtttgccgatgaagttcaaattcttttgcggaatagccaaggttatggaggtgtggtgcagaaaccgcatccctgtggagggaaactttggccaaacttatgatagccttaaccagtccattagaggtctggatggtgaattcagtgccaacatcgacttcaaagaagagaagcaagcaggcgttctcgggctaaatacctcctgggaacgcgtcagtacagaggtacgcgattacgtctataggcaggaagcgcgcctggaatgggccctgggcctcctccatgtactgttaagctgtacattcctgttggtattgcatgcgtcattttcctatatggactcctacaatcatgatataagattcgacaatatctatatcagcacatatttttgtcaaatcgacgacaggcgcaagaagctgggcaagcgcacgctcttgcctctgcgcaaggcagaagagaagacagtgatttttccatgcaaacccactatccaggccagcgagatgtcgaacgtagtccgggagttactggagactctgcccatccttctgttgctagtcgtcttgtgcggactggattgggccctgtacagtatcttcgatacaattaggcaccattctttcctgcagtactccttccggagctctcacaaactggaagtgaaagtcggcggagactccatgctggccaggctgctgcgtaaaactattggagccctgaacacctcttctgagacagtgatggaatcaaacaatatgccatgtctgccccagccagtagggttagacgcccgcgcctactggagagccgctgtgccaatcgggctgctcgtctgtctgtgtctcctccaggccttcggctacaggctaagacgagtgatagcggcattttacttccctaagagggagaaaaagaggatcctgttcctgtacaatgatctgttgaaaaaacgggctgccttcaccaaattgcggagggcagccatcctgcggagagagagacaacagaaggcacctaggcacccactcgcagatatactgcaccgtgggtgtccactcctgagaagatggctgtgcagaagatgcgtggtttgtcaggcgcccgaaacccccgaaagttacgtttgtcgaaccctggattgcgaagctgtgtattgctggagttgctgggatgatatgaggcagcggtgtccagtgtgtaccccccgtgaggagcttagctcctctgccttctctgattctaacgacgacaccgcatacgccgggtag

SEQ ID NO: 55064 - DNA, 2046 bp, Artificial Sequence
  derived and/or modified sequence
atggacatcaagcaccaccagaatggcacccggggccagaggaggaagcagccccacaccaccgtgcagaggctgctgacctggggcctgcctgtgtcctgctcctggttcctgtggaggcagcccggggagttccctgtgacagccctgctgctgggcgctggggccggcggcctgctggccatcggcctgggcgccatgggctggggcaccagcccccacatccgctgtgccagcctgctgctggtgcccaagatgctgggcaaggagggccgcctgtttgtgctgggctacgccctggccgccatctacgtgggccctgtggccaacctgcggcacaacctgaacaacgtgattgccagcctgggctgcaccgtggagctgcagatcaacaacaccagggctgcctggaggatcagcacagcccccctgcgggccatgttcaaggacctgctgagcagcaaggagctgctgcgggcagagaccaggaacatcagcgccacctttgaggacctggatgcccaggtgaacagcgagaccggctacaccccagaggacaccatggacagcggggagacagcccagggccgggaggcccggcaggccccagccagccggctgcacctgagcacccagaagatgtatgagctgaagaccaagctgcgctgcagctatgtggtgaaccaggccatcctgagctgccgccgctggtttgacaggaagcatgagcagtgcatgaagcacatctgggtgcccctgctgacccacctgctgtgcctgcccatgaagttcaagttcttctgtggcatcgccaaggtgatggaggtgtggtgcaggaaccgcatccctgtggagggcaactttggccagacctatgacagcctgaaccagagcatccggggcctggatggagagttcagcgccaacatcgacttcaaggaggagaagcaggccggcgtgctgggcctgaacacctcctgggagcgggtgtccacagaggtgcgggactatgtgtaccggcaggaggcccggctggagtgggccctgggcctgctgcacgtgctgctgagctgcaccttcctgctggtgctgcacgccagcttctcctacatggacagctacaaccacgacatccgctttgacaacatctacatcagcacctacttctgccagattgatgacaggaggaagaagctgggcaagaggaccctgctgcccctgaggaaggccgaggagaagacagtcatcttcccctgcaagcccaccatccaggccagcgagatgagcaatgtggtgcgggagctgctggagaccctgcccatcctgctgctgctggtggtgctgtgtggcctggactgggccctgtacagcatctttgacaccatccgccaccacagcttcctgcagtacagcttccgcagcagccacaagctggaggtgaaggtgggcggggacagcatgctggcccggctgctgaggaagaccatcggggccctgaacaccagcagcgagaccgtgatggagagcaacaacatgccctgcctgccccagcctgtgggcctggatgcccgggcctactggagggctgctgtgcccatcggcctgctggtgtgcctgtgcctgctgcaggccttcggctaccgcctgcggcgggtgattgctgccttctacttccccaagcgggagaagaagaggatcctcttcctgtacaatgacctgctgaagaagagagctgccttcaccaagctgcggcgggccgccatcctgcggcgggagcggcagcagaaggcccccaggcaccccctggccgacatcctgcaccggggctgccccctgctgcggcgctggctgtgcagaagatgtgtggtgtgccaggcccctgagaccccagagagctatgtgtgcaggaccctggactgtgaggccgtgtactgctggagctgctgggatgacatgaggcagcgctgccctgtgtgcaccccccgggaggagctgagcagcagcgccttcagtgacagcaatgatgacacagcctatgccggctag

SEQ ID NO: 55065 - DNA, 2046 bp, Artificial Sequence
  derived and/or modified sequence
atggacatcaagcaccaccagaacggcacccggggccagcggcggaaacagccacacacgacagtccagagactgttgacttggggcctgcctgtgtcttgttcgtggtttctgtggcgacaaccaggtgaatttcccgtcaccgcactcctgctgggcgccggtgccggggggctcctagctattggactcggtgcaatgggctgggggaccagtcctcacatcaggtgcgcttcgctgctccttgtacctaagatgcttggcaaagagggtcgcctctttgtattgggatatgctcttgcagcgatttacgtcggtcctgtggctaatctacgccacaatctgaacaatgttatcgcctccttgggatgcaccgtagaactccaaattaataacacacgagcagcttggcgcataagcactgcacctctgagagcaatgtttaaagatcttctaagctcaaaggagcttctgcgagccgaaactagaaatatcagcgcgaccttcgaagacctcgatgcacaggtgaacagtgagactggatacacacccgaagacactatggattcaggtgagacagcccagggtcgcgaggcccggcaagctccagcttcgagacttcaccttagtacccagaagatgtacgagctaaagacgaagctcagatgttcctacgtggtgaaccaggctattctctcttgtcggaggtggtttgatagaaaacacgagcaatgcatgaaacacatatgggttccccttttgactcatttgctgtgcttgcccatgaaattcaaatttttttgtggaatcgctaaagtgatggaggtctggtgtaggaaccgtattcccgtggagggcaactttggccagacttatgacagcctaaatcagagtattaggggattggacggagaattctccgcaaatatcgactttaaggaggaaaagcaagcaggtgtcctcggcctcaacacgtcctgggagcgggtatcaactgaggtgagagattacgtttacaggcaggaggcaagattggagtgggcgttaggtctgctccatgtgctgttgtcctgtacatttttgctagtgctgcatgcaagtttctcatatatggatagctacaatcatgacatacgctttgataacatttatatctcgacttacttttgtcagatagacgatagaagaaaaaaactcggtaagcgtacacttctacccctgagaaaagccgaagaaaaaaccgtgatattcccgtgcaagcctaccattcaggcttcagaaatgagtaatgtggttcgcgaattactggaaaccctgcccattctactacttctggtggttctgtgtggattggattgggccctgtattctatctttgatacaatacgccatcactccttcctgcaatacagcttccgttcaagccataaattggaggtgaaagtgggtggggacagcatgctggctcgcttgctaagaaagacaatcggcgcattaaacacttcgagcgagaccgtcatggagtccaataacatgccgtgcctcccacaaccagtcggattggatgccagggcctactggcgggctgccgtccctattggtctgctggtatgtctctgtctgctgcaggccttcggttaccggctccggagggtgatcgctgcattttatttccctaagagggaaaaaaagagaattctcttcctgtataatgacctgctgaagaagcgcgctgcatttactaaacttcggagagccgccattctccgcagggagcgacagcagaaagcacccaggcaccccctggcagacattctccacagaggctgtcctctcctccgtcggtggctttgccgcagatgcgtcgtctgccaggcacctgaaacaccagaaagctatgtgtgccgaaccttggactgcgaagcagtatactgctggtcctgttgggacgacatgagacagagatgcccggtgtgcacaccacgggaggaactgagtagctccgccttttctgactcaaatgatgatactgcttacgcgggctag

SEQ ID NO: 55066 - DNA, 2046 bp, Artificial Sequence
  derived and/or modified sequence
atggatattaaacatcaccaaaacgggactcgtggccagcgccgtaagcaaccgcatacgaccgttcagcgactcttaacttggggcctgcccgtgagctgttcatggttcctgtggcggcaaccaggtgagttccctgtcactgcgctgctgctgggcgctggcgctggcggactgctggccataggcctcggcgcaatggggtggggcacctctccacacatcaggtgtgcttcacttctactggtgcccaaaatgctgggcaaagagggaaggctgttcgttctaggttacgccctggccgcaatttatgtcggacctgtggctaatttgcggcataatttgaacaacgtcatcgcctcgctcgggtgcacggttgagctacaaattaacaatacccgggcagcttggagaatctccaccgccccactcagagcaatgtttaaggacctcctttctagcaaggagctcctgcgagcggagacacggaatatatcagcgacattcgaggacctggatgcacaagtgaactccgaaacgggctatactcccgaggataccatggatagtggagagaccgcccaggggagggaggccaggcaggctcccgctagcagattgcatttgagcacccagaagatgtatgagctgaaaacaaaactgcggtgttcttacgtggtcaaccaggccatactgagctgtcggcgatggttcgacagaaagcatgaacagtgtatgaaacacatctgggtaccactgctaacacacctgctgtgcttaccaatgaagtttaagttcttttgcggaattgctaaagtaatggaagtctggtgccgaaatagaatcccggtggaaggtaactttggccagacctatgatagcctgaatcagagtattcgcggtctggacggtgaattctctgcgaatatagattttaaggaggaaaagcaagccggagtcctcggactcaacacatcatgggaaagggtgtctaccgaagtccgggactatgtgtacagacaggaagccaggctagaatgggctctcggtctgttgcatgttctgctctcctgcaccttcctattggtcctgcacgcctcttttagttatatggattcatataaccatgacattaggttcgacaacatctatatcagcacatatttttgtcagatcgatgacagaagaaaaaagttggggaagcgtactctccttccactgcggaaagctgaagaaaagactgtgatattcccttgtaagcccacaattcaggcctcagagatgagcaacgtggtgagggagctattggaaacattgcccattctcctgctcctggtggtgctgtgcggactcgattgggcactctactctatctttgataccattaggcatcactcttttctacaatactcctttcgttcaagtcacaagctggaggtgaaggtgggcggagatagcatgcttgcccgattactgcgtaagaccattggtgctctcaatacatcatctgagaccgtcatggaatccaacaatatgccatgcttaccccagcctgttggtctggatgcacgggcttattggagagcagccgtacctattgggctgctcgtgtgcctttgcttactgcaggctttcggatatcggctaagacgcgtaatcgctgccttctactttcctaagcgtgaaaagaagcgcatcctcttcttgtataatgatctactcaagaaaagagctgcgtttaccaaattacgaagggccgctatcctccgaagggaacggcaacaaaaagcccctagacatccgttagctgatattctgcaccgcggatgcccactacttcgaaggtggctgtgtcgaagatgcgtggtctgtcaggcccctgaaacaccggaaagctatgtgtgtcggacactggattgtgaggcagtctactgctggtcatgctgggacgatatgagacagaggtgtccagtatgcacccctcgagaggagctgtcatcctctgccttcagtgacagcaatgacgacacagcttacgcaggttag

SEQ ID NO: 55067 - protein, 1054 aa, Artificial Sequence
  derived and/or modified sequence
MLQKREKVLLLRTFQGRTLRIVREHYLRPCVPCHSPLCPQPAACSHDGKLLSSDVTHYVIPDWKVVQDYLEILEFPELKGIIFMQTACQAVQHQRGRRQYNKLRNLLKDARHDCILFANEFQQCCYLPRERGESMEKWQTRSIYNAAVWYYHHCQDRMPIVMVTEDEEAIQQYGSETEGVFVITFKNYLDNFWPDLKAAHELCDSILQSRRERENESQESHGKEYPEHLPLEVLEAGIKSGRYIQGILNVNKHRAQIEAFVRLQGASSKDSDLVSDILIHGMKARNRSIHGDVVVVELLPKNEWKGRTVALCENDCDDKASGESPSEPMPTGRVVGILQKNWRDYVVTFPSKEEVQSQGKNAQKILVTPWDYRIPKIRISTQQAETLQDFRVVVRIDSWESTSVYPNGHFVRVLGRIGDLEGEIATILVENSISVIPFSEAQMCEMPVNTPESPWKVSPEEEQKRKDLRKSHLVFSIDPKGCEDVDDTLSVRTLNNGNLELGVHIADVTHFVAPNSYIDIEARTRATTYYLADRRYDMLPSVLSADLCSLLGGVDRYAVSIMWELDKASYEIKKVWYGRTIIRSAYKLFYEAAQELLDGNLSVVDDIPEFKDLDEKSRQAKLEELVWAIGKLTDIARHVRAKRDGCGALELEGVEVCVQLDDKKNIHDLIPKQPLEVHETVAECMILANHWVAKKIWESFPHQALLRQHPPPHQEFFSELRECAKAKGFFIDTRSNKTLADSLDNANDPHDPIVNRLLRSMATQAMSNALYFSTGSCAEEEFHHYGLALDKYTHFTSPIRRYSDIVVHRLLMAAISKDKKMEIKGNLFSNKDLEELCRHINNRNQAAQHSQKQSTELFQCMYFKDKDPATEERCISDGVIYSIRTNGVLLFIPRFGIKGAAYLKNKDGLVISCGPDSCSEWKPGSLQRFQNKITSTTTDGESVTFHLFDHVTVRISIQASRCHSDTIRLEIISNKPYKIPNTELIHQSSPLLKSELVKEVTKSVEEAQLAQEVKVNIIQEEYQEYRQTKGRSLYTLLEEIRDLALLDVSNNYGI

SEQ ID NO: 55068 - DNA, 3165 bp, Artificial Sequence
  derived and/or modified sequence
atgctgcagaaaagggaaaaagttctgctgctgcggaccttccagggacggaccctgcgaatcgtgagggaacactatctgcggccctgtgtcccctgtcactctcctctatgtcctcagcctgccgcctgctctcacgatggcaagttgctctccagcgacgtcacacactatgtgatccctgactggaaggtggtgcaagactatctagagatcttggagttccccgagcttaaaggcattatctttatgcagaccgcctgtcaggcggtacagcaccaaagagggaggaggcaatataataaactacgtaacctgctgaaggacgctagacatgattgtatcttattcgcgaacgagtttcagcagtgttgttacctgcctcgcgagagaggcgagtctatggaaaagtggcagacgagatccatttataacgctgcggtgtggtactatcaccactgccaagatcggatgccaatcgtcatggtcacagaggacgaggaggcaattcagcagtatggaagtgagactgagggagttttcgtgattacgtttaagaactatttagataatttttggccggatttgaaagccgcacacgagctgtgcgacagcatcctgcagagccggagagaaagggagaatgagtcgcaggaatctcacggcaaggagtaccctgagcacctacccctggaagtgctggaagccgggataaagagtggcaggtatatccaaggaatcctcaatgtgaacaagcacagagcacagattgaggcatttgtgaggctccaaggtgcgtcatctaaggatagcgacctcgtatccgatatactgattcacggaatgaaagccagaaatcgcagtattcatggggacgtggtagtcgttgaactcctccccaaaaacgagtggaagggacggacagtggcgttgtgcgaaaacgactgtgatgataaggcatccggggagagcccgtctgaacctatgcctaccggcagagtcgtcggaatcttgcagaaaaactggagggattatgtcgtgactttcccttccaaggaggaggttcagtcccagggcaagaacgcccagaagatcctggttactccgtgggattaccgaatccccaagatcaggatctccacccaacaagcggaaacactacaagatttcagagtggtcgtgcggattgattcttgggagtcgaccagcgtttatcctaatggacacttcgtcagggtgctgggacgcatcggcgacctagaaggagagattgccacaatcctagtcgagaacagcatctctgttatccctttctccgaagctcagatgtgtgaaatgcctgttaacactccagagtcgccctggaaggtgagcccagaggaggagcagaaaagaaaggacctgcggaagtcccacctggtctttagcatcgatcccaaaggatgcgaggatgttgacgacactctctcagtcagaaccctgaacaatggaaacctggaattaggggtccatatcgctgatgtgacgcactttgtcgcaccaaactcgtatatcgacattgaggcacgcaccagggctaccacatactatcttgcggatcggaggtacgacatgctccctagtgtcttgtcggccgacttatgcagtcttctagggggcgtggatcggtatgcggtatcaataatgtgggagctggacaaggcttcctacgaaatcaaaaaggtatggtatggacgtacaataattcggagcgcctacaagcttttttatgaagccgcccaggaattgctcgatggcaatctctccgtggtggacgacatccctgaatttaaagatctagacgagaaatcacggcaggctaaactcgaagagttggtttgggccatagggaaactcacagacattgcacggcacgtgagggctaagagagacggctgtggagccctggagctggagggcgtggaggtctgcgtccagttagatgataaaaaaaacattcacgatttgattccgaagcagccgctggaagtgcacgaaaccgttgccgaatgtatgatactcgcgaatcattgggttgccaaaaagatttgggaatctttcccccaccaggcactcctccgccagcatccgccaccacaccaggagtttttttctgagctccgtgagtgcgccaaagctaagggattcttcatcgataccagaagtaataagacactggcagattctctagataacgcgaacgaccctcacgatcccatcgtaaacaggctcctacgtagtatggctacccaggcgatgtccaacgccctctactttagcaccgggagctgtgccgaagaggagttccaccactatggtttggcactcgacaaatacactcattttacttctcctatcaggcgctattctgacatcgtcgttcataggcttttaatggcggcaatctccaaagacaagaagatggaaataaagggaaatctgttctcaaataaggatctggaggaactgtgtcgacatattaataataggaaccaggctgcacagcactctcaaaagcagtccacagagctgttccagtgcatgtatttcaaagataaggatcccgcaacggaggaaagatgcatttctgatggggttatttactctattcggactaatggtgtgcttttgtttatcccgcgatttggaattaaaggcgccgcttaccttaaaaacaaggatggcttggtcatcagttgtggccctgattcatgctcagagtggaagccgggatccttacagaggttccagaataaaatcacctcaacgactactgatggggagtccgtcacgtttcacctgtttgatcacgtgacggtgcgtataagtattcaagccagtaggtgccacagtgacaccattaggcttgagattatcagcaataagccctacaagatccccaatactgagctcatccaccaaagtagtcccctgttgaagtccgaactcgtgaaggaagtgaccaagtccgttgaggaggcacagttagcccaagaagtcaaggtgaatattatccaggaagaataccaggagtatcggcagaccaaaggcaggtctctgtacaccctgctggaagaaatccgcgacctggccctcttggatgtatcaaacaactatggaatttag

SEQ ID NO: 55069 - DNA, 3165 bp, Artificial Sequence
  derived and/or modified sequence
atgctgcagaagcgggagaaggtgctgctgctgcggaccttccagggccgcaccctgagaattgtgcgggagcactacctgcggccctgtgtgccctgccacagccccctgtgcccccagcctgctgcctgcagccatgatggcaagctgctgagcagtgatgtgacccactacgtgatcccagactggaaggtggtgcaggactacctggagatcctggagttccctgagctgaagggcatcatcttcatgcagacagcctgccaggccgtgcagcaccagagaggaagacggcagtacaacaagctgaggaacctgctgaaggatgcccggcatgactgcatcctgtttgccaatgagttccagcagtgctgctacctgccccgggagcggggggagagcatggagaagtggcagaccaggagcatctacaatgctgctgtgtggtactaccaccactgccaggacaggatgcccatcgtgatggtgacagaagatgaggaggccatccagcagtatggcagcgagacagaaggagtgtttgtgatcaccttcaagaactacctggacaacttctggccagacctgaaggccgcccacgagctgtgtgacagcatcctgcagagccggcgggagcgggagaatgaaagccaggagagccacggcaaggagtacccagagcacctgcccctggaggtgctggaggccggcatcaagagcggccgctacatccagggcatcctgaatgtgaacaagcaccgggcccagatcgaggcctttgtgcggctgcagggcgccagcagcaaggacagcgacctggtgtctgacatcctgatccacggcatgaaggccaggaacagaagcatccatggagatgtggtggtggtggagctgctgcccaagaatgagtggaagggccgcacagtggccctgtgtgaaaatgactgtgatgacaaggccagcggggagagccccagcgagcccatgcccaccggccgggtggtgggcatcctgcagaagaactggagggactatgtggtgaccttccccagcaaggaggaggtgcagagccagggcaagaatgcccagaagatcctggtgaccccctgggactaccgcatccccaagatccgcatcagcacccagcaggccgagaccctgcaggacttccgggtggtggtgagaattgacagctgggagagcacctctgtgtacccaaatggccactttgtgcgggtgctgggcagaattggagacctggagggggagatcgccaccatcctggtggagaacagcatcagcgtcatccccttcagcgaggcccagatgtgtgagatgcctgtgaacaccccagagagcccctggaaggtgtccccagaggaggagcagaagaggaaggacctgaggaagagccacctggtgttcagcattgaccccaagggctgtgaagatgtggatgacaccctgtctgtgaggaccctgaacaacggcaacctggagctgggcgtgcacatcgcagatgtgacccactttgtggcccccaacagctacatcgacatcgaggcccggacccgggccaccacctactacctggccgaccggcgctatgacatgctgcccagcgtgctgtctgctgacctgtgcagcctgctgggcggcgtggacagatatgctgtgtccatcatgtgggagctggacaaggccagctatgagatcaagaaggtgtggtacggccgcaccatcatccgcagcgcctacaagctgttctatgaggccgcccaggagctgctggatggcaacctgtctgtggtggatgacatccctgagttcaaggacctggatgagaagagccggcaggccaagctggaggagctggtgtgggccatcggcaagctgacagacatcgcccggcacgtgcgggccaagagagatggctgtggggccctggagctggagggcgtggaggtgtgtgtgcagctggatgacaagaagaacatccatgacctgatccccaagcagcccctggaggtgcatgagaccgtggccgagtgcatgatcctggccaaccactgggtggccaagaagatctgggagagcttcccccaccaggccctgctgcggcagcaccccccaccccaccaggagttcttcagcgagctgcgggagtgtgccaaggccaagggcttcttcatcgacaccaggagcaacaagaccctggccgacagcctggacaatgccaatgacccccatgaccccatcgtgaaccggctgctgcgctccatggccacccaggccatgagcaatgccctgtacttcagcacaggcagctgtgccgaggaggagttccaccactacggcctggccctggacaagtacacccacttcaccagccccatccgccgctacagcgacatcgtggtgcaccggctgctgatggccgccatcagcaaggacaagaagatggagatcaagggcaacctcttcagcaacaaggacctggaggagctgtgccgccacatcaacaacagaaaccaggccgcccagcacagccagaagcagagcacagagctgttccagtgcatgtacttcaaggacaaggaccctgccacagaggagcgctgcatcagtgatggagtcatctacagcatccgcaccaacggggtgctgctcttcatccccaggtttggcatcaagggggccgcctacctgaagaacaaggatggcctggtgatcagctgtggccctgacagctgcagcgagtggaagccaggcagcctgcagcgcttccagaacaagatcaccagcaccaccacagatggagagagcgtgaccttccacctgtttgaccacgtgacagtgcgcatcagcatccaggccagccgctgccacagcgacaccatccggctggagatcatcagcaacaagccctacaagatccccaacacagagctgatccaccagagcagccccctgctgaagtctgagctggtgaaggaggtgaccaagtctgtggaggaggcccagctggcccaggaggtgaaggtgaacatcatccaggaggagtaccaggagtaccggcagaccaagggccgcagcctgtacaccctgctggaggagatccgggacctggccctgctggatgtgagcaacaactacggcatctag

SEQ ID NO: 55070 - DNA, 3165 bp, Artificial Sequence
  derived and/or modified sequence
atgctgcagaagcgggagaaggtgctgctgctgcggaccttccaggggcggacactcaggatagttcgggagcattacctgagaccatgcgtgccatgccacagtcctctgtgtccgcaaccagccgcctgttcccacgacggaaaattgctctcttcagatgtaacccattacgttataccagactggaaggtcgtccaggactacctggagattcttgaatttccagagctgaagggcatcatcttcatgcagacagcttgtcaggcagtacaacatcaacgggggcgtcgtcaatacaacaaactgcgaaacctgttgaaggacgcgcgtcatgactgtatcctcttcgccaacgagttccagcagtgttgttaccttccgcgggagagaggggagagtatggagaagtggcagacccggtcaatttacaacgccgctgtttggtactaccatcattgtcaggaccgcatgcccattgtaatggtaacagaagacgaggaggctatacaacagtacggatccgaaactgagggcgtttttgtgatcaccttcaaaaactacctggataacttctggcctgatttaaaggctgctcatgaactgtgcgattctattcttcaaagccgaagagagagggaaaatgaaagccaggaatcccacgggaaggaataccccgaacacctcccactcgaagtgctcgaggctgggatcaagtctggtcgctatatccagggcatactcaacgtcaacaaacatcgcgcccaaatcgaagcctttgttagattacagggagcctcatctaaggattctgacctggtctcggatattctcatccatggaatgaaggccagaaataggtccattcacggcgacgttgtagtggtagaattgctgcccaagaatgaatggaaaggacgaacagtggctctctgcgagaatgactgcgacgataaggcttccggcgagtccccttctgagccaatgccaaccgggcgcgttgtcgggatacttcaaaaaaattggcgagactatgtcgtcacctttccaagcaaagaggaagtgcagtcacaaggcaagaacgcccagaagattctggtgacaccttgggattacagaatacctaaaatcaggatttccacacagcaagctgaaaccctgcaagacttccgggtcgtggtgcgcatcgacagctgggaaagtacctccgtttatccaaacggccacttcgtccgggtgctgggcagaatcggtgatctggaaggcgagatcgccacaatactggttgagaattctatatcggtgataccatttagtgaagcccagatgtgtgagatgccagtgaatacaccagagagcccatggaaagtgagcccagaagaagaacagaagcgaaaagacctcaggaaatcgcacctcgtgttttccatcgatccaaaagggtgcgaagatgtggatgatacattatccgtgcgtacactaaacaacggaaacctcgaattgggcgttcacattgctgacgtaacccactttgtggccccgaattcttatatagacatcgaagctaggactagggccactacatattatctagctgacaggaggtacgatatgcttccaagcgtcctgagcgctgacctgtgtagcctcctgggtggcgtcgatcgctacgcagttagcatcatgtgggaacttgataaggccagttacgaaatcaaaaaggtgtggtacggcagaacaatcattagatctgcctacaagttgttctatgaggccgctcaggagctgctcgacggcaatctttccgtcgttgatgatataccggagttcaaggacctcgacgagaagtcgaggcaggccaagctggaagagctcgtttgggcaatcgggaagcttaccgatattgcaagacacgtgcgcgcaaaacgcgacggatgtggggccctcgaactcgagggggtcgaggtttgcgtgcagcttgacgacaagaaaaatatccatgatttaatccccaagcagccgttggaggtgcacgaaacggtggcagaatgcatgatcctggcaaatcattgggtagccaaaaaaatctgggaatcttttccccatcaggccttactacggcagcaccccccaccccaccaggagttcttttcagaattgcgagaatgcgccaaggccaaaggtttctttattgacactagaagcaataagacattagcagatagcctggataatgctaacgatccccacgatccaatcgttaaccgactgttacggtccatggcgacgcaggctatgtccaacgccctctatttcagcaccggcagttgcgcagaagaggagttccaccactatggacttgctcttgataagtacacccacttcacatccccaattcggaggtatagcgatatagtggtacacagacttttaatggccgctatctctaaagacaagaaaatggagatcaagggcaacctcttctcaaacaaggatttggaagagttatgcagacatattaacaaccgcaaccaggcagcccagcatagccagaaacagtcaaccgagctcttccaatgtatgtacttcaaggacaaggaccctgccacagaggaacgatgcatatccgacggcgttatttattctatacgcaccaacggggtgctcctctttatcccacgctttgggattaaaggagccgcgtacctgaagaataaggatggattggtcatctcttgcggaccagactcatgttctgagtggaagcctgggagcctgcaacgtttccagaacaaaattaccagtactaccacagacggagaatctgtgaccttccacctctttgatcacgttactgtaaggatttccatccaggcctcccgatgtcattctgatacaatccgcctggaaatcattagtaataaaccgtacaagatacccaacacagaactgatacaccaatcatctcctttactcaagtcagagctggttaaagaggtcacgaagtctgtcgaggaagctcagctggcacaggaggtaaaagttaacattattcaagaagagtaccaggaatatcgacagaccaaaggcagaagtctgtataccctgctggaggagatacgagatctggcactgcttgatgtctcaaataactatggtatttag

SEQ ID NO: 55071 - DNA, 3165 bp, Artificial Sequence
  derived and/or modified sequence
atgctgcagaagcgcgagaaagtgctgctcctgagaacatttcaaggtcgtactctgaggatcgtgagagaacactacctgcggccatgtgtgccgtgccacagccccctatgcccgcaacctgctgcgtgttctcacgacggaaagctcctgagctccgacgtgacccattacgtaattcccgactggaaggttgtgcaagactaccttgagatcctggaattccccgagctgaaaggcatcatcttcatgcaaacggcctgccaggcagtgcagcaccagcgaggcaggagacaatacaacaagctgcgtaacctgttaaaggatgctcgccacgattgcatcttatttgccaatgagtttcagcagtgctgctacttacccagagagagaggcgagagtatggaaaagtggcaaacccgttccatctacaacgcagcagtgtggtactatcatcactgccaggatcgcatgccaatcgtgatggtgactgaggacgaagaagcaattcagcagtacggttctgaaacagaaggagtgttcgtaattaccttcaaaaattatttggataacttttggcccgacctgaaagccgctcatgaactctgtgactccatcctacagtcgagaagggagcgcgagaatgagtcacaggaatcacatggcaaggaataccccgagcatcttcccctggaggtccttgaagcagggattaaaagcggccgttacattcagggaattctgaatgtgaacaagcacagggcccagattgaagcctttgttcggctccaaggagctagctcgaaggacagcgatctggtatcggacatcctgatacatgggatgaaggccagaaaccgcagcattcatggtgacgtagtggtggtcgaactcctgcccaagaatgaatggaaaggcaggactgtagccttatgcgagaatgactgcgacgataaggcctcgggagagagccccagcgagcccatgcccactgggagggtagtcggtatcctgcaaaagaattggagggattatgttgtgactttccccagtaaggaagaagtgcagtcccagggcaagaacgctcagaaaatcctggtcactccttgggactaccgtataccaaaaataagaatttccactcaacaagccgagactctgcaggatttcagagtggtcgtgaggatcgactcgtgggaaagcactagcgtttatcctaatggtcactttgtcagagtcctaggaaggatcggagatctggagggagaaatagcgaccattctagttgaaaattctatatcagttatcccatttagcgaggctcagatgtgtgaaatgccggttaataccccggagtcgccctggaaggtgtccccggaggaggagcagaaaagaaaggacctgagaaagagccacttggtattcagcattgaccccaaaggctgtgaagacgtggatgatactctgtctgtgcgtactttaaataatggtaacttggagttgggcgtacatattgcggatgtgacacacttcgtggctccaaactcttacatagacatcgaagcccgaactagggcgacaacatactaccttgctgatcgccgatatgatatgctcccctccgtgctgtccgcagatctatgttccctgttgggtggagttgatcggtacgcggtgtcaattatgtgggagttagacaaagcctcatatgaaataaaaaaggtgtggtatggtcggacgatcatcagaagtgcctacaagttgttttatgaagctgctcaagaactcctcgatggaaatctgtccgtggtcgatgacatcccggagttcaaagacctcgacgaaaaaagcaggcaggccaagctggaagagcttgtgtgggcgattggcaagcttaccgacattgccaggcacgtgcgagctaagagggatgggtgcggcgctctcgagctcgaaggcgttgaggtgtgcgtgcagctggacgataagaaaaacattcacgaccttatccctaaacagcctctggaggtgcatgagacagtggcggaatgcatgatcttagccaatcactgggtggccaaaaagatttgggaatcatttccccaccaggccctgctgcggcagcatcccccacctcaccaggaattttttagtgagttaagggagtgcgccaaggctaagggtttcttcattgacacacgcagcaacaaaaccttagctgactccttagacaatgccaacgatccccatgaccccatcgtgaatagacttctgcgcagtatggccacccaggcaatgtccaatgcgctctacttctccaccgggagctgtgccgaagaggaattccaccactatggtctggcactggataagtatacccacttcacatccccgattcgccgttactctgatatcgtggtgcatcggcttctcatggcggcaatcagtaaggataagaagatggaaattaagggcaaccttttcagtaataaagacctcgaggaactgtgccggcatattaacaatagaaaccaagccgctcagcacagtcagaaacagtctacagagctctttcaatgcatgtatttcaaagataaggacccggctaccgaagaaaggtgtatctcagacggagttatctatagtatcagaaccaacggtgtgctcctgttcatcccaagattcggcatcaagggcgctgcttatctcaaaaacaaggatggtttggtcatatcatgtgggccagactcctgcagcgagtggaagcccggatccttacagcgctttcaaaataagatcacatcgactaccaccgatggcgagagcgtgacttttcatctgttcgatcacgtaactgttcgcatttctatccaagcatcccggtgtcactcagataccattcgcctggaaataatcagcaacaaaccatataaaatcccaaatacagagctgattcaccagagcagccctctgctgaagagcgagttggttaaagaagtgacgaagtctgttgaggaagctcagttggcccaggaggtgaaagttaacattatccaagaggagtaccaggaatatagacagaccaaaggaaggtctttgtacacactgctcgaggagatacgggatcttgctcttcttgacgtgtccaacaactacgggatatag

SEQ ID NO: 55072 - DNA, 3165 bp, Artificial Sequence
  derived and/or modified sequence
atgctgcagaagagagagaaggtgctgctgctgagaaccttccagggcagaaccctgagaatcgtgagagagcactacctgagaccctgcgtgccctgccacagccccctgtgcccccagcccgccgcctgcagccacgacggcaagctgctgagcagcgacgtgacccactacgtgatccccgactggaaggtggtgcaggactacctggagatcctggagttccccgagctgaagggcatcatcttcatgcagaccgcctgccaggccgtgcagcaccagagaggcagaagacagtacaacaagctgagaaacctgctgaaggacgccagacacgactgcatcctgttcgccaacgagttccagcagtgctgctacctgcccagagagagaggcgagagcatggagaagtggcagaccagaagcatctacaacgccgccgtgtggtactaccaccactgccaggacagaatgcccatcgtgatggtgaccgaggacgaggaggccatccagcagtacggcagcgagaccgagggcgtgttcgtgatcaccttcaagaactacctggacaacttctggcccgacctgaaggccgcccacgagctgtgcgacagcatcctgcagagcagaagagagagagagaacgagagccaggagagccacggcaaggagtaccccgagcacctgcccctggaggtgctggaggccggcatcaagagcggcagatacatccagggcatcctgaacgtgaacaagcacagagcccagatcgaggccttcgtgagactgcagggcgccagcagcaaggacagcgacctggtgagcgacatcctgatccacggcatgaaggccagaaacagaagcatccacggcgacgtggtggtggtggagctgctgcccaagaacgagtggaagggcagaaccgtggccctgtgcgagaacgactgcgacgacaaggccagcggcgagagccccagcgagcccatgcccaccggcagagtggtgggcatcctgcagaagaactggagagactacgtggtgaccttccccagcaaggaggaggtgcagagccagggcaagaacgcccagaagatcctggtgaccccctgggactacagaatccccaagatcagaatcagcacccagcaggccgagaccctgcaggacttcagagtggtggtgagaatcgacagctgggagagcaccagcgtgtaccccaacggccacttcgtgagagtgctgggcagaatcggcgacctggagggcgagatcgccaccatcctggtggagaacagcatcagcgtgatccccttcagcgaggcccagatgtgcgagatgcccgtgaacacccccgagagcccctggaaggtgagccccgaggaggagcagaagagaaaggacctgagaaagagccacctggtgttcagcatcgaccccaagggctgcgaggacgtggacgacaccctgagcgtgagaaccctgaacaacggcaacctggagctgggcgtgcacatcgccgacgtgacccacttcgtggcccccaacagctacatcgacatcgaggccagaaccagagccaccacctactacctggccgacagaagatacgacatgctgcccagcgtgctgagcgccgacctgtgcagcctgctgggcggcgtggacagatacgccgtgagcatcatgtgggagctggacaaggccagctacgagatcaagaaggtgtggtacggcagaaccatcatcagaagcgcctacaagctgttctacgaggccgcccaggagctgctggacggcaacctgagcgtggtggacgacatccccgagttcaaggacctggacgagaagagcagacaggccaagctggaggagctggtgtgggccatcggcaagctgaccgacatcgccagacacgtgagagccaagagagacggctgcggcgccctggagctggagggcgtggaggtgtgcgtgcagctggacgacaagaagaacatccacgacctgatccccaagcagcccctggaggtgcacgagaccgtggccgagtgcatgatcctggccaaccactgggtggccaagaagatctgggagagcttcccccaccaggccctgctgagacagcacccccccccccaccaggagttcttcagcgagctgagagagtgcgccaaggccaagggcttcttcatcgacaccagaagcaacaagaccctggccgacagcctggacaacgccaacgacccccacgaccccatcgtgaacagactgctgagaagcatggccacccaggccatgagcaacgccctgtacttcagcaccggcagctgcgccgaggaggagttccaccactacggcctggccctggacaagtacacccacttcaccagccccatcagaagatacagcgacatcgtggtgcacagactgctgatggccgccatcagcaaggacaagaagatggagatcaagggcaacctgttcagcaacaaggacctggaggagctgtgcagacacatcaacaacagaaaccaggccgcccagcacagccagaagcagagcaccgagctgttccagtgcatgtacttcaaggacaaggaccccgccaccgaggagagatgcatcagcgacggcgtgatctacagcatcagaaccaacggcgtgctgctgttcatccccagattcggcatcaagggcgccgcctacctgaagaacaaggacggcctggtgatcagctgcggccccgacagctgcagcgagtggaagcccggcagcctgcagagattccagaacaagatcaccagcaccaccaccgacggcgagagcgtgaccttccacctgttcgaccacgtgaccgtgagaatcagcatccaggccagcagatgccacagcgacaccatcagactggagatcatcagcaacaagccctacaagatccccaacaccgagctgatccaccagagcagccccctgctgaagagcgagctggtgaaggaggtgaccaagagcgtggaggaggcccagctggcccaggaggtgaaggtgaacatcatccaggaggagtaccaggagtacagacagaccaagggcagaagcctgtacaccctgctggaggagatcagagacctggccctgctggacgtgagcaacaactacggcatctag

SEQ ID NO: 55073 - DNA, 3763 bp, Artificial Sequence
  derived and/or modified sequence
attaattacccggtattagtattaatacggcggctccattcccacatggacctgggggggacaaacaaagtctcctaatcttggacagctgcgcccagcccttcttcacctgccgtccaggtatcatcctagtcttccctccgtctctgggatgggaaactcttgtctagtgatgtgactcattacgtgatcccagactggaaagttgttcaagattatcttgagatccttgagtttcctgagttgaagggaattattttcatgcagacagcttgtcaagctgtgcagcatcaaagaggcaggagacagtataacaaactgcgaaacctgctgaaggatgcgcgtcatgattgcattctctttgctaatgaattccagcaatgctgctatctgccacgggaaagaggagagtccatggagaagtggcagaccaggagcatatacaacgcagctgtttggtactatcatcactgccaggacaggatgccaattgttatggtgacagaagatgaagaggcaattcagcagtatggaagtgaaacagaaggagtattcgtgattactttcaagaattacctggacaatttctggcctgatttaaaagctgcccacgagctttgtgattctatccttcagtctcgacgggagagagagaatgagagtcaggagagccatgggaaggagtacccagaacatcttcccctggaagtgttagaagctgggattaaatctggacgctatatccagggaattctgaatgtcaacaaacacagagcccaaatagaagcttttgttcgacttcaaggagccagcagtaaagattcagatttagtcagtgacatcctaatccacgggatgaaggctcgaaaccgctcaattcatggagatgtggtagttgtggagctgcttcctaaaaatgaatggaaaggaagaaccgtagccctgtgtgagaatgactgtgacgacaaggcttcgggcgagtccccaagtgagcccatgcctacaggtcgagtggtgggcatacttcagaagaactggcgggattatgtggtgacatttccgtccaaagaagaggtccaatctcagggcaaaaatgctcagaaaatcctggttacaccttgggattacagaattcccaaaattcgaattagcactcagcaagcagaaaccctccaggacttcagggtggtcgtgcgcatcgattcctgggagtcaacatctgtgtatccaaatggacattttgtgcgtgttttaggaagaatcggagatctggaaggggaaattgcaaccatcctggtggaaaacagtatttcagttattcctttctcagaagctcagatgtgtgagatgccagtaaacacaccagaaagtccctggaaggtgagtcctgaagaggaacaaaaacgtaaagacttgaggaaaagccatctcgtattcagcattgaccccaaaggttgtgaagatgtggatgacacactctcagtcagaaccttaaataatggcaacctggaacttggggtccacatcgcagatgtaacacactttgtggcaccaaattcttacattgatattgaagctagaacaagggccaccacttattatctagcagatcgtcgctatgacatgctgccttccgtcctcagtgcagatttgtgttcccttctgggaggcgttgataggtatgctgtaagcatcatgtgggaactggataaagcctcttatgaaattaagaaagtgtggtatggcagaaccattattcgatcagcatacaaactgttctatgaagcagcccaagaactactggatggaaacttaagcgttgttgatgatattccagaattcaaagacttggatgagaagagcagacaagccaagctggaggagttggtgtgggcaattggaaagctgaccgacatagctcgccatgtcagagctaaacgagacggatgtggtgccctggaactggaaggggtagaggtttgcgtacagctagatgacaaaaagaacattcacgacctcatccccaagcagcccctggaagtccacgagacagtggctgaatgcatgatcctggccaaccactgggtcgccaaaaagatctgggagagcttccctcatcaggccttgctgcgccagcaccctcctccacaccaggagttcttttcagaactccgggaatgtgctaaagccaaaggcttcttcatagatacacggtccaataaaacactggctgattctctggataatgcgaacgacccccacgatcccattgtgaacaggctactgcgctccatggccacgcaggccatgtcgaatgctctgtacttctccaccggatcctgtgcggaggaggagttccatcattacggtcttgcattagataaatatacccactttacttctccaataagaagatattcagatattgtagtacaccgcttgttaatggcagccatttcaaaagataagaaaatggaaattaagggaaatctgttcagcaacaaagatcttgaggaattatgcagacatatcaacaacagaaaccaagcagcacagcattctcagaagcagtctactgagctcttccagtgcatgtacttcaaagacaaagaccctgccaccgaggagcgttgcatatctgacggagttatttattcaattagaacaaatggtgtgcttctatttataccaaggtttgggattaaaggtgctgcttatctaaaaaataaagatggtttagtcatctcatgtggcccagatagctgttctgaatggaaaccaggatcccttcaacgatttcaaaacaaaattacctctactacaacagatggggaatctgttacgttccatttgtttgaccatgtaaccgtaagaatatccatacaggcctcacgttgccattctgatacaatcagacttgaaataattagtaacaaaccatacaagataccaaatacagaacttattcatcagagttcccccttgctgaagagtgagttagtgaaagaagtaactaaatctgtggaagaagctcagcttgcccaagaagtcaaagtaaacatcattcaggaggaatatcaagaatatcgccaaacaaagggaaggagcctatacacacttctagaggagatacgggacctagctctcctggatgtttcaaacaattatggaatatgagaggctcttacttcactaagagctgtcatatgtgaatgttttacagtcttttcaaacttaacatttaatgtgtgtcactcagtgctctagtcgatcaggactgggtagctatttcgcatatatgtaaaatgttctcagccgggcacggtggctcacgcctgtaaccccagcactttgggaggctgaggcgggcggatcacgaggtcaggagattgagaccatcctggctaacacggtgaaacccagtctctactaaaaatacaaaaattagcccggcgtggtggcatgcgcctgtagtcccagctacttgggaggctgaagcaggagaattgcctgaacccaggaagaggaggttgcagtgagccgagatcgcaccactgcattccagcctgggcaacagagcgagactccatctcaaaaaaaaaaaaaaaaaaaaaaaaagttctctcattcattaaagttgcattaaataaagtataattaggtcactatggaaacagagttttcagtaatgagtggacagtaagtggtggctctgcagatggcccctttctaataagtttaataaacccgaaattactggtta

SEQ ID NO: 55074 - DNA, 3621 bp, Artificial Sequence
  derived and/or modified sequence
gcggccgccgggagacacgccgccatgctgcagaagcgggagaaggtgctgctgctgaggaccttccagggccgcacgctgcggatcgtgcgcgagcactacctgcggccctgcgtgccctgccacagcccgctctgcccgcagcccgccgcctgcagccacgatgggaaactcttgtctagtgatgtgactcattacgtgatcccagactggaaagttgttcaagattatcttgagatccttgagtttcctgagttgaagggaattattttcatgcagacagcttgtcaagctgtgcagcatcaaagaggcaggagacagtataacaaactgcgaaacctgctgaaggatgcgcgtcatgattgcattctctttgctaatgaattccagcaatgctgctatctgccacgggaaagaggagagtccatggagaagtggcagaccaggagcatatacaacgcagctgtttggtactatcatcactgccaggacaggatgccaattgttatggtgacagaagatgaagaggcaattcagcagtatggaagtgaaacagaaggagtattcgtgattactttcaagaattacctggacaatttctggcctgatttaaaagctgcccacgagctttgtgattctatccttcagtctcgacgggagagagagaatgagagtcaggagagccatgggaaggagtacccagaacatcttcccctggaagtgttagaagctgggattaaatctggacgctatatccagggaattctgaatgtcaacaaacacagagcccaaatagaagcttttgttcgacttcaaggagccagcagtaaagattcagatttagtcagtgacatcctaatccacgggatgaaggctcgaaaccgctcaattcatggagatgtggtagttgtggagctgcttcctaaaaatgaatggaaaggaagaaccgtagccctgtgtgagaatgactgtgacgacaaggcttcgggcgagtccccaagtgagcccatgcctacaggtcgagtggtgggcatacttcagaagaactggcgggattatgtggtgacatttccgtccaaagaagaggtccaatctcagggcaaaaatgctcagaaaatcctggttacaccttgggattacagaattcccaaaattcgaattagcactcagcaagcagaaaccctccaggacttcagggtggtcgtgcgcatcgattcctgggagtcaacatctgtgtatccaaatggacattttgtgcgtgttttaggaagaatcggagatctggaaggggaaattgcaaccatcctggtggaaaacagtatttcagttattcctttctcagaagctcagatgtgtgagatgccagtaaacacaccagaaagtccctggaaggtgagtcctgaagaggaacaaaaacgtaaagacttgaggaaaagccatctcgtattcagcattgaccccaaaggttgtgaagatgtggatgacacactctcagtcagaaccttaaataatggcaacctggaacttggggtccacatcgcagatgtaacacactttgtggcaccaaattcttacattgatattgaagctagaacaagggccaccacttattatctagcagatcgtcgctatgacatgctgccttccgtcctcagtgcagatttgtgttcccttctgggaggcgttgataggtatgctgtaagcatcatgtgggaactggataaagcctcttatgaaattaagaaagtgtggtatggcagaaccattattcgatcagcatacaaactgttctatgaagcagcccaagaactactggatggaaacttaagcgttgttgatgatattccagaattcaaagacttggatgagaagagcagacaagccaagctggaggagttggtgtgggcaattggaaagctgaccgacatagctcgccatgtcagagctaaacgagacggatgtggtgccctggaactggaaggggtagaggtttgcgtacagctagatgacaaaaagaacattcacgacctcatccccaagcagcccctggaagtccacgagacagtggctgaatgcatgatcctggccaaccactgggtcgccaaaaagatctgggagagcttccctcatcaggccttgctgcgccagcaccctcctccacaccaggagttcttttcagaactccgggaatgtgctaaagccaaaggcttcttcatagatacacggtccaataaaacactggctgattctctggataatgcgaacgacccccacgatcccattgtgaacaggctactgcgctccatggccacgcaggccatgtcgaatgctctgtacttctccaccggatcctgtgcggaggaggagttccatcattacggtcttgcattagataaatatacccactttacttctccaataagaagatattcagatattgtagtacaccgcttgttaatggcagccatttcaaaagataagaaaatggaaattaagggaaatctgttcagcaacaaagatcttgaggaattatgcagacatatcaacaacagaaaccaagcagcacagcattctcagaagcagtctactgagctcttccagtgcatgtacttcaaagacaaagaccctgccaccgaggagcgttgcatatctgacggagttatttattcaattagaacaaatggtgtgcttctatttataccaaggtttgggattaaaggtgctgcttatctaaaaaataaagatggtttagtcatctcatgtggcccagatagctgttctgaatggaaaccaggatcccttcaacgatttcaaaacaaaattacctctactacaacagatggggaatctgttacgttccatttgtttgaccatgtaaccgtaagaatatccatacaggcctcacgttgccattctgatacaatcagacttgaaataattagtaacaaaccatacaagataccaaatacagaacttattcatcagagttcccccttgctgaagagtgagttagtgaaagaagtaactaaatctgtggaagaagctcagcttgcccaagaagtcaaagtaaacatcattcaggaggaatatcaagaatatcgccaaacaaagggaaggagcctatacacacttctagaggagatacgggacctagctctcctggatgtttcaaacaattatggaatatgagaggctcttacttcactaagagctgtcatatgtgaatgttttacagtcttttcaaacttaacatttaatgtgtgtcactcagtgctctagtcgatcaggactgggtagctatttcgcatatatgtaaaatgttctcagccgggcacggtggctcacgcctgtaaccccagcactttgggaggctgaggcgggcggatcacgaggtcaggagattgagaccatcctggctaacacggtgaaacccagtctctactaaaaatacaaaaattagcccggcgtggtggcatgcgcctgtagtcccagctacttgggaggctgaagcaggagaattgcctgaacccaggaagaggaggttgcagtgagccgagatcgcaccactgcattccagcctgggcaacagagcgagactccatctcaaaaaaaaaaaaaaaa

SEQ ID NO: 55075 - DNA, 873 bp, Artificial Sequence
  derived and/or modified sequence
cagggccgcacgctgcggatcgtgcgcgagcactacctgcggccctgcgtgccctgccacagcccgctctgcccgcagcccgccgcctgcagccacgatgggaaactcttgtctagtgatgtgactcattacgtgatcccagactggaaagttgttcaagattatcttgagatccttgagtttcctgagttgaagggaattattttcatgcagacagcttgtcaagctgtgcagcatcaaagaggcaggagcaagagatagcagtggatgagtacctgctttgttagagttatttttctcctccgtgtcacagacagtataacaaactgcgaaacctgctgaaggatgcgcgtcatgattgcattctctttgctaatgaattccagcaatgctgctatctgccacgggaaagaggagagtccatggagaagtggcagaccaggagcatatacaacgcagctgtttggtactatcatcactgccaggacaggatgccaattgttatggtgacagaagatgaagaggcaattcagcagtatggaagtgaaacagaaggagtattcgtgattactttcaagaattacctggacaatttctggcctgatttaaaagctgcccacgagctttgtgattctatccttcagtctcgacgggagagagagaatgagagtcaggagagccatgggaaggagtacccagaacatcttcccctggaagtgttagaagctgggattaaatctggacgctatatccagggaattctgaatgtcaacaaacacagagcccaaatagaagcttttgttcgacttcaaggagccagcagtaaagattcagatttagtcagtgacatcctaatccacgggatgaaggctc

SEQ ID NO: 55076 - protein, 184 aa, Artificial Sequence
  derived and/or modified sequence
MCGTGGTDSKTRRPPHRASFLKRLESKPLKMADDLDFETGDAGASATFPMQCSALRKNGFVVLKGRPCKIVEMSTSKTGKHGHAKVHLVGIDIFTGKKYEDICPSTHNMDVPNIKRNDFQLIGIQDGYLSLLQDSGEVREDLRLPEGDLGKEIEQKYDCGEEILITVLSAMTEEAAVAIKAMAK

SEQ ID NO: 55077 - DNA, 3832 bp, Artificial Sequence
  derived and/or modified sequence
ggggtcgagtcagtgccgtttgcgccagttggaatcgaagcctcttaaaatggcagatgatttggacttcgagacaggagatgcaggggcctcagccaccttcccaatgcagtgctcagcattacgtaagaatggctttgtggtgctcaaaggctggccatgtaagatcgtggagatgtctgcttcgaagactggcaagcacggccacgccaaggtccatctggttggtattgacatctttactgggaagaaatatgaagatatctgcccgtcaactcataatatggatgtccccaacatcaaaaggaatgacttccagctgattggcatccaggatgggtacctatcactgctccaggacagcggggaggtaccagaggaccttcgtctccctgagggagaccttggcaaggagattgagcagaagtacgactgtggagaagagatcctgatcacggtgctgtctgccatgacagaggaggcagctgttgcaatcaaggccatggcaaaataactggctcccaaggtggcagtggtggcagcagtgatcctccgaacctgcagaggccccctcccccagcctggcctggctctggcctggtcctaggttggactcctcctacacaatttatttgacgttttattttggttttccccaccccctcaatctgtcagggagcccctgcccttcacctagctcccttggccaggagcgagcgaagccatggccttggtgaagctgccctcctcttctcccctcacactacagccctggtgggggagaagggggtgggtgctgcttgtggtttagtcttttttttttttttaaattcaatctggaatcagaaagcggtggattctggcaaatggtccttgtgccctccccactcatccttggtctggtcccctgttgcccatagccctttaccctgagcaccacccaacagactggggaccagccccctcgcctgcctgtgtctctccccaaacccctttagatggggagggaagaagaggagaggggaggggacctgccccctcctcaggcatctgggaagggcctgcccccatgggctttacccttccctgcgggctctctccccgacacatttgttaaaatcaaacctgaataaaactacaagtttaatatgaaaaaaaaaaaaaaagaaagaaagacgtgtaaaatgccaagaactctaggaaacagggacaaaaacacttcaaagagaaagttcatgcacttgtttctgaccacccagggcacccttcagcacacgctgtctggagtggcctgaagcaaggagtgtcttgtgaggtgcagaggatgcaatgggagcagggtcctgtccccaccctaaaggagttcacagtttaacgcaaatgagaagccagtgaggacatcactactcctgctgtgaacttgggaactagaaacacaaaacctgagtctggagggaagctaaggaagcattctgctctggagtagacatgagtgcgtgtgaagcttctgatctcccatgagagcaatggggacatggggcagaatctaaaacccatgactgaaagcaccaaattgctaaaatggcaataaagagacatgaggccaagatggagaagaaggaacccaggacgagggtcagcctcacatttggggctcatttccctcagtttcctcactgaatttcagaagggactaactgagatgcaaagaagcagagcagcttttgcaccatgtggaggactagatggaaaacaagtagactgagggtctgctagtgaaggtgacccctactgaagtccactggctttggttgggacccagaagagtcacacgccaggaatagaggtggacaggaaacaccctgacttttgtagggactgaacctcactgataacctcaattgcggatggtatggagggtgtctaggtgtgctaggacccctgcccattccccagaaatagactcccatcttttctacagcaagataacgtgctagtaggcctcaattcattgctaaatatttttaacgagtgtcttacatttagccaaaaagactagtcatgtggcaggaaaaatacaatgtcatatgaccaaaagctaaaagactgtgaaaatgaatccagaggtgacccaagcattgaatttaacaatgccagtacctggacctccgcttgcccctaaaacattacaatcaagaatgtaggaagggaaaggaaacacgaagattaatcaagcaggaaggacaagctcagttttgcacccactgaatttgccacaaatattgtggaaaatattctcggggacattgcagttgtctactttggttggcacatggttcatacaacagtgtttgtgtcagtgaacatcttactcttcctcggcagtctttctttgcccagagatttcgcaatgactgttgaccttcatcatcaccttttggactttggcttgcactttagcttctgtagatctccatgatgtaaagaagtattttaggtccattttaattcctgcaaaggataaaatccttctatttgtgtgcatataagtggacctgagcccttggttagggtgtagagaggagaaggggagaaacctgagggccagaagctgttctttcccttaaaagggcaaactcatttccacactatggggactctgacagatagcataccttcctgtctatggctattggacctgcaggctttcccctgtaaatccgtgttctgtcattgacattttgtgactgtaagacagacttgagataagacatctagaaaacaataattgaacaatgatgtgaatatatttcacacaactgaactgtacatttcaacaaggttaagatggtaattatcacgttatacattttttaccgcaggttaaaatgtttcacaggttgaaaggaaagcaactaccttcagttctctgagttcaagaatttgtaacatttcaccccctgctccttcctgatcttctgtggagcatcttttttccatccatgctctactcagagcccactttcccttccctgacaccagcttcactgaggctggttggaacctaacacaaaacattctcagtaatgactgaattcccacaaagaattccatatagactgcatatgagttgaatcttctaagacatgaaatatttgttctcttcttggctaatatgcaatgcaaatcctgttgcagatgtacgtcatatacctctgaaattcctgatgtattcaatgaaataacatctttaaagttctgtgtagaatgttttttttctgatttcttcacatacgatagaaaaaaaaacccaaaaaaacatgtactaggatttcaatagaagcaatgggtgatctaaaaagatgaaagagcaaccgcatgcgccctacagctaccgctagattttatggggaaagcagctggcccagtttgcagctaggagaaatgtcaaacacatgaagaaatgagaagcaaagaaaaaccatgaggcatgaacatttcatggcaatcacgatgtcctggtttgtgagataatgggatagaggagtagaaaacaaggagaaagatgagaaggtacaaagtggttcaagtcaaacagctcaactgaacttttcttaatggaatatttaaaaagtggtacattaaaaaacttcccccagttcacatcaaaaattctctcttcaggactaagttgggtagagactgttcaatgtgcctagatatcttcagaacttatatattttctgttttctacgtatgttgaagggcagtgccaaatgatgtgtaattatctaggttgtaaaaataaaacatactcccccttcccttgagg

SEQ ID NO: 55078 - DNA, 1256 bp, Artificial Sequence
  derived and/or modified sequence
accacactagcgcgctagaagagtggggcggaaagacatctcccgcgcatgtgtggaactggggggactgattccaagacaaggcgcccaccccacagagcaagttttctgaaacgtttggaatcgaagcctcttaaaatggcagatgacttggacttcgagacaggagatgcaggggcctcagccaccttcccaatgcagtgctcagcattacgtaagaatggctttgtggtgctcaaaggccggccatgtaagatcgtcgagatgtctacttcgaagactggcaagcacggccacgccaaggtccatctggttggtattgacatctttactgggaagaaatatgaagatatctgcccgtcaactcataatatggatgtccccaacatcaaaaggaatgacttccagctgattggcatccaggatgggtacctatcactgctccaggacagcggggaggtacgagaggaccttcgtctccctgagggagaccttggcaaggagattgagcagaagtacgactgtggagaagagatcctgatcacggtgctgtctgccatgacagaggaggcagctgttgcaatcaaggccatggcaaaataactggctcccagggtggcggtggtggcagcagtgatcctctgaacctgcagaggccccctccccgagcctggcctggctctggcccggtcctaagctggactcctcctacacaatttatttgacgttttattttggttttccccaccccctcaatctgtcggggagcccctgcccttcacctagctcccttggccaggagcgagcgaagctgtggccttggtgaagctgccctcctcttctcccctcacactacagccctggtgggggagaagggggtgggtgctgcttgtggtttagtcttttttttttttttttttttaattcaatctggaatcagaaagcggtggattctggcaaatggtccttgtgccctccccactcatccctggtctggtcccctgttgcctatagccctttaccctgagcaccaccccaacagactggggaccagccccctcgcctgcctgtgtctctccccaaacccctttagatggggagggaagaggaggagaggggaggggacctgccccctcctcaggcatctgggagggccctgcccccatgggctttacccttccctgcgggctctctccccgacacatttgttaaaatcaaacctgaataaaactacaagtttaatatgaagcccccaa

SEQ ID NO: 55079 - DNA, 1519 bp, Artificial Sequence
  derived and/or modified sequence
gggagggaagatgaggttgaagagattaaaaaaccgggtgcgcctgcgcgttgcagattagttgaaaacgctcagggtttgtgaggggcggggtcacgtatgcgcgtcattggacgggtcggtgggagggagggtggagatgggtagggtgtgtgcgcttgcgcagtgcgggggtggagggcggaggagatagatagcacgcttgcgcggctgtcatagggctgcttggttggtcagtggggagtcggcgcctgcgtactaagacccgtgtgcagcagcggcggcggcggtagaggcggcggcggcggcggcagcgggctcggaggcagcggttgggctcgcggcgagcggacggggtcgagtcagtgcgttcgcgcgagttggaatcgaagcctcttaaaatggcagatgacttggacttcgagacaggagatgcaggggcctcagccaccttcccaatgcagtgctcagcattacgtaagaatggctttgtggtgctcaaaggccggccatgtaagatcgtcgagatgtctacttcgaagactggcaagcacggccacgccaaggtccatctggttggtattgacatctttactgggaagaaatatgaagatatctgcccgtcaactcataatatggatgtccccaacatcaaaaggaatgacttccagctgattggcatccaggatgggtacctatcactgctccaggacagcggggaggtacgagaggaccttcgtctccctgagggagaccttggcaaggagattgagcagaagtacgactgtggagaagagatcctgatcacggtgctgtctgccatgacagaggaggcagctgttgcaatcaaggccatggcaaaataactggctcccagggtggcggtggtggcagcagtgatcctctgaacctgcagaggccccctccccgagcctggcctggctctggcccggtcctaagctggactcctcctacacaatttatttgacgttttattttggttttccccaccccctcaatctgtcggggagcccctgcccttcacctagctcccttggccaggagcgagcgaagctgtggccttggtgaagctgccctcctcttctcccctcacactacagccctggtgggggagaagggggtgggtgctgcttgtggtttagtcttttttttttttttttttttaattcaatctggaatcagaaagcggtggattctggcaaatggtccttgtgccctccccactcatccctggtctggtcccctgttgcctatagccctttaccctgagcaccaccccaacagactggggaccagccccctcgcctgcctgtgtctctccccaaacccctttagatggggagggaagaggaggagaggggaggggacctgccccctcctcaggcatctgggagggccctgcccccatgggctttacccttccctgcgggctctctccccgacacatttgttaaaatcaaacctgaataaaactacaagtttaatatgaagcccccaa

SEQ ID NO: 55080 - DNA, 1340 bp, Artificial Sequence
  derived and/or modified sequence
gagccggcagcccctagcgcggggagctagtcctcgcgggggttccgagggggcctgagattttgaggagtggaagccggaggctcgggtcctaatcaccccggagggcctgctgcaggcatatgttagcgcttcccaacctcaagggccccaggagctttcctgaaaaaccctcctgtgaagtgtggcggtcagccaggtttggaatcgaagcctcttaaaatggcagatgacttggacttcgagacaggagatgcaggggcctcagccaccttcccaatgcagtgctcagcattacgtaagaatggctttgtggtgctcaaaggccggccatgtaagatcgtcgagatgtctacttcgaagactggcaagcacggccacgccaaggtccatctggttggtattgacatctttactgggaagaaatatgaagatatctgcccgtcaactcataatatggatgtccccaacatcaaaaggaatgacttccagctgattggcatccaggatgggtacctatcactgctccaggacagcggggaggtacgagaggaccttcgtctccctgagggagaccttggcaaggagattgagcagaagtacgactgtggagaagagatcctgatcacggtgctgtctgccatgacagaggaggcagctgttgcaatcaaggccatggcaaaataactggctcccagggtggcggtggtggcagcagtgatcctctgaacctgcagaggccccctccccgagcctggcctggctctggcccggtcctaagctggactcctcctacacaatttatttgacgttttattttggttttccccaccccctcaatctgtcggggagcccctgcccttcacctagctcccttggccaggagcgagcgaagctgtggccttggtgaagctgccctcctcttctcccctcacactacagccctggtgggggagaagggggtgggtgctgcttgtggtttagtcttttttttttttttttttttaattcaatctggaatcagaaagcggtggattctggcaaatggtccttgtgccctccccactcatccctggtctggtcccctgttgcctatagccctttaccctgagcaccaccccaacagactggggaccagccccctcgcctgcctgtgtctctccccaaacccctttagatggggagggaagaggaggagaggggaggggacctgccccctcctcaggcatctgggagggccctgcccccatgggctttacccttccctgcgggctctctccccgacacatttgttaaaatcaaacctgaataaaactacaagtttaatatgaagcccccaa

SEQ ID NO: 55081 - DNA, 1284 bp, Artificial Sequence
  derived and/or modified sequence
agggcgggggacggcgagccgcgaggcagccacgcgggagaggccgccaggcggccacgccggggcgagggccaggggccagatcggcccaccggggcaagggtacctgggccgttgaggacccggctcagcgcggccacgtgagttggaatcgaagcctcttaaaatggcagatgacttggacttcgagacaggagatgcaggggcctcagccaccttcccaatgcagtgctcagcattacgtaagaatggctttgtggtgctcaaaggccggccatgtaagatcgtcgagatgtctacttcgaagactggcaagcacggccacgccaaggtccatctggttggtattgacatctttactgggaagaaatatgaagatatctgcccgtcaactcataatatggatgtccccaacatcaaaaggaatgacttccagctgattggcatccaggatgggtacctatcactgctccaggacagcggggaggtacgagaggaccttcgtctccctgagggagaccttggcaaggagattgagcagaagtacgactgtggagaagagatcctgatcacggtgctgtctgccatgacagaggaggcagctgttgcaatcaaggccatggcaaaataactggctcccagggtggcggtggtggcagcagtgatcctctgaacctgcagaggccccctccccgagcctggcctggctctggcccggtcctaagctggactcctcctacacaatttatttgacgttttattttggttttccccaccccctcaatctgtcggggagcccctgcccttcacctagctcccttggccaggagcgagcgaagctgtggccttggtgaagctgccctcctcttctcccctcacactacagccctggtgggggagaagggggtgggtgctgcttgtggtttagtcttttttttttttttttttttaattcaatctggaatcagaaagcggtggattctggcaaatggtccttgtgccctccccactcatccctggtctggtcccctgttgcctatagccctttaccctgagcaccaccccaacagactggggaccagccccctcgcctgcctgtgtctctccccaaacccctttagatggggagggaagaggaggagaggggaggggacctgccccctcctcaggcatctgggagggccctgcccccatgggctttacccttccctgcgggctctctccccgacacatttgttaaaatcaaacctgaataaaactacaagtttaatatgaagcccccaa

SEQ ID NO: 55082 - DNA, 555 bp, Artificial Sequence
  derived and/or modified sequence
atgtgtgggactggaggaacggacagtaagacgagacgccctccccacagagcttcttttctgaagaggctggagagcaaacccctgaaaatggcggatgatctggactttgagaccggagacgctggagcatccgctaccttccctatgcaatgtagcgccctgcgaaagaatggtttcgtggtgttgaaggggagaccatgcaaaattgttgagatgtctactagcaagaccgggaaacatgggcacgccaaggtgcacctcgtcgggatcgatatatttacagggaagaagtacgaggacatctgcccctcaactcacaatatggacgtgccgaatattaaacgtaatgattttcagcttattggaatccaagacggctacctctctcttttgcaggattctggagaggtaagagaggacttgcgactgcctgagggagatttagggaaagagattgagcaaaagtatgattgtggagaagagatcttaataaccgtactgagcgccatgaccgaggaggctgccgtcgccattaaagccatggctaagtag

SEQ ID NO: 55083 - DNA, 555 bp, Artificial Sequence
  derived and/or modified sequence
atgtgtggcaccggcggcacagacagcaagacccggcggcccccccaccgggccagcttcctgaagaggctggagagcaagcccctgaagatggctgatgacctggactttgaaacaggagatgctggggccagcgccaccttccccatgcagtgcagcgccctgaggaagaatggatttgtggtgctgaagggccggccctgcaagatcgtggagatgagcaccagcaagacaggcaagcacggccacgccaaggtgcacctggtgggcatcgacatcttcaccgggaagaagtatgaggacatctgccccagcacccacaacatggatgtgcccaacatcaagagaaatgacttccagctgattggcatccaggacggctacctgagcctgctgcaggacagcggggaggtgcgggaggacctgcggctgcctgagggggacctgggcaaggagattgagcagaagtatgactgtggggaggagatcctgatcaccgtgctgagcgccatgacagaggaggccgctgtggccatcaaggccatggccaagtag

SEQ ID NO: 55084 - DNA, 555 bp, Artificial Sequence
  derived and/or modified sequence
atgtgcggcaccggcggcaccgacagcaagacccggcggcccccccaccgcgcctcgttcctcaaacgactagaaagcaagcctttgaagatggctgacgatctcgatttcgaaaccggcgacgctggggcctctgccacgttccctatgcagtgttctgctctgcgaaagaatggtttcgttgtcctcaaaggcaggccctgcaaaattgtcgagatgtccacaagcaaaaccggaaagcatggccatgccaaagtgcacttggttggaattgacatcttcacagggaagaagtacgaggacatctgcccctcaacgcacaatatggacgtcccaaacattaagcgcaacgacttccaattgattgggatacaagatgggtatctctccctcctccaagactcgggtgaggtgcgcgaggatctgcgtttgccagagggggacctgggcaaggagatcgaacagaaatacgattgcggcgaagagattctaattactgtgctctctgcaatgaccgaagaagccgctgtagctatcaaggctatggcaaagtag

SEQ ID NO: 55085 - DNA, 555 bp, Artificial Sequence
  derived and/or modified sequence
atgtgtgggactggaggtactgattccaaaacaagacgaccccctcacagagcaagttttctaaagcggctggaatcgaagccactcaagatggctgatgatctggactttgaaacgggcgacgccggtgcctctgcaactttcccaatgcagtgtagcgcactccgtaagaatggtttcgtggtgttgaaagggagaccctgcaagattgttgagatgagtacaagcaaaaccgggaagcacggtcatgcaaaagtgcatcttgttgggatagatatcttcactgggaagaagtatgaagatatatgtccatcgactcacaacatggatgtcccaaatataaagcggaatgatttccaattgataggtatccaggacgggtacctctccctgttacaggactcaggagaggtgcgcgaggatcttcggctgcctgagggggatttgggcaaggagatcgagcagaagtacgactgcggggaggagattttgatcactgtgctctccgccatgacggaggaggccgcagtggccattaaggcgatggccaagtag

SEQ ID NO: 55086 - DNA, 555 bp, Artificial Sequence
  derived and/or modified sequence
atgtgcggcaccggcggcaccgacagcaagaccagaagacccccccacagagccagcttcctgaagagactggagagcaagcccctgaagatggccgacgacctggacttcgagaccggcgacgccggcgccagcgccaccttccccatgcagtgcagcgccctgagaaagaacggcttcgtggtgctgaagggcagaccctgcaagatcgtggagatgagcaccagcaagaccggcaagcacggccacgccaaggtgcacctggtgggcatcgacatcttcaccggcaagaagtacgaggacatctgccccagcacccacaacatggacgtgcccaacatcaagagaaacgacttccagctgatcggcatccaggacggctacctgagcctgctgcaggacagcggcgaggtgagagaggacctgagactgcccgagggcgacctgggcaaggagatcgagcagaagtacgactgcggcgaggagatcctgatcaccgtgctgagcgccatgaccgaggaggccgccgtggccatcaaggccatggccaagtag

SEQ ID NO: 55087 - protein, 318 aa, Artificial Sequence
  derived and/or modified sequence
MAGRSLTSKAEPTAGAVDRAEKAGGQDTSSQKIEDLMEMVQKLQKVGSLEPRVEVLINRINEVQQAKKKANKDLGEARTICEALQKELDSLHGEKVHLKEILSKKQETLRILRLHCQEKESEAHRKHTMLQECKERISALNLQIEEEKNKQRQLRLAFEEQLEDLMGQHKDLWDFHMPERLAKEICALDSSKEQLLKEEKLVKATLEDVKHQLCSLCGAEGPSTLDEGLFLRSQEAAATVQLFQEEHRKAEELLAAAAQRHQQLQQKCQQQQQKRQRLKEELEKHGMQVPAQAQSTQEEEAGPGDVAPRPGRPVTWWS

SEQ ID NO: 55088 - protein, 282 aa, Artificial Sequence
  derived and/or modified sequence
MEMVQKLQKVGSLEPRVEVLINRINEVQQAKKKANKDLGEARTICEALQKELDSLHGEKVHLKEILSKKQETLRILRLHCQEKESEAHRKHTMLQECKERISALNLQIEEEKNKQRQLRLAFEEQLEDLMGQHKDLWDFHMPERLAKEICALDSSKEQLLKEEKLVKATLEDVKHQLCSLCGAEGPSTLDEGLFLRSQEAAATVQLFQEEHRKAEELLAAAAQRHQQLQQKCQQQQQKRQRLKEELEKHGMQVPAQAQSTQEEEAGPGDVAPRPGRPVTWWS

SEQ ID NO: 55089 - DNA, 957 bp, Artificial Sequence
  derived and/or modified sequence
atggccggcagaagcctgaccagcaaggccgagcccaccgccggcgccgtggacagagccgagaaggccggcggccaggacaccagcagccagaagatcgaggacctgatggagatggtgcagaagctgcagaaggtgggcagcctggagcccagagtggaggtgctgatcaacagaatcaacgaggtgcagcaggccaagaagaaggccaacaaggacctgggcgaggccagaaccatctgcgaggccctgcagaaggagctggacagcctgcacggcgagaaggtgcacctgaaggagatcctgagcaagaagcaggagaccctgagaatcctgagactgcactgccaggagaaggagagcgaggcccacagaaagcacaccatgctgcaggagtgcaaggagagaatcagcgccctgaacctgcagatcgaggaggagaagaacaagcagagacagctgagactggccttcgaggagcagctggaggacctgatgggccagcacaaggacctgtgggacttccacatgcccgagagactggccaaggagatctgcgccctggacagcagcaaggagcagctgctgaaggaggagaagctggtgaaggccaccctggaggacgtgaagcaccagctgtgcagcctgtgcggcgccgagggccccagcaccctggacgagggcctgttcctgagaagccaggaggccgccgccaccgtgcagctgttccaggaggagcacagaaaggccgaggagctgctggccgccgccgcccagagacaccagcagctgcagcagaagtgccagcagcagcagcagaagagacagagactgaaggaggagctggagaagcacggcatgcaggtgcccgcccaggcccagagcacccaggaggaggaggccggccccggcgacgtggcccccagacccggcagacccgtgacctggtggagctag

SEQ ID NO: 55090 - DNA, 957 bp, Artificial Sequence
  derived and/or modified sequence
atggccggcaggtctctgactagcaaagccgagcctaccgctggtgcagtggacagagcagagaaggcaggcggccaagatacatcctcccagaagatagaagatctgatggaaatggtgcagaagctgcagaaagtgggaagtctggaaccacgggtggaagtgctgatcaaccggattaacgaggtgcaacaagctaaaaaaaaagcaaataaggacctgggagaagctcgaactatctgcgaggccctgcaaaaggagctggacagtttgcatggcgaaaaggttcacttgaaggaaattttatctaaaaagcaggagactctgcgcattctgaggctgcactgccaggagaaagagtcagaggctcaccgcaaacatacgatgttgcaggagtgcaaggagaggatttctgcgttaaacttgcaaattgaagaagaaaaaaacaaacagcgacagttacgtttggctttcgaagaacagctcgaggacctcatgggtcagcataaggacctgtgggactttcatatgccggaaaggctagcaaaggaaatttgtgccctggattcctcaaaggaacaacttcttaaggaagagaagctggtcaaggctacattggaagacgtcaagcatcagctctgctctctctgcggggcagaaggcccttccactctggatgaaggcctgttcttgcggtctcaggaggctgcggccacggtacagctgtttcaggaggagcataggaaggccgaggagttgctcgcggcggcggcccagcgccaccagcagctccagcaaaagtgtcagcagcagcagcagaaaagacagcgactgaaagaggagctggaaaagcacggaatgcaagtgccagcccaggctcagagtacacaggaagaagaggcgggacccggtgacgtggccccacgacccgggcgaccagtgacatggtggagctag

SEQ ID NO: 55091 - DNA, 957 bp, Artificial Sequence
  derived and/or modified sequence
atggccggccgcagcctgaccagcaaggccgagcccacagctggagctgtggacagagctgagaaggccggcggccaggacaccagcagccagaagattgaggacctgatggagatggtgcagaagctgcagaaggtgggcagcctggagccccgggtggaggtgctgatcaaccgcatcaatgaggtgcagcaggccaagaagaaggccaacaaggacctgggggaggcccggaccatctgtgaggccctgcagaaggagctggacagcctgcacggggagaaggtgcacctgaaggagatcctgagcaagaagcaggagaccctgcgcatcctgcggctgcactgccaggagaaggagagcgaggcccacaggaagcacaccatgctgcaggagtgcaaggagcgcatcagcgccctgaacctgcagatcgaggaggagaagaacaagcagaggcagctgcggctggcctttgaggagcagctggaggacctgatgggccagcacaaggacctgtgggacttccacatgcctgagcggctggccaaggagatctgtgccctggacagcagcaaggagcagctgctgaaggaggagaagctggtgaaggccaccctggaggatgtgaagcaccagctgtgcagcctgtgtggggctgagggccccagcaccctggatgagggcctcttcctgcggagccaggaggccgccgccaccgtgcagctgttccaggaggagcacaggaaggccgaggagctgctggccgctgctgcccagaggcaccagcagctgcagcagaagtgccagcagcagcagcagaagaggcagaggctgaaggaggagctggagaagcacggcatgcaggtgcctgcccaggcccagagcacccaggaggaggaggccggccctggagatgtggccccccggcccggccggcctgtgacctggtggagctag

SEQ ID NO: 55092 - DNA, 957 bp, Artificial Sequence
  derived and/or modified sequence
atggccggccggagcctgaccagcaaggccgagcccaccgccggcgccgtagatcgcgcggagaaagccggcggccaggatacttcatcacagaagatcgaggacctgatggagatggtccaaaagctccagaaggtaggaagtctggagcccagggtggaggtactgattaaccggatcaacgaggtgcagcaggccaaaaaaaaggccaacaaagatctgggcgaggcaagaaccatctgcgaggctctgcaaaaggagctggactcgctgcacggcgaaaaagtgcaccttaaggagattttgtcaaagaagcaggagactctgcgcatcctgcggctgcattgtcaagagaaagagtctgaggcccacagaaaacacacaatgttgcaggaatgcaaggagaggatctccgcattaaaccttcagatcgaggaggaaaaaaacaagcagcggcagctccggctggcatttgaagagcagctggaagacctgatgggccagcacaaagacctgtgggactttcacatgcccgaacgcctggccaaagagatatgcgccctggactcatctaaagagcagctcctcaaggaagagaaactggtgaaggccacactcgaagatgttaaacaccagctctgctcattgtgcggtgcggaagggcccagcaccctcgacgaaggcctgtttctcaggagccaggaggctgccgccacggtccagttgttccaagaagaacataggaaggccgaggagctgctggcggcagcagcacaacggcaccagcagctgcagcagaaatgtcagcaacaacagcagaaacggcagcgcttaaaagaagagctggaaaagcacggcatgcaggttcccgcgcaggctcaatccactcaggaggaagaggcaggccctggcgacgtggccccgaggccgggccgcccggttacctggtggagctag

SEQ ID NO: 55093 - DNA, 957 bp, Artificial Sequence
  derived and/or modified sequence
atggcgggacgctctctcacatccaaggcagaacccaccgccggtgcggtggatcgggcagagaaggccggaggacaggatacctcttcccagaagattgaggacctgatggagatggtacagaagctgcagaaagtcggtagcttagagcccagggtcgaagtactgattaaccgcatcaacgaagtgcagcaagcaaaaaagaaggccaacaaggacctcggggaggctaggactatatgcgaggcgcttcagaaggagttagactcactgcacggggaaaaggttcacctaaaggaaatcttatctaaaaaacaagagacactgaggatccttaggttgcactgtcaggagaaagaaagtgaagcccatagaaaacatacaatgctacaggagtgcaaagagagaatcagcgctctgaatttgcaaatcgaagaggagaagaacaaacaacgccagctgcgactggctttcgaggagcagctggaggatcttatggggcagcacaaggacttgtgggactttcacatgccggagaggctcgccaaggagatctgcgcactcgactcaagcaaggagcagctgctgaaggaagagaaattagttaaggccacgctcgaggatgtgaaacatcagctgtgtagcctatgcggagccgaaggccctagcacgctagatgaggggttatttttgagaagccaagaggccgctgccacggtgcaactgttccaagaggaacaccggaaagctgaagagctgctggcagcagctgcacagcgacatcaacagctgcagcagaaatgccaacagcagcagcagaaaagacaaagactgaaagaggagctggaaaagcacggtatgcaagtccctgcccaggctcagagcacccaggaggaggaagctggccctggagatgtggccccaagaccgggaagacccgtcacatggtggagctag

SEQ ID NO: 55094 - DNA, 1452 bp, Artificial Sequence
  derived and/or modified sequence
gcattgcgcaggcgcgctgcctggagtcctgcccccagcggcggttgctccaatcaccactggaggctccctcccgaggcaccctcgctggcgagctgagaggaaatggcggggaggtccctgacatcgaaggccgagcccaccgcaggagccgtggacagggctgagaaggccggagggcaggacacgtcctcacagaaaattgaagacttgatggaaatggtgcaaaagctgcagaaagtgggaagcctagagccccgagttgaggtcctgattaaccggattaatgaggtccagcaagcaaaaaagaaagccaataaagacctaggagaggcccggaccatctgtgaggccctgcagaaggaactggactcgctgcatggagagaaagtacacctgaaggagatcttgagcaaaaaacaagagaccctgaggatcctccggctgcattgccaggaaaaggaaagtgaggcacacaggaagcacaccatgttgcaggagtgcaaggagagaatttctgccctgaacttgcagattgaagaagagaagaacaaacagagacagctgaggttggcattcgaggaacagctggaagatctgatgggccagcacaaggacctctgggacttccacatgccagagcggctggcaaaggagatttgtgccctggacagcagcaaggagcagctgctcaaggaagagaagctggtcaaggcgacactggaagacgtgaagcatcagctgtgctccctgtgtggggctgagggcccctccacccttgatgagggactctttctccgcagccaggaggctgcagccacagtgcagctgtttcaggaagagcacaggaaggctgaggagctcctagcagctgctgcccagcgccaccagcagctgcagcagaagtgccaacaacagcagcagaagcggcagaggctgaaggaagagctggaaaagcatggaatgcaagtccctgcccaagcccagagcacacaagaggaagaggctggcccaggagatgtggctcccagaccaggtagaccagtgacatggtggagttgaagagagaggctcactgcagagcactgtttccatggaaaaatggaacatggcaaagtgcagaaattcttcagtcagtccaggacagacgagttctctaagatgcagttaatcatacctgtcttaaacaaactggcaatatactatcaaacatgacttttaaatcaagtggaagttagaaaatatattgaactgagtggcaatgaagacaccacattttaaaactgtaattcagttaagcccacaattagaaggaactttagcttttattggttcaccacaattttttaagaaatcaaccaatgattgttcagttaatgaataaaaggcctttgacacagttcacctattcatgtgaaaaaaaaagactaataaatagtcagcttcccttag

SEQ ID NO: 55095 - DNA, 1377 bp, Artificial Sequence
  derived and/or modified sequence
gctcaggctggagaagggccgcgggacccggggaacgcggcctggaggacgaggaggactgggttcccggaggcaacaggaccggctcggcatctacagctactggcaggacacgtcctcacagaaaattgaagacttgatggaaatggtgcaaaagctgcagaaagtgggaagcctagagccccgagttgaggtcctgattaaccggattaatgaggtccagcaagcaaaaaagaaagccaataaagacctaggagaggcccggaccatctgtgaggccctgcagaaggaactggactcgctgcatggagagaaagtacacctgaaggagatcttgagcaaaaaacaagagaccctgaggatcctccggctgcattgccaggaaaaggaaagtgaggcacacaggaagcacaccatgttgcaggagtgcaaggagagaatttctgccctgaacttgcagattgaagaagagaagaacaaacagagacagctgaggttggcattcgaggaacagctggaagatctgatgggccagcacaaggacctctgggacttccacatgccagagcggctggcaaaggagatttgtgccctggacagcagcaaggagcagctgctcaaggaagagaagctggtcaaggcgacactggaagacgtgaagcatcagctgtgctccctgtgtggggctgagggcccctccacccttgatgagggactctttctccgcagccaggaggctgcagccacagtgcagctgtttcaggaagagcacaggaaggctgaggagctcctagcagctgctgcccagcgccaccagcagctgcagcagaagtgccaacaacagcagcagaagcggcagaggctgaaggaagagctggaaaagcatggaatgcaagtccctgcccaagcccagagcacacaagaggaagaggctggcccaggagatgtggctcccagaccaggtagaccagtgacatggtggagttgaagagagaggctcactgcagagcactgtttccatggaaaaatggaacatggcaaagtgcagaaattcttcagtcagtccaggacagacgagttctctaagatgcagttaatcatacctgtcttaaacaaactggcaatatactatcaaacatgacttttaaatcaagtggaagttagaaaatatattgaactgagtggcaatgaagacaccacattttaaaactgtaattcagttaagcccacaattagaaggaactttagcttttattggttcaccacaattttttaagaaatcaaccaatgattgttcagttaatgaataaaaggcctttgacacagttcacctattcatgtgaaaaaaaaagactaataaatagtcagcttccctta

SEQ ID NO: 55096 - DNA, 1375 bp, Artificial Sequence
  derived and/or modified sequence
gctccggctgaggggccgcgggacccggggaacgcggcctggaggacgaggaggactgggttcccggaggcaacaggaccggctcggcatctacagctactggcaggacacgtcctcacagaaaattgaagacttgatggaaatggtgcaaaagctgcagaaagtgggaagcctagagccccgagttgaggtcctgattaaccggattaatgaggtccagcaagcaaaaaagaaagccaataaagacctaggagaggcccggaccatctgtgaggccctgcagaaggaactggactcgctgcatggagagaaagtacacctgaaggagatcttgagcaaaaaacaagagaccctgaggatcctccggctgcattgccaggaaaaggaaagtgaggcacacaggaagcacaccatgttgcaggagtgcaaggagagaatttctgccctgaacttgcagattgaagaagagaagaacaaacagagacagctgaggttggcattcgaggaacagctggaagatctgatgggccagcacaaggacctctgggacttccacatgccagagcggctggcaaaggagatttgtgccctggacagcagcaaggagcagctgctcaaggaagagaagctggtcaaggcgacactggaagacgtgaagcatcagctgtgctccctgtgtggggctgagggcccctccacccttgatgagggactctttctccgcagccaggaggctgcagccacagtgcagctgtttcaggaagagcacaggaaggctgaggagctcctagcagctgctgcccagcgccaccagcagctgcagcagaagtgccaacaacagcagcagaagcggcagaggctgaaggaagagctggaaaagcatggaatgcaagtccctgcccaagcccagagcacacaagaggaagaggctggcccaggagatgtggctcccagaccaggtagaccagtgacatggtggagttgaagagagaggctcactgcagagcactgtttccatggaaaaatggaacatggcaaagtgcagaaattcttcagtcagtccaggacagacgagttctctaagatgcagttaatcatacctgtcttaaacaaactggcaatatactatcaaacatgacttttaaatcaagtggaagttagaaaatatattgaactgagtggcaatgaagacaccacattttaaaactgtaattcagttaagcccacaattagaaggaactttagcttttattggttcaccacaattttttaagaaatcaaccaatgattgttcagttaatgaataaaaggcctttgacacagttcacctattcatgtgaaaaaaaaagactaataaatagtcagcttcccttag

SEQ ID NO: 55097 - protein, 351 aa, Artificial Sequence
  derived and/or modified sequence
MAGRSLTSKAEPTAGAVDRAEKAGGQDTSSQKIEDLMEMVQKLQKVGSLEPRVEVLINRINEVQQAKKKANKDLGEARTICEALQKELDSLHGEKVHLKEILSKKQETLRILRLHCQEKESEAHRKHTMLQECKERISALNLQIEEEKNKQRQLRLAFEEQLEDLMGQHKDLWDFHMPERLAKEICALDSSKEQLLKEEKLVKATLEDVKHQLCSLCGAEGPSTLDEGLFLRSQEAAATVQLFQEEHRKAEELLAAAAQRHQQLQQKCQQQQQKRQRLKEELEKHGMQVPAQAQSTQEEEAGPGDVASPKPLKGERPGAAHQAGPDVLIGQEDTLHPDLSPRGFQEIKELF

SEQ ID NO: 55098 - DNA, 1056 bp, Artificial Sequence
  derived and/or modified sequence
atggccggcagaagcctgaccagcaaggccgagcccaccgccggcgccgtggacagagccgagaaggccggcggccaggacaccagcagccagaagatcgaggacctgatggagatggtgcagaagctgcagaaggtgggcagcctggagcccagagtggaggtgctgatcaacagaatcaacgaggtgcagcaggccaagaagaaggccaacaaggacctgggcgaggccagaaccatctgcgaggccctgcagaaggagctggacagcctgcacggcgagaaggtgcacctgaaggagatcctgagcaagaagcaggagaccctgagaatcctgagactgcactgccaggagaaggagagcgaggcccacagaaagcacaccatgctgcaggagtgcaaggagagaatcagcgccctgaacctgcagatcgaggaggagaagaacaagcagagacagctgagactggccttcgaggagcagctggaggacctgatgggccagcacaaggacctgtgggacttccacatgcccgagagactggccaaggagatctgcgccctggacagcagcaaggagcagctgctgaaggaggagaagctggtgaaggccaccctggaggacgtgaagcaccagctgtgcagcctgtgcggcgccgagggccccagcaccctggacgagggcctgttcctgagaagccaggaggccgccgccaccgtgcagctgttccaggaggagcacagaaaggccgaggagctgctggccgccgccgcccagagacaccagcagctgcagcagaagtgccagcagcagcagcagaagagacagagactgaaggaggagctggagaagcacggcatgcaggtgcccgcccaggcccagagcacccaggaggaggaggccggccccggcgacgtggccagccccaagcccctgaagggcgagagacccggcgccgcccaccaggccggccccgacgtgctgatcggccaggaggacaccctgcaccccgacctgagccccagaggcttccaggagatcaaggagctgttctag

SEQ ID NO: 55099 - DNA, 1056 bp, Artificial Sequence
  derived and/or modified sequence
atggcgggtcggagtctgacttctaaagccgaaccaaccgctggagccgtggaccgagctgaaaaggctggcggccaggatacgtcgtctcagaagatcgaggatctgatggagatggtccagaagctgcaaaaagtgggatctctggagccacgggttgaggttctaatcaaccggatcaacgaggtccagcaggccaagaagaaagcaaataaagatctcggtgaagcaaggaccatctgtgaggctctgcagaaagagctggatagcttacacggagaaaaggtgcacttgaaggagatcttaagcaagaagcaggagacactgcgaatcttgcgcctccactgccaggagaaggagtcagaagcacacagaaagcacacaatgctacaagagtgcaaagagcgcatctcagccctcaacctccagattgaagaagaaaaaaataaacagaggcagttgcgactcgcgttcgaggagcagctggaggatcttatgggtcagcacaaggatttgtgggactttcacatgcctgagcgactggctaaggagatttgtgccttggattcatccaaggagcaactgctgaaggaggaaaaactggtgaaggccacattggaggatgtaaagcatcagttgtgcagtctgtgtggtgcggagggcccatctacgttggatgaaggtcttttcctgcgtagccaggaggccgccgcaacagttcaattgtttcaagaggagcatcgcaaggcagaggagctgcttgccgccgctgcacaacggcaccagcaactgcagcagaaatgccaacaacagcagcaaaagcggcagcggcttaaagaggagctagagaaacacggaatgcaggttcccgctcaggcccagagcacccaggaggaggaagcaggtcccggggacgtcgcctcaccaaagcccctgaaaggagagaggcctggcgctgctcaccaagctggccctgacgtcctgatcggtcaggaggataccctccaccccgatctgtctccaagaggcttccaggaaatcaaagaactgttttag

SEQ ID NO: 55100 - DNA, 1056 bp, Artificial Sequence
  derived and/or modified sequence
atggccggccgcagcctgaccagcaaggccgagcccacagctggagctgtggacagagctgagaaggccggcggccaggacaccagcagccagaagattgaggacctgatggagatggtgcagaagctgcagaaggtgggcagcctggagccccgggtggaggtgctgatcaaccgcatcaatgaggtgcagcaggccaagaagaaggccaacaaggacctgggggaggcccggaccatctgtgaggccctgcagaaggagctggacagcctgcacggggagaaggtgcacctgaaggagatcctgagcaagaagcaggagaccctgcgcatcctgcggctgcactgccaggagaaggagagcgaggcccacaggaagcacaccatgctgcaggagtgcaaggagcgcatcagcgccctgaacctgcagatcgaggaggagaagaacaagcagaggcagctgcggctggcctttgaggagcagctggaggacctgatgggccagcacaaggacctgtgggacttccacatgcctgagcggctggccaaggagatctgtgccctggacagcagcaaggagcagctgctgaaggaggagaagctggtgaaggccaccctggaggatgtgaagcaccagctgtgcagcctgtgtggggctgagggccccagcaccctggatgagggcctcttcctgcggagccaggaggccgccgccaccgtgcagctgttccaggaggagcacaggaaggccgaggagctgctggccgctgctgcccagaggcaccagcagctgcagcagaagtgccagcagcagcagcagaagaggcagaggctgaaggaggagctggagaagcacggcatgcaggtgcctgcccaggcccagagcacccaggaggaggaggccggccctggagatgtggccagccccaagcccctgaagggggagaggcctggagctgcccaccaggccggcccagatgtgctgattggccaggaggacaccctgcacccagacctgagcccccggggcttccaggagatcaaggagctgttctag

SEQ ID NO: 55101 - DNA, 1056 bp, Artificial Sequence
  derived and/or modified sequence
atggccggccggagcctgaccagcaaggccgagcccaccgccggcgcagtggatagagcagagaaggccggaggacaggacacgagcagccaaaagatcgaggacctgatggagatggttcagaagctgcagaaggtgggcagtttggaacctcgcgtcgaggtgcttatcaacaggattaacgaggttcagcaggcaaaaaaaaaagccaacaaggacctgggggaggctcggactatctgtgaagcactccaaaaggaactcgatagtctccacggagagaaagtgcacttgaaagagatcttatcaaagaaacaggagaccctgagaatcctgagacttcattgccaggaaaaagagtcggaagctcaccggaaacatactatgctccaagagtgcaaagaacggatttcggcactcaacctccaaatagaagaagagaaaaataaacagaggcagctccgcctcgctttcgaggagcaactcgaggacctgatgggacaacataaggatctttgggattttcacatgccagagagactagctaaggaaatctgcgccctggatagtagcaaggagcagttactgaaggaggaaaaacttgtgaaagcgaccttagaggatgtgaaacatcagttatgcagcctgtgcggcgccgaaggcccgagcactctagacgaaggactgtttctgcgaagccaggaagccgcggccacagtacagctgtttcaggaggaacatcgaaaagctgaggagctgcttgcggctgcagcgcagcgtcatcagcaactgcagcagaaatgtcagcagcagcaacagaagcgacagcgtttaaaggaggagctggaaaaacacggcatgcaggttcccgctcaggcccagagtactcaggaggaggaagcaggtcccggggacgtcgcatccccaaagcctttgaagggagaacggcccggtgctgcccatcaggcaggcccggacgtgctgattgggcaggaggacacattgcatccagacttatccccgagaggctttcaggaaatcaaggaactgttctag

SEQ ID NO: 55102 - DNA, 1056 bp, Artificial Sequence
  derived and/or modified sequence
atggcgggaaggagtcttacgtccaaagccgaacctactgctggggcagtagacagggccgaaaaagcgggagggcaagacacatcatcccaaaagatagaagacctgatggagatggttcagaaactccagaaagtgggatctttagaaccgcgagttgaagtcctgatcaaccgcatcaatgaggttcagcaggccaaaaagaaggctaacaaagacttgggagaggccagaacaatttgtgaggccctgcagaaggaacttgattctttacacggtgaaaaagttcacctgaaggaaatccttagcaagaaacaggagacactccggatactgcggcttcactgtcaggagaaagagagtgaggcacacaggaagcacacaatgcttcaggaatgcaaagaaaggattagcgccctaaatcttcagatcgaggaagaaaaaaacaaacaacgtcaactgcgattggcttttgaagagcagctggaggaccttatgggccaacacaaagatctctgggatttccatatgcctgaacgtcttgcgaaagaaatatgcgctttggatagtagtaaggaacaactgctcaaggaagagaaactcgtgaaagctacactggaggatgtcaaacaccagctgtgttcactgtgtggtgccgagggcccttccaccttggacgaggggttgtttctccgcagtcaggaggctgcggctaccgttcaacttttccaggaggagcataggaaagctgaggaactgctggccgctgcagcccagagacaccaacaactccagcagaagtgtcaacagcagcagcagaagaggcagcgactgaaagaagagcttgaaaaacacggcatgcaagtgcctgcccaggcccagtctactcaggaagaggaggctggacctggagacgtggcaagcccgaagccccttaagggggagcgccctggcgctgcccaccaggccggacccgatgtcctgattggacaggaggatacattacacccagatctctctccgagaggattccaggagatcaaggaactcttttag

SEQ ID NO: 55103 - DNA, 1309 bp, Artificial Sequence
  derived and/or modified sequence
gcattgcgcaggcgcgctgcctggagtcctgcccccagcggcggttgctccaatcaccactggaggctccctcccgaggcaccctcgctggcgagctgagaggaaatggcggggaggtccctgacatcgaaggccgagcccaccgcaggagccgtggacagggctgagaaggccggagggcaggacacgtcctcacagaaaattgaagacttgatggaaatggtgcaaaagctgcagaaagtgggaagcctagagccccgagttgaggtcctgattaaccggattaatgaggtccagcaagcaaaaaagaaagccaataaagacctaggagaggcccggaccatctgtgaggccctgcagaaggaactggactcgctgcatggagagaaagtacacctgaaggagatcttgagcaaaaaacaagagaccctgaggatcctccggctgcattgccaggaaaaggaaagtgaggcacacaggaagcacaccatgttgcaggagtgcaaggagagaatttctgccctgaacttgcagattgaagaagagaagaacaaacagagacagctgaggttggcattcgaggaacagctggaagatctgatgggccagcacaaggacctctgggacttccacatgccagagcggctggcaaaggagatttgtgccctggacagcagcaaggagcagctgctcaaggaagagaagctggtcaaggcgacactggaagacgtgaagcatcagctgtgctccctgtgtggggctgagggcccctccacccttgatgagggactctttctccgcagccaggaggctgcagccacagtgcagctgtttcaggaagagcacaggaaggctgaggagctcctagcagctgctgcccagcgccaccagcagctgcagcagaagtgccaacaacagcagcagaagcggcagaggctgaaggaagagctggaaaagcatggaatgcaagtccctgcccaagcccagagcacacaagaggaagaggctggcccaggagatgtggccagtcccaagcccctaaaaggagaaagacctggagctgcacaccaagcagggcctgatgtcctcataggccaggaggacacactccaccccgaccttagcccaaggggctttcaggaaataaaggagctattttgatacagctaagtctactggtgaggagtaggggtcaggcccaagatccccagtctcctgtgactgattgaagccttggcttgactctgcctcttggtctgggccagaggtacatcacaggttttcaataaatgcttccttaacctcctgg

SEQ ID NO: 55104 - protein, 828 aa, Artificial Sequence
  derived and/or modified sequence
MQNSVSVPPKDEGESNIPSGTIQSRKGLQNKSQFRTIAPKIVPKVLTSRMLPCHSPSRSDQVNLGPSINSKLLGMSTQNYALMQVAGQEGTFSLVALPHVASAQPIQKPRMSLPENLKLPIPRYQPPRNSKASRKKPILIFPKSGCSKAPAQTQMCPQMSPSPPHHPELLYKPSPFEEVPSLEQAPASISTAALTNGSDHGDLRPPVTNTHGSLNPPATPASSTPEEPAKQDLTALSGKAHFVSKITSSKPSAVASEKFKEQVDLAKTMTNLSPTILGNAVQLISSVPKGKLPIPPYSRMKTMEVYKIKSDANIAGFSLPGPKADCDKIPSTTEGFNAATKVASRLPVPQVSQQSACESAFCPPTKLDLNHKTKLNSGAAKRKGRKRKVPDEILAFQGKRRKYIINKCRDGKERVKNDPQEFRDQKLGTLKKYRSIMPKPIMVIPTLASLASPTTLQSQMLGGLGQDVLLNNSLTPKYLGCKQDNSSSPKPSSVFRNGFSGIKKPWHRCHVCNHHFQFKQHLRDHMNTHTNRRPYSCRICRKSYVRPGSLSTHMKLHHGENRLKKLMCCEFCAKVFGHIRVYFGHLKEVHRVVISTEPAPSELQPGDIPKNRDMSVRGMEGSLERENKSNLEEDFLLNQADEVKLQIKCGRCQITAQSFAEIKFHLLDVHGEEIEGRLQEGTFPGSKGTQEELVQHASPDWKRHPERGKPEKVHSSSEESHACPRLKRQLHLHQNGVEMLMENEGPQSGTNKPRETCQGPECPGLHTFLLWSHSGFNCLLCAEMLGRKEDLLHHWKHQHNCEDPSKLWAILNTVSNQGVIELSSEAEK

SEQ ID NO: 55105 - protein, 392 aa, Artificial Sequence
  derived and/or modified sequence
MPKPIMVIPTLASLASPTTLQSQMLGGLGQDVLLNNSLTPKYLGCKQDNSSSPKPSSVFRNGFSGIKKPWHRCHVCNHHFQFKQHLRDHMNTHTNRRPYSCRICRKSYVRPGSLSTHMKLHHGENRLKKLMCCEFCAKVFGHIRVYFGHLKEVHRVVISTEPAPSELQPGDIPKNRDMSVRGMEGSLERENKSNLEEDFLLNQADEVKLQIKCGRCQITAQSFAEIKFHLLDVHGEEIEGRLQEGTFPGSKGTQEELVQHASPDWKRHPERGKPEKVHSSSEESHACPRLKRQLHLHQNGVEMLMENEGPQSGTNKPRETCQGPECPGLHTFLLWSHSGFNCLLCAEMLGRKEDLLHHWKHQHNCEDPSKLWAILNTVSNQGVIELSSEAEK

SEQ ID NO: 55106 - protein, 547 aa, Artificial Sequence
  derived and/or modified sequence
MQNSVSVPPKDEGESNIPSGTIQSRKGLQNKSQFRTIAPKIVPKVLTSRMLPCHSPSRSDQDLRPTVIRYPPPQKALMQPPRWQAGYLFHKTKLNSGAAKRKGRKRKVPDEILAFQGKRRKYIINKCRDGKERVKNDPQEFRDQKLGTLKKYRSIMPKPIMVIPTLASLASPTTLQSQMLGGLGQDVLLNNSLTPKYLGCKQDNSSSPKPSSVFRNGFSGIKKPWHRCHVCNHHFQFKQHLRDHMNTHTNRRPYSCRICRKSYVRPGSLSTHMKLHHGENRLKKLMCCEFCAKVFGHIRVYFGHLKEVHRVVISTEPAPSELQPGDIPKNRDMSVRGMEGSLERENKSNLEEDFLLNQADEVKLQIKCGRCQITAQSFAEIKFHLLDVHGEEIEGRLQEGTFPGSKGTQEELVQHASPDWKRHPERGKPEKVHSSSEESHACPRLKRQLHLHQNGVEMLMENEGPQSGTNKPRETCQGPECPGLHTFLLWSHSGFNCLLCAEMLGRKEDLLHHWKHQHNCEDPSKLWAILNTVSNQGVIELSSEAEK

SEQ ID NO: 55107 - DNA, 2487 bp, Artificial Sequence
  derived and/or modified sequence
atgcagaacagcgtgagcgtgccccccaaggacgagggcgagagcaacatccccagcggcaccatccagagcagaaagggcctgcagaacaagagccagttcagaaccatcgcccccaagatcgtgcccaaggtgctgaccagcagaatgctgccctgccacagccccagcagaagcgaccaggtgaacctgggccccagcatcaacagcaagctgctgggcatgagcacccagaactacgccctgatgcaggtggccggccaggagggcaccttcagcctggtggccctgccccacgtggccagcgcccagcccatccagaagcccagaatgagcctgcccgagaacctgaagctgcccatccccagataccagccccccagaaacagcaaggccagcagaaagaagcccatcctgatcttccccaagagcggctgcagcaaggcccccgcccagacccagatgtgcccccagatgagccccagccccccccaccaccccgagctgctgtacaagcccagccccttcgaggaggtgcccagcctggagcaggcccccgccagcatcagcaccgccgccctgaccaacggcagcgaccacggcgacctgagaccccccgtgaccaacacccacggcagcctgaacccccccgccacccccgccagcagcacccccgaggagcccgccaagcaggacctgaccgccctgagcggcaaggcccacttcgtgagcaagatcaccagcagcaagcccagcgccgtggccagcgagaagttcaaggagcaggtggacctggccaagaccatgaccaacctgagccccaccatcctgggcaacgccgtgcagctgatcagcagcgtgcccaagggcaagctgcccatccccccctacagcagaatgaagaccatggaggtgtacaagatcaagagcgacgccaacatcgccggcttcagcctgcccggccccaaggccgactgcgacaagatccccagcaccaccgagggcttcaacgccgccaccaaggtggccagcagactgcccgtgccccaggtgagccagcagagcgcctgcgagagcgccttctgcccccccaccaagctggacctgaaccacaagaccaagctgaacagcggcgccgccaagagaaagggcagaaagagaaaggtgcccgacgagatcctggccttccagggcaagagaagaaagtacatcatcaacaagtgcagagacggcaaggagagagtgaagaacgacccccaggagttcagagaccagaagctgggcaccctgaagaagtacagaagcatcatgcccaagcccatcatggtgatccccaccctggccagcctggccagccccaccaccctgcagagccagatgctgggcggcctgggccaggacgtgctgctgaacaacagcctgacccccaagtacctgggctgcaagcaggacaacagcagcagccccaagcccagcagcgtgttcagaaacggcttcagcggcatcaagaagccctggcacagatgccacgtgtgcaaccaccacttccagttcaagcagcacctgagagaccacatgaacacccacaccaacagaagaccctacagctgcagaatctgcagaaagagctacgtgagacccggcagcctgagcacccacatgaagctgcaccacggcgagaacagactgaagaagctgatgtgctgcgagttctgcgccaaggtgttcggccacatcagagtgtacttcggccacctgaaggaggtgcacagagtggtgatcagcaccgagcccgcccccagcgagctgcagcccggcgacatccccaagaacagagacatgagcgtgagaggcatggagggcagcctggagagagagaacaagagcaacctggaggaggacttcctgctgaaccaggccgacgaggtgaagctgcagatcaagtgcggcagatgccagatcaccgcccagagcttcgccgagatcaagttccacctgctggacgtgcacggcgaggagatcgagggcagactgcaggagggcaccttccccggcagcaagggcacccaggaggagctggtgcagcacgccagccccgactggaagagacaccccgagagaggcaagcccgagaaggtgcacagcagcagcgaggagagccacgcctgccccagactgaagagacagctgcacctgcaccagaacggcgtggagatgctgatggagaacgagggcccccagagcggcaccaacaagcccagagagacctgccagggccccgagtgccccggcctgcacaccttcctgctgtggagccacagcggcttcaactgcctgctgtgcgccgagatgctgggcagaaaggaggacctgctgcaccactggaagcaccagcacaactgcgaggaccccagcaagctgtgggccatcctgaacaccgtgagcaaccagggcgtgatcgagctgagcagcgaggccgagaagtag

SEQ ID NO: 55108 - DNA, 2487 bp, Artificial Sequence
  derived and/or modified sequence
atgcagaacagcgtgtcggtgcccccaaaagatgagggagagtccaatatcccttctgggacgatacagtcgaggaaaggactgcaaaacaagagccagttccggacgatcgcccctaaaatcgtacccaaagtcctaaccagccgcatgctgccttgtcactcccctagccgctctgaccaggtcaatctaggtcccagtattaattctaagctactcgggatgagcacgcagaattacgccctgatgcaggtcgctggacaggagggcaccttttccctggtggctctcccccacgttgccagcgcacagcccatccagaagccacggatgagcctacctgaaaacttgaagctgccaatcccgaggtaccagcctcctagaaactccaaggcatcaaggaaaaagccgatactgatctttccaaagtcaggatgtagcaaggccccagcacaaacacagatgtgcccccagatgtcaccatcccctccccaccaccctgagctcctgtacaagccgtctccttttgaggaggtgccatctttagaacaagcaccagcctccatttctacagctgctctgacaaatgggagcgaccatggcgacctacgaccccctgttactaatacacatgggagtctgaatcctcccgctacccccgcatcgtccacccctgaggagccagcaaaacaagacttaacggcccttagcggaaaagctcactttgttagcaagattaccagtagtaagccgagcgccgtcgcatccgaaaagttcaaagagcaggtagatttggctaagacgatgacaaacttgtccccaaccatcctgggaaacgctgtccagctgatcagtagtgtgccaaaaggaaagttgccaattccaccctacagccggatgaaaacaatggaggtttacaaaataaaaagcgatgccaacattgcaggattcagcctgcctggtcctaaggcggattgcgataagatcccttccacaacggaagggttcaatgcagctacaaaggtggcatcacggcttccagtacctcaggtgtcccagcaatcagcctgtgaaagtgccttctgccctcccacaaaactggacctgaatcacaaaactaaactcaattcgggcgcagcaaaacggaagggccggaaacggaaggtcccggacgaaatcctcgcttttcaagggaagagacggaagtacattatcaacaaatgccgagatgggaaggagagagtgaaaaacgacccacaggagtttcgggaccagaagctaggaaccctgaaaaagtatcgcagtatcatgccaaaaccaattatggtcataccaaccctggcctccctggccagcccaactactctccaatctcagatgctgggtggcttggggcaggacgtgctgctgaacaacagcctcacccctaagtatctggggtgtaaacaggataatagtagctctccaaaacccagttccgtttttcggaatggcttctccggaattaagaagccgtggcatcgatgtcacgtgtgtaaccatcactttcagtttaaacagcacctgcgtgatcacatgaatacacatacaaacagacgcccatattcctgccgcatatgtcgcaaaagctacgtgcggcccggcagtctgtctactcacatgaagctgcaccatggagaaaatcgcctgaaaaaactgatgtgttgtgagttctgtgccaaagttttcggtcacatccgcgtgtactttgggcacctgaaggaggtacacagagtggtaatcagcacagaacctgctccaagtgaattgcagcctggcgatatcccaaaaaatcgggacatgtccgtcagggggatggaaggttccctggagcgtgagaacaagtccaatctcgaggaggactttctgttgaatcaagctgacgaagtcaagctgcaaataaaatgtggaaggtgccagattactgcacagagctttgccgaaattaagtttcatctgttagacgtccacggagaggaaatcgaaggacggttgcaggaggggactttccccgggtccaaggggacacaagaagaactggtgcagcacgccagtccagattggaaacgacatcctgaacgcggtaagcccgaaaaggtgcacagctctagcgaagagagccacgcttgccctagattgaagcggcagctccacctccatcagaacggggtagaaatgctgatggagaatgaggggccgcagagcggcaccaacaagcctcgtgagacatgccagggtcccgagtgcccagggttgcatacctttctgctctggtcacactccggatttaactgtctcctctgcgcagagatgctggggcggaaggaggatctgctgcaccattggaagcaccaacataattgcgaagacccgtctaaactgtgggcaattctgaatactgtttctaaccagggcgtgatcgagctgtcctctgaggccgagaagtag

SEQ ID NO: 55109 - DNA, 2487 bp, Artificial Sequence
  derived and/or modified sequence
atgcagaactctgttagcgtgccaccaaaggatgagggcgaatcaaatatcccttcagggacaattcagagccggaagggcctacagaacaagagtcaatttcgcactatcgctccaaaaatagtgccgaaggtgctgacttccagaatgctgccttgccacagtccgagtcggtcagaccaggtgaacctaggtccttccattaatagtaagctgctcggtatgtccactcaaaattacgctctgatgcaggtcgcggggcaggagggcaccttctctctggtggccctgccacacgtagccagcgctcaaccgatacagaaacccaggatgagcctgcctgagaacctgaagctacccatcccccgataccagccaccaagaaattctaaggcatctcggaagaagcccatcttgatttttcccaagtccgggtgtagcaaagctcccgctcagacccagatgtgcccacaaatgagcccgagcccaccgcatcacccagagctgctgtacaagcctagcccgttcgaagaggtgccctcccttgagcaggcccccgcctcgattagcaccgccgctctgacaaacggtagcgaccatggggatctccgccccccggtcacaaatactcatggatcactgaatcccccagcgacacccgccagctccacaccagaggagcctgccaagcaagacttgactgccttaagcggtaaggctcattttgtctcaaagatcacaagctcaaaaccttctgccgtggcctcagagaaattcaaagaacaggtcgacttagctaaaactatgactaacctttcccccaccattctcggtaatgctgtacagctcatatcttctgtacctaaggggaaacttccaatccccccttacagccgaatgaagacaatggaagtctataagatcaaatcagatgcaaacatagcgggattctctttaccaggtcccaaagcggattgtgataagatcccctccactacggagggtttcaatgcggccacaaaggtggctagccgcctgcccgtgcctcaggtgagtcagcagtctgcatgtgaatccgccttttgccccccaaccaagctcgacctgaaccacaagaccaaactgaattccggagccgccaagcgcaagggaagaaaacgcaaagtacccgatgagattctggcatttcagggaaaaagaagaaaatacattatcaacaagtgcagagatggaaaggagcgggttaaaaatgatccacaggagtttagggatcagaaattgggtacgttgaagaagtatagatcgatcatgcccaaacctatcatggtgattcctaccttggcctcactggcttcccccacaaccttacaatcacagatgctgggagggcttggccaggacgttctgctgaataattccctgacacctaagtacctcggctgcaagcaagataattcctcttccccaaagccctcttccgtgttccgtaatggattttctggcatcaagaaaccctggcacagatgtcatgtatgtaatcatcatttccagtttaaacagcacttgagagaccatatgaacacccatacaaatagacgcccatactcgtgccggatttgtagaaagtcctacgtccggcccggctctttgtccacccatatgaaacttcaccacggcgagaatcgacttaagaagcttatgtgttgtgagttctgtgcaaaagtgttcggacacatccgggtgtacttcggacacctaaaggaagttcaccgagttgtgatttcaacggagcctgctccttccgagcttcagcctggagacattcccaagaatagggatatgtccgtccgaggaatggagggtagcctcgagcgagagaataagtcgaatttggaggaggacttcttgctgaaccaggctgatgaggttaagctccagatcaagtgcggtcgctgtcagatcaccgcccagtcttttgccgaaattaaattccatcttctagatgtacatggagaggaaatcgaaggaagactgcaggaaggcacgttcccaggctctaagggcactcaggaagagctggtgcagcacgcctctcccgattggaagcgccatccggagcgggggaagcctgagaaggtgcatagttcctctgaagagtcgcacgcttgtccacggcttaaacggcaactgcacttgcatcagaacggggtggagatgttgatggaaaacgagggtccccagtctggcacgaataagccgagagaaacctgccaagggcccgaatgccctggcctgcatacattcctgctgtggtcccacagcggattcaattgccttctttgtgctgagatgttgggacggaaagaggacctcctgcaccattggaaacatcagcataattgcgaagatccatctaaactgtgggccattctgaacactgtgagcaaccaaggcgtcatagaacttagtagtgaggcagagaaatag

SEQ ID NO: 55110 - DNA, 2487 bp, Artificial Sequence
  derived and/or modified sequence
atgcagaacagcgtcagcgttccccccaaggatgagggggaaagcaacatcccttctggaactatccagtctagaaaaggcctgcaaaataagagtcaattcagaaccatagccccaaaaatagtaccaaaggttctcacgtcacgtatgctgccttgccactctccaagccggtctgatcaagtgaacctgggcccctccattaactccaaattgttgggtatgtctacccagaattacgccctgatgcaggtggcgggccaggaaggaaccttttccctagtggcactgcctcacgtcgcaagcgcacaacctattcaaaaacctagaatgtctctgcccgaaaacctcaagcttccgatcccacgataccaaccgccccgtaactctaaggcttctcgaaagaagcccatcctgatctttcccaaaagcggttgctctaaagccccggcacagacccaaatgtgccctcagatgagcccgtcccccccccaccaccctgagctgctgtacaagccttctccgtttgaggaagtgccaagtctcgaacaggcccccgcttcaatttctacagcagccctgacaaatggcagtgatcatggagacctccgacctcctgtaactaatacccacgggagcctgaacccccccgccactcctgcttccagcactccagaggagcctgccaagcaagatctgacagctctgtctggtaaggcccattttgtgtcgaaaattaccagtagtaaaccaagcgccgttgcgagtgaaaaattcaaggagcaggttgacttggccaagacaatgaccaacctgtctcctacgattttaggaaacgccgtccagctgatcagttccgtgcccaaagggaaactaccaataccaccttactctcggatgaaaaccatggaagtgtataagataaaatctgatgccaacatcgctggcttcagtctgccggggccaaaggctgattgtgacaagatccctagtaccactgaggggttcaatgcggcaactaaggtggcaagccggttgcctgtcccccaggtgagccagcagagtgcttgtgagtcagccttttgcccacccaccaaactggacctcaaccacaagacaaagctgaactcaggagcagctaagcggaaaggacggaagcgcaaagtccccgatgagatcctcgcttttcagggcaagagacgaaagtacatcattaacaagtgcagggatgggaaggagcgcgttaaaaacgaccctcaggagttccgagaccagaagctcgggacactgaagaaataccgatctatcatgcctaagccaatcatggtgattcctactctggcctcactcgcctcccccactactctgcaaagccagatgctcggcggattagggcaggatgtgctcctcaataacagcctgaccccaaaatacctaggttgtaaacaggacaattcctcctccccaaagcccagcagcgtgttcagaaacggcttttcaggtatcaagaagccgtggcacagatgtcatgtatgtaatcatcacttccagttcaagcagcatcttagggatcacatgaacactcacaccaacaggcgcccctacagctgtagaatatgccggaagtcctacgtccgacctggttccttgtctactcacatgaagcttcaccatggcgagaaccgcctgaaaaagctaatgtgctgtgaattctgtgctaaagttttcggccacattcgggtttatttcggtcatttgaaggaagtccatcgtgtggttatcagtacggagccagccccatctgagctgcagcctggcgatattccaaaaaaccgagacatgagcgtgcggggtatggagggctccttagagcgggagaacaagtctaacctagaggaggatttcctccttaatcaggccgacgaggtcaagctgcagattaaatgcggacgatgtcagatcaccgcccagtcttttgccgagattaaattccacctgctggatgtgcatggagaggagatcgaaggacggttgcaggaaggcacatttccagggagcaaaggaactcaggaagaattggtccaacacgcctcccccgattggaagcgtcaccctgagcggggtaaacccgaaaaggttcattcatcttcagaagaaagccatgcatgtcctcggttaaaacgacagctgcatttgcaccagaacggggtcgaaatgcttatggaaaacgagggcccacagtctggaacgaacaaacccagagagacatgccaggggccagagtgtcctggcttacacacctttctcctgtggtcacacagcgggttcaattgcctgctttgcgccgaaatgctggggcggaaggaggatcttcttcatcactggaagcaccaacataactgcgaagacccctctaagttgtgggcgatattgaacactgtgagcaatcagggggtgatcgaattaagctccgaggccgaaaaatag

SEQ ID NO: 55111 - DNA, 2487 bp, Artificial Sequence
  derived and/or modified sequence
atgcagaactctgtatccgtaccccctaaggatgaaggtgagtcaaatataccctctggcacaattcaaagcagaaaggggttgcaaaacaagtcccagttcagaactattgccccaaaaatcgtaccaaaggtcctgacaagccgcatgctgccttgtcacagcccatctcgatccgaccaggtgaacctcggcccgtccattaacagtaaactgctgggaatgtcaacacagaattacgccctaatgcaggtagcgggccaagagggaactttttcacttgtggctctcccccacgttgcctctgcccagccaattcaaaagcctcgcatgagtttgccagaaaacctgaagctgcccatcccaaggtatcagcctccgcgcaactccaaggcctcaaggaaaaagcccatcctgatctttccaaaatccgggtgctccaaagcgccggcacagactcaaatgtgtccccagatgtctccctcccccccacaccatcctgaacttctgtataagccttctccatttgaggaggtcccctctctggaacaggccccagcttctatcagcactgctgcattaaccaacggttctgaccatggcgacctcaggccacccgtgacaaacacgcatggttctctgaacccacccgctacgcccgcctcctccacacctgaggaacctgccaaacaggacctgacagcattgtcaggtaaagcgcacttcgtgtctaagatcaccagcagcaagccgagcgctgtggccagtgagaagtttaaagagcaggttgacctcgctaagactatgactaatttgagtcctacgatcctgggcaatgcagtgcaactgatctcctctgttcccaagggcaagttacctatcccaccatactccaggatgaagaccatggaggtttacaaaatcaaatccgacgcgaatatcgccggcttctccctgcctggcccgaaagccgattgcgacaagatcccaagcactaccgaggggttcaacgcggcaacgaaggtggcctcacggctgccggttccacaagtctctcagcaatctgcctgcgaatctgcattttgtcccccaacaaagctggacttgaatcacaagaccaaattgaatagcggagcagccaagcgcaaaggccgcaaaaggaaggttcctgacgaaatattagcttttcagggcaagaggagaaaatatattattaacaaatgtcgagatggcaaagaacgggtgaagaacgatcctcaggagttccgtgaccagaagctgggcaccctgaagaagtacaggtctattatgcctaagcctatcatggttatacccactctggcaagcttggcttccccaacaacgctgcagtcacaaatgctcggcggcctgggccaggacgtgctgctcaataattctctgacacctaaataccttgggtgcaagcaagacaactccagcagcccgaagccctcaagtgtattcaggaacggcttcagcggcatcaagaaaccatggcacagatgtcacgtttgcaatcatcacttccagtttaagcagcatttacgggaccacatgaacactcatacaaaccgccgtccttactcatgccgtatctgcagaaagtcctatgtcagacccggaagtctttccacccacatgaagctgcaccatggagaaaaccgactgaaaaagctgatgtgttgcgagttttgtgccaaggtgttcggacatattcgcgtgtacttcggacatctgaaggaggtgcatcgtgtcgtgatcagcacagagccggcaccatctgaactccaaccaggagacattcctaagaatagggatatgtctgtgaggggaatggaaggctctcttgaacgtgagaataagagtaatctggaggaagattttttgctgaatcaggcagatgaggtgaaattgcagatcaagtgtggtcggtgtcagatcactgcacagagttttgccgaaatcaagttccacctgcttgatgtgcatggagaggaaattgagggccgccttcaggaagggacctttcctggctctaaaggtactcaggaggagctggtacagcacgctagtccggattggaagcgacaccccgagagaggaaagccggagaaggtgcatagcagctccgaagagagtcatgcctgtcccaggctcaaacggcagctgcatctgcaccaaaacggcgtggagatgcttatggagaacgagggtccacagtctgggacaaacaaaccccgagagacttgccagggacctgaatgccccggcctgcataccttcctcctgtggtcacattcagggttcaactgtcttctatgcgccgaaatgctgggcaggaaagaagacttactgcaccattggaaacaccagcataactgtgaggatcctagcaagctctgggccatcctgaacacagtctctaatcagggcgtgatcgaactgagctctgaagcggagaagtag

SEQ ID NO: 55112 - DNA, 2487 bp, Artificial Sequence
  derived and/or modified sequence
atgcagaacagcgtgtctgtgccccccaaggatgaaggagagagcaacatccccagcggcaccatccagagcaggaagggcctgcagaacaagagccagttccgcaccatcgcccccaagatcgtgcccaaggtgctgaccagcaggatgctgccctgccacagccccagcagaagtgaccaggtgaacctgggccccagcatcaacagcaagctgctgggcatgagcacccagaactatgccctgatgcaggtggccggccaggagggcaccttcagcctggtggccctgccccacgtggccagcgcccagcccatccagaagcccaggatgagcctgcctgagaacctgaagctgcccatcccccgctaccagccccccaggaacagcaaggccagcaggaagaagcccatcctgatcttccccaagagcggctgcagcaaggccccagcccagacccagatgtgcccccagatgagccccagccccccccaccaccctgagctgctgtacaagcccagcccctttgaggaggtgcccagcctggagcaggccccagccagcatcagcacagctgccctgaccaacggcagtgaccacggggacctgcggccccctgtgaccaacacccacggcagcctgaaccccccagccaccccagccagcagcaccccagaggagcccgccaagcaggacctgacagccctgagcggcaaggcccactttgtgtccaagatcaccagcagcaagcccagcgctgtggccagcgagaagttcaaggagcaggtggacctggccaagaccatgaccaacctgagccccaccatcctgggcaatgctgtgcagctgatcagctctgtgcccaagggcaagctgcccatccccccctacagcaggatgaagaccatggaggtgtacaagatcaagagtgatgccaacattgctggcttcagcctgcccggccccaaggctgactgtgacaagatccccagcaccacagagggcttcaatgctgccaccaaggtggccagccggctgcctgtgccccaggtgtcccagcagagcgcctgtgagagcgccttctgcccccccaccaagctggacctgaaccacaagaccaagctgaacagcggggccgccaagaggaaaggaaggaagaggaaggtgcctgatgagatcctggccttccagggcaagaggaggaagtacatcatcaacaagtgcagagatggcaaggagcgggtgaagaatgacccccaggagttccgggaccagaagctgggcaccctgaagaagtaccgcagcatcatgcccaagcccatcatggtgatccccaccctggccagcctggccagccccaccaccctgcagagccagatgctgggcggcctgggccaggatgtgctgctgaacaacagcctgacccccaagtacctgggctgcaagcaggacaacagcagcagccccaagcccagctctgtgttcagaaatggcttcagcggcatcaagaagccctggcaccgctgccacgtgtgcaaccaccacttccagttcaagcagcacctgcgggaccacatgaacacccacaccaacagaagaccctacagctgccgcatctgcaggaagagctatgtgcggcccggcagcctgagcacccacatgaagctgcaccacggggagaaccggctgaagaagctgatgtgctgtgagttctgtgccaaggtgtttggccacatccgggtgtacttcggccacctgaaggaggtgcaccgggtggtgatcagcacagagcccgcccccagcgagctgcagcccggggacatccccaagaacagagacatgtctgtgcggggcatggagggcagcctggagcgggagaacaagagcaacctggaggaggacttcctgctgaaccaggctgatgaggtgaagctgcagatcaagtgtggccgctgccagatcacagcccagagctttgctgagatcaagttccacctgctggatgtgcacggggaggagattgagggccgcctgcaggagggcaccttccctggcagcaagggcacccaggaggagctggtgcagcacgccagcccagactggaagaggcaccctgagcggggcaagccagagaaggtgcacagcagcagcgaggagagccacgcctgcccccggctgaagaggcagctgcacctgcaccagaatggagtggagatgctgatggagaatgaaggcccccagagcggcaccaacaagccccgggagacctgccagggcccagaatgtcctggcctgcacaccttcctgctgtggagccacagcggcttcaactgcctgctgtgtgccgagatgctgggcaggaaagaagacctgctgcaccactggaagcaccagcacaactgtgaggaccccagcaagctgtgggccatcctgaacacagtgagcaaccagggcgtcatcgagctgagcagcgaggccgagaagtag

SEQ ID NO: 55113 - DNA, 2487 bp, Artificial Sequence
  derived and/or modified sequence
atgcagaacagcgtgagcgtgccccccaaggacgagggcgagagcaacattccctcgggcacgattcaatcgcggaagggcctgcaaaacaagtcccagttcaggacaatagcccctaaaattgtgcccaaagtgctgacttctaggatgttgccctgtcactctccttcccggagcgaccaggtcaacttaggcccctctattaactcaaagctgcttggaatgtctactcagaactacgccctgatgcaggttgcaggccaggagggcacattctccctggtggcgctaccacacgttgcttctgcacagcccattcagaaaccccggatgtcactgcctgagaatcttaaattgccaattcccaggtaccaaccccctcgcaatagcaaggctagtagaaagaagcccatactgatttttcccaaatcagggtgctctaaggcgcccgctcagactcagatgtgcccacagatgtcacctagtccccctcaccaccccgagctgctctacaaaccctccccatttgaggaggttccctctttggagcaagctccagcaagtatctccacagccgcgttgaccaacgggagcgatcacggagacctcagaccccctgtgacaaatacacatggaagtcttaacccccctgcgacacctgccagttccaccccggaggagccggcaaagcaagaccttactgccttatccggcaaagcacacttcgtctccaagataacatcctcaaagccctccgcagttgcctcggagaagttcaaagagcaagtggacctggcaaaaacaatgactaacctgtcgccaaccatcctcgggaacgccgttcagttgataagctcggttccgaagggtaaattgccaattcccccgtattccaggatgaagacaatggaggtgtataagattaagagcgatgcaaatatagccggttttagcttacctggacctaaggccgattgcgacaaaatcccctccaccacagagggattcaacgcagccacaaaggtcgcgagccgactgccagttccgcaggtgtcacagcaatctgcatgcgagtccgctttttgtccaccgaccaagctggatctgaatcacaagaccaaactgaactccggcgccgcaaagcgcaagggcagaaagcgaaaagtgcccgatgagattctggctttccagggtaagagacgcaagtatatcataaataagtgtcgggacggcaaagagcgagtgaaaaacgacccccaggaattcagggatcagaaactgggcaccctcaagaaatatcgctccataatgcctaaaccaattatggtcatccctacattggcttcattagcatcccctacaacactccaaagtcaaatgctcggcggtcttgggcaagatgttctactgaataactcgctgaccccgaagtatctgggttgcaagcaagataattcctcgtctccaaagcccagctccgtgtttagaaatggcttttcaggcatcaaaaaaccatggcatcgatgccacgtctgcaatcaccatttccagtttaagcagcatctgcgagatcatatgaacactcacactaatagacggccatactcatgcagaatttgcaggaaaagctacgtccgccccggatcactttcaacacacatgaaactgcaccacggcgagaataggctgaaaaaactgatgtgttgtgaattctgcgccaaagtgttcggccacataagggtctatttcggccatttgaaggaagtgcatagggtcgtaatctccaccgagcctgcaccaagcgagctgcagcccggcgacatccccaagaaccgtgatatgtctgtaagaggtatggagggaagcttggagcgggagaataaaagtaacctcgaggaggattttctacttaatcaggcagatgaagtgaaacttcagattaaatgcgggcggtgtcagatcaccgcccagtcgttcgcagagatcaagttccatctgcttgacgtgcatggggaagagatcgagggacgactccaggaaggtacctttcctggctctaaaggaactcaagaggaactggtgcagcacgcttcccctgactggaaacgccaccccgaacggggtaagccagagaaagtccacagctccagcgaggaaagtcacgcatgtccaaggctgaagcggcagctccatctacaccagaacggggtggagatgttgatggagaatgagggaccgcaaagcggcaccaataagcctagggagacatgccagggacccgagtgtcccggcctgcacacctttctcttgtggtcccattctgggttcaactgcctgctctgcgccgaaatgcttggcagaaaagaagatctgctgcaccattggaaacatcaacacaattgcgaggatcccagcaagctttgggccattctgaataccgtgtctaatcaaggagtgatcgaactgtcttctgaggcggagaaatag

SEQ ID NO: 55114 - DNA, 2487 bp, Artificial Sequence
  derived and/or modified sequence
atgcagaacagcgtgagcgtgccccccaaggacgagggcgagagcaacatcccgtctggcacaattcaatctcggaagggcttacagaataaaagccaattccggaccatcgcccccaagattgttcctaaggtcctgacttcccgtatgttgccttgtcattctcctagtcggtcagaccaagttaacctgggcccttcgattaacagcaagctgcttgggatgtcgacacagaattatgccctgatgcaggttgctgggcaagaaggaaccttttccctggtagcactccctcatgtggccagcgcccagccgatccagaagcctcgcatgagcctgcctgagaacttaaagctgccgattcctcgctaccagccccccagaaattctaaagccagcaggaagaaacctatccttattttccccaagtcaggatgctccaaagcccccgcccagacccagatgtgcccccagatgtctccctccccccctcaccaccccgagctgctctataagccatcaccctttgaggaggtgccatctttagaacaagctccggcatccatttccacggcagccctcacaaatggtagcgatcatggagacctacgcccccctgtcacgaatactcatggctcccttaatccccccgctacgccagcaagtagcacccccgaagagcccgctaagcaggatctgactgctctgagtggaaaagcccattttgtgtctaagatcactagttccaaaccatctgctgttgccagcgaaaagtttaaagagcaggttgacctcgccaagaccatgacaaatctctcacctaccattttaggaaacgctgtccagctcattagttctgtccccaaaggcaaactgccgataccaccttactcccggatgaagacgatggaggtgtacaagatcaagagcgacgctaacatcgcaggctttagcctgccgggtcccaaagccgactgtgataaaattccgtccacaacggagggctttaatgcggccaccaaggtcgcgagccgtctgcccgtgccgcaagtgagccagcagagcgcttgcgagagcgccttctgccccccaaccaaactcgaccttaatcacaagacaaagcttaactctggagctgccaagcgcaagggcagaaaacgaaaggtgccggatgagatcctagcctttcagggcaagagaaggaagtatatcattaacaaatgccgtgacggtaaggagcgcgtgaagaacgacccccaggaatttagagaccaaaagctgggaaccctgaagaagtatcgatccatcatgcccaagcctatcatggtaatccctacgctcgcctcgcttgcctcacctacgactctgcagtcgcagatgcttgggggactgggacaggacgtgttgctgaataatagcctgaccccaaaatacctcggctgcaaacaggataatagctccagccctaagcccagttccgtttttcgaaatggatttagcggaataaagaagccatggcacagatgtcatgtatgcaatcatcactttcaattcaaacagcatctcagggaccacatgaacactcataccaaccggcgcccatacagctgccggatttgcagaaagtcctatgtgagacccgggagcctgtctacgcatatgaaactgcatcacggagagaaccgtcttaagaagctgatgtgctgcgagttctgtgccaaggtcttcggccatattcgtgtgtatttcggtcacttgaaggaggtgcacagagtggtaatcagtacggagcctgctcctagtgagttacagcctggagacatcccaaaaaacagagacatgtcggtgagaggcatggagggctccctcgagcgagaaaacaaatctaacctggaagaggatttcttgttgaatcaggctgatgaggtgaagctccagatcaaatgtggccgttgtcagattactgcccagagctttgccgaaataaagttccacttgctggacgttcacggcgaggagatcgagggcaggctgcaggaaggcacattccccggcagtaaggggacccaggaagagctcgttcagcatgccagtccagactggaaacggcaccccgaaaggggaaagcctgagaaagtgcattcgagcagtgaagagagtcatgcctgccctaggctaaaaaggcaactgcacctgcatcagaatggcgtagaaatgctgatggagaacgaaggtccgcagagcggcactaataaacccagggagacttgccagggacccgaatgccccgggctgcacacatttttgttgtggtcacacagcggcttcaactgcttattatgtgctgagatgctcggaagaaaagaggatcttctgcatcattggaaacaccagcacaactgcgaagaccctagcaagctgtgggcaatactcaatacagtatccaaccagggcgtgatcgagctttcctcagaagcggagaaatag

SEQ ID NO: 55115 - DNA, 2487 bp, Artificial Sequence
  derived and/or modified sequence
atgcagaacagcgtgagcgtgccccccaaggacgagggcgagagcaatatcccgagcggaaccatccaaagtcgtaagggactgcagaacaaaagccagttccggaccattgcccccaagatagtgccaaaggtgctcacatctcggatgctgccctgtcacagccccagccgtagcgaccaagtcaacctcggtccatcaatcaattcgaaactgctggggatgtctacgcagaactatgctctgatgcaagtcgctggacaggaaggaaccttttccctcgtcgcgctgccacacgtggccagtgcacagcccatacagaagcctagaatgagtttgccagaaaacctgaaactgcctatccctagataccagcccccaagaaattctaaggcttctcgcaaaaagccaatcttgatatttccgaaaagtgggtgttctaaggctccagcacaaactcagatgtgtccccagatgtctcctagcccccctcaccatccagagcttctctacaaaccgtctccgttcgaggaggttccgtcgttggaacaagctccagcctcaatttctacagcagcattgaccaatggaagcgaccacggcgacctgcgcccgcctgtcaccaatactcacggttctctcaaccccccggccactcccgcatctagcactcctgaagagccagctaagcaagacctgaccgctctgtccggcaaggcacactttgtgtctaagatcactagcagtaaacccagtgccgtcgcatcagagaagttcaaagaacaggtggacttggccaagaccatgaccaatctctcccccactatattaggaaacgctgtgcaactcatctcctccgttccaaagggaaaactgccaatcccgccttatagtcgaatgaagaccatggaagtgtacaaaattaaatccgacgccaacatagcaggattttccttgccaggacctaaggcggactgtgacaagattccaagtactaccgagggttttaacgccgctaccaaggtagcgtcccggctgccggtgcctcaggtgtcgcaacagagcgcgtgtgaatcggcgttttgtccacctacaaaattggatctgaatcacaaaaccaagctcaattctggtgccgccaagagaaagggacggaagaggaaggttccggacgagatacttgcattccaaggcaagcggcgcaaatacatcatcaacaaatgtagggacgggaaagaacgggtgaaaaatgatccacaggaatttagagatcagaagctgggcaccttgaagaaatatcgctccatcatgcctaagcccataatggtgattcctactctggccagcctggcgagccctaccacactacagagtcaaatgctcggcggattggggcaggatgtactgttgaacaattcccttacgcctaaatatcttgggtgtaaacaagacaattcatccagtcctaagccatcgagtgtctttcgcaatggtttctctggcataaagaaaccatggcatcggtgtcatgtgtgtaaccaccactttcagtttaaacagcatctacgggaccacatgaatacccacacaaaccgaagaccttactcatgtaggatctgccggaagtcttacgtcaggcctggcagcctgagtactcacatgaaactgcaccacggagagaacagattaaagaagctgatgtgctgtgagttctgtgcgaaagtgtttggtcatatacgtgtgtattttgggcacctcaaggaggttcatcgggtggtaatttctactgagcccgcacccagcgagctgcaaccgggcgacatccccaaaaaccgagacatgtccgtccgcggaatggaaggttctctcgagcgggaaaacaaatcaaacctggaagaagatttcctcctgaatcaggccgatgaagtgaagctccaaataaagtgcgggcggtgtcagatcactgctcagtcatttgctgaaatcaagttccatttgctggatgtccatggagaagaaattgaggggcgtttgcaggaaggtacatttcccggctctaagggcactcaggaagagctggtccagcacgcatcaccagactggaagagacaccctgagagaggtaaacctgagaaagtgcattcaagttccgaggagagtcacgcatgcccgcgacttaaacgccagctgcacttgcaccagaatggggtggaaatgctcatggagaacgagggcccccagagcgggacaaacaagccacgggaaacttgtcaaggacctgagtgtccaggcctccacacctttttgttgtggtcccatagcgggttcaactgtcttctgtgcgccgagatgctcggcaggaaggaagacttacttcaccactggaagcatcagcataactgtgaggacccctctaagctttgggcaattctgaataccgtgagtaaccagggtgtcattgagctgagctcagaggccgagaaatag

SEQ ID NO: 55116 - DNA, 2487 bp, Artificial Sequence
  derived and/or modified sequence
atgcagaacagcgtgagcgtgccccccaaggacgagggcgagagcaacattccgtcagggacgattcagagccgtaaaggtctgcagaacaagtcacaattccggacaattgctccaaaaatagtccctaaggttctgacaagcagaatgcttccttgtcatagtcccagccgcagcgaccaggttaatctgggcccatctattaactccaagttattaggaatgtccacgcaaaattatgccctcatgcaagtggctggtcaggagggcactttcagcctcgttgctctgccccacgtagctagtgcgcagcccattcagaagccacggatgagcctacccgaaaaccttaaactccccatccctagataccagcccccgcggaattccaaggcctctcgaaagaagcctattctgattttccccaaaagtggctgttccaaagcacctgcccagactcagatgtgcccacagatgagtccaagtccgccccaccacccggagttgctatacaagccctcacctttcgaagaggtaccctcgctagaacaggcccccgcgagcatctctacagctgctcttactaacgggtctgaccacggagacctgaggccacctgtgacaaatacccatggcagcttaaacccgcctgctactcctgctagttcaacacctgaggaacctgccaaacaggacctgacagctctgagcggaaaggcccactttgtctctaagatcactagtagcaagccaagcgcggtggcctccgagaagtttaaagagcaggtcgacttagctaaaacaatgaccaatttatctcctactatacttggaaacgcggtccaactcatttcaagtgtgcctaaaggtaaattgcccatccccccctatagtcgtatgaaaacaatggaggtatacaagatcaagagcgacgccaacattgcgggattttcccttcctgggccaaaggccgattgcgacaagatcccttcgacaaccgaggggtttaatgctgccacaaaggttgcatccaggctgcctgtcccacaagtcagccagcaaagcgcttgcgagtctgccttctgcccacccacaaagctggaccttaatcataagactaaactcaacagtggggccgccaaacgaaagggcaggaaaaggaaagtacccgatgagatactggccttccagggcaagaggcgaaaatacataattaataaatgccgggatggaaaggaacgggtaaagaacgacccacaggagtttcgtgaccaaaagcttggcaccctaaaaaaatatagatcaatcatgcctaagccgatcatggtgatccctaccttggcgagtctggcatcacccacaactctccaatctcaaatgctgggggggctggggcaggatgtactcttgaataatagcctcacgcccaaataccttggttgtaaacaagacaacagctcatctcccaagccctcatctgtgtttcgtaacggcttttctggcataaagaaaccttggcatagatgccacgtatgcaaccaccactttcagtttaagcaacatctgcgcgaccacatgaacactcatactaatcggagaccctacagctgtaggatatgccggaagagctacgtgcggccagggtcactgagcactcacatgaagctgcaccacggggaaaatcggcttaaaaagctgatgtgttgtgagttctgcgctaaggtctttggccacatcagagtatatttcggccacctgaaagaggtgcacagggtggtgatctcaacagaacctgccccatccgagttgcagccgggggatatcccaaagaaccgagatatgtcagtccggggcatggaaggatcactcgaacgtgaaaacaagtcaaaccttgaagaggacttcctgttgaatcaggcagacgaggtgaagctccaaattaaatgcgggagatgtcagattactgctcaatcgtttgccgaaatcaagtttcacctgttggacgtgcacggtgaggagattgagggccgacttcaggagggtaccttccccggatctaagggcacacaagaggaactggtgcagcatgctagcccggactggaaacggcaccctgaaaggggtaaacctgagaaggtgcactctagctctgaagagtcgcatgcttgcccgcgcctcaagcgacagctgcacttgcaccagaacggtgttgagatgctgatggagaatgagggaccgcagtcaggtaccaacaagccaagggagacctgccagggacctgagtgtcccggactccatacattcctgctgtggtcccatagcggtttcaactgtctgctgtgcgctgaaatgttgggtaggaaggaagacctattgcatcactggaaacatcagcacaactgtgaagacccatcaaaactgtgggcgattcttaacacagtcagcaaccagggggtgatcgaactctctagcgaggccgaaaagtag

SEQ ID NO: 55117 - DNA, 2487 bp, Artificial Sequence
  derived and/or modified sequence
atgcaaaactctgtttcagtccctccaaaagacgaaggggagagtaatataccctctggtaccatccagagtaggaaaggactgcagaacaagagtcaattccggaccattgcccctaaaatcgttcccaaggtgttaacatcacgaatgctgccatgtcactccccttctcggtcagatcaggttaacctaggcccttcaataaactctaagcttctggggatgtcaacacagaattatgcacttatgcaagtggcaggtcaggagggcacgttctcgttggtggccctcccgcacgttgcaagcgcccagcctatacagaagcccagaatgtctctgcctgagaatctgaagctccctataccccgataccagccccctcggaactcgaaggcaagccgtaaaaaaccgattctgatcttccctaagagtggatgctctaaagccccagcccagacacaaatgtgtcctcagatgtcgccctcccctccgcaccaccccgaactgctgtacaagccaagtccatttgaagaggtcccgagtcttgaacaggcacctgcaagtatttcaacagctgccttgacaaacgggtcagaccacggagacctgcgcccaccggtaaccaatactcacggcagtctgaatccccctgccactccggcttctagcacccccgaggaaccagccaaacaggacctaactgccctgagcggtaaagctcacttcgtgtcaaagattacctctagtaagccctccgcagtggcaagcgagaaatttaaggaacaagtcgacttggctaagacgatgactaacttgtctcctactatcctgggcaacgcggtgcagcttattagtagcgtgccaaaaggaaagcttcctattccaccatactcgcgtatgaaaacaatggaggtctataaaatcaaaagtgacgccaatatcgcaggatttagcctgccaggtcctaaagctgactgcgacaagattcctagcaccaccgagggattcaacgcagcaactaaggtggccagtagactcccagtcccccaggtgagtcaacaatccgcctgtgaaagcgccttttgtccaccaacgaaactggacttgaatcataagactaaattaaatagtggcgctgccaagcgcaaggggcgaaaacgcaaggttccggacgaaattctcgcctttcagggtaagcggaggaaatatatcataaataagtgccgagacggcaaggagagggtcaagaacgatcctcaggagtttcgcgatcagaagttgggtactctgaagaagtacagaagtattatgccaaagcccattatggtgattccgaccttagcatctctcgcttcacctaccactctccaatcccagatgctgggtgggctcgggcaagatgtcctgttgaataacagcctcacccctaaataccttggatgtaagcaggacaactcatcatcccctaaacccagcagcgtgttccgcaatggtttttctggcattaagaagccatggcaccggtgtcacgtgtgcaaccaccacttccagtttaagcaacacctgagggatcatatgaacacccatacaaacagacgcccttactcatgtcggatatgccgaaagagctacgttcgcccaggcagtctatctacgcacatgaaattgcaccacggcgagaacaggttaaagaaattgatgtgctgcgaattctgcgccaaggtgtttggacacatccgggtgtatttcggacacctcaaggaagtgcaccgggtcgttatatccactgagcccgctccttctgaattgcagcctggggatatccctaaaaacagagatatgtcagtgcgaggcatggaggggtcccttgagagggagaataaatcaaaccttgaagaggatttcctcctcaaccaagctgatgaggtcaagcttcagataaaatgtggacgatgccagataaccgcccagtcattcgccgagattaagttccatctgcttgacgtccacggcgaggagattgagggaaggctacaggaaggaacattccctgggtctaaaggtacccaggaagagcttgtgcagcacgcctcaccggactggaaaaggcatccagagagaggtaaacccgaaaaagttcatagtagcagcgaagagagccacgcttgcccgagactgaagagacagctccacttgcaccagaatggcgtcgaaatgttgatggaaaacgagggacctcagagcgggactaacaagccacgggaaacttgtcagggtcctgagtgcccaggactgcataccttcctgctctggtcacacagcgggttcaactgtctgttatgcgcagagatgctgggccgtaaagaggacctattgcaccattggaagcaccagcataactgcgaagatccaagtaagttatgggccatcttgaacaccgtttccaaccagggcgtgattgaactgagcagtgaagcggaaaagtag

SEQ ID NO: 55118 - DNA, 2487 bp, Artificial Sequence
  derived and/or modified sequence
atgcagaactccgtgtccgttcccccaaaagatgagggggagagcaatataccctcgggaactattcagtcacggaagggtctccagaataaatctcaatttagaacgatcgcaccgaaaatcgtaccaaaagtacttacttcaaggatgctgccttgccactcccctagcaggagcgaccaggtcaatctgggaccttctatcaatagcaagttattggggatgagcactcagaactacgccttgatgcaagtggcgggtcaagagggaacgtttagtctcgtggccctgccccatgtcgcaagtgcccagcctatccaaaaaccaaggatgtccctgcccgagaacctgaagttgcctatcccacgctatcaaccccctcgcaactctaaggcatcccgtaagaagcctattctgatcttcccaaagtctgggtgctccaaagcccctgcccagacgcagatgtgtcctcaaatgagtccgtcgccccctcaccacccagagctgctgtacaaaccgtctccgtttgaggaggtgccatctctggagcaggcccctgccagcatttcaacagctgctctgactaacggttctgaccatggcgatcttcgcccaccagtgactaacactcacggatccctgaaccctcctgcaacccccgcaagcagtactcctgaagagcccgctaagcaggacttgacagcacttagcggaaaggcccacttcgttagtaaaatcactagctcaaagccctcagctgtagcctccgagaaattcaaagagcaggtcgacctggcaaagaccatgaccaacctgtcaccgacaatactcgggaacgctgtccagctgatttcctccgtgcctaaagggaaactaccgattcccccttatagccgtatgaagacaatggaagtgtacaaaatcaaatccgacgctaacattgctggcttcagcctacctggacccaaagctgactgtgataagatcccctcgacaaccgagggctttaacgcggcaactaaggtggccagtagactccctgtaccccaagtgagccagcagagtgcatgtgagtccgcgttttgtcccccaactaagttagacctgaatcacaaaacgaagcttaatagtggggctgccaagaggaagggcagaaaacgcaaagtgcctgacgagattctggcctttcagggcaagcgacgtaagtatatcattaataaatgccgggacggcaaggaacgcgtcaaaaacgacccccaggagtttcgtgatcagaaactgggaactctgaaaaagtacagatcaatcatgcccaagccgataatggtcattcctacacttgcgtcactggcctccccaaccacacttcagtcccaaatgctgggcggtctgggtcaagacgttctgctgaataacagcctgactcctaaatacctcgggtgcaagcaagacaattctagctcccccaaaccatcctcagttttccgcaatgggttctcaggcatcaaaaaaccctggcatcgctgccacgtgtgcaaccatcacttccagtttaagcagcacctgcgcgaccatatgaatactcatacaaaccggaggccttacagctgccggatctgcaggaagtcctacgtccggcctgggagcttgtctacccatatgaaactgcatcacggcgagaaccgtctgaaaaaattgatgtgctgcgagttttgtgccaaggtgtttggccacatcagggtttatttcggacaccttaaggaggtccatcgcgtcgtgatcagcactgagccggcacctagcgagttacagccaggcgatatacctaagaatagagacatgtcagtgagagggatggagggttctctggagcgtgaaaataagtccaatttggaagaggattttctgcttaatcaggccgatgaggtcaagttgcaaattaagtgcggaagatgtcagatcaccgctcagtcctttgctgagatcaaatttcatctcctggacgtacatggtgaggagatcgaggggcgacttcaggaaggtacattccctggaagcaagggaacacaggaagagctcgttcaacatgcaagcccagattggaagaggcaccctgaacgtggcaagcccgagaaggtgcacagcagctccgaggaatctcacgcttgccctcgccttaagagacaactgcacctgcaccagaacggggtggaaatgctgatggaaaacgaagggccacaaagcggcacaaacaagcccagggaaacctgtcaggggcctgaatgtcccggacttcacactttcttgctgtggtctcactcaggatttaactgcctgttatgcgcagaaatgttgggacgtaaagaagatctgctgcatcattggaaacatcagcataattgcgaggaccccagcaaattatgggccattttgaataccgttagcaaccaaggtgttatcgagttatcatctgaggctgagaaatag

SEQ ID NO: 55119 - DNA, 2487 bp, Artificial Sequence
  derived and/or modified sequence
atgcaaaactccgtgagcgttccccctaaggatgaaggcgaatccaacataccaagcggcactattcagagccggaagggattgcagaacaagagtcagtttcgcacaatcgctcctaagattgttccaaaagtgctgactagccgaatgctcccctgccattcccctagtcgcagtgatcaggtcaacctcggcccttcaattaactcaaagctcttaggcatgagcacacagaactatgccctgatgcaggttgccggtcaggaaggaactttttcactcgtcgccctgccacacgtcgcttccgcccagccgattcagaagcctcgaatgagcttgcccgagaatctgaagcttcccattcctcggtatcagcctccccgaaatagcaaggctagcagaaagaaacccatactgatcttcccaaagtccgggtgttcaaaagcaccagcgcagactcagatgtgccctcagatgagcccaagcccccctcaccatccagaactgctgtacaagcctagcccctttgaagaggtgccgtcactagaacaagctccagcatccatttctacagctgcattgactaatggttccgatcatggagatttgcgacccccagtgacaaatacgcatggttccctaaacccacccgcaacccccgcttcctccacccccgaggaacccgctaaacaggatcttactgcgctgtctgggaaggcgcattttgtcagtaagataacatcctctaagccttcagccgttgcatcggagaagttcaaagagcaggtcgacctggcaaaaaccatgaccaatctttcgcccacaattcttgggaacgccgttcagctgatcagcagcgtacccaagggtaagctgcccattcccccatacagccgcatgaagacaatggaggtgtacaagattaagagcgatgccaacatagccggtttttccctcccagggcctaaggcagattgcgacaaaatcccatcaaccaccgagggtttcaacgccgctacaaaggtagctagcaggctgcctgttccccaagtgagccagcagtccgcttgtgaaagcgctttctgccccccaacgaaattagaccttaatcataagactaaactgaattccggcgcagccaagagaaagggcagaaagagaaaggtccccgacgaaatactggcatttcaagggaagcggcgtaaatatatcatcaacaaatgtagggacgggaaggaaagggtcaaaaacgatccacaggagttccgcgaccagaagctcggcacgctcaagaagtacagatcaatcatgcccaaacctatcatggtgatccctactctggcatcgctggcttctcccaccacactgcagagccagatgttagggggattggggcaggatgtcctcctaaacaacagcctgacaccaaagtatcttgggtgcaagcaggataattcaagctccccaaagccgagctcagtgtttcgtaacggatttagcggtatcaaaaaaccttggcacaggtgtcacgtctgcaatcatcatttccagtttaagcagcacctcagagaccacatgaacacacatacaaatcgtcggccatattcatgtcggatctgtaggaagagctatgttagacctgggagtctctccactcacatgaagctccaccatggggaaaatcgactcaagaaactcatgtgctgcgagttttgtgccaaagttttcgggcatatccgagtttatttcggtcacttgaaggaagtccaccgagtggtcataagcacagaacctgcccctagtgaactccagccgggagatattcccaagaatagagacatgtctgttaggggcatggagggatctctggagcgcgagaataaaagcaatctggaagaagattttttactcaatcaggcagacgaagttaagctgcaaatcaagtgtggacgctgccagatcaccgcgcagtccttcgctgaaatcaaattccatctcttggacgtgcatggcgaggagatcgaggggcgtctgcaggaaggaacttttccgggatccaaagggacgcaggaggagctcgtacagcatgcgtctcccgactggaagcgccaccctgaacgaggcaaaccagagaaagttcatagctccagcgaggagagccatgcctgcccccgtctaaaaagacagttacacctgcaccaaaatggggtagaaatgttgatggagaatgagggcccacagtccggaacgaacaaaccacgggaaacttgtcagggccctgaatgccctggtctgcatactttccttctgtggtctcattccgggttcaactgtctcctgtgtgcagagatgctaggccgaaaagaagatttacttcaccattggaaacatcagcacaattgcgaagatccgtctaaactgtgggcaattctaaatacagtttctaaccaaggagtaatcgagctcagcagtgaggccgagaagtag

SEQ ID NO: 55120 - DNA, 2487 bp, Artificial Sequence
  derived and/or modified sequence
atgcaaaattcagttagcgttccaccaaaagacgaaggtgaatcaaacataccaagcggaaccatccagagccgcaaaggcttgcaaaacaagagtcagttccggaccatcgccccaaagatcgttcccaaggtgttgacctcaaggatgcttccctgtcactcccccagccgctcagaccaggtcaacctggggccatcaatcaatagcaaacttctaggcatgtcaacccagaactacgcactcatgcaggtggccggacaggaggggacctttagtttggtcgccctgcctcatgtggcttctgcacagcctatccagaaaccacgcatgagtctgcccgagaacctaaaattaccgattcccagataccagcctcccaggaattcaaaagcaagccgcaaaaagcccattctcatcttcccgaaatcaggctgttctaaggctccagctcagacgcagatgtgtccacaaatgagcccgtcccctccacaccatcccgaattgctgtataagccgagtccctttgaagaagtgccgagcttggaacaagctccggctagtatcagcactgcagccttgactaatggttctgatcacggtgatctgaggcctccggtcaccaatactcatggcagtctgaacccccctgccacccctgcctcaagcacgcctgaagagcctgctaagcaggatttgacagcactaagcgggaaggctcattttgtgtcgaagattacttctagcaaacccagcgccgtagcgagcgagaagttcaaggaacaggtcgatctcgcaaagactatgactaacctgtccccgaccattcttgggaatgccgtgcaattgatttcatcagtccccaagggcaaacttcccatcccaccatattctagaatgaagaccatggaggtgtataaaataaagagcgatgccaatatagcgggtttttcgcttcctggacccaaagctgactgtgacaaaattccatccaccacagagggttttaacgctgcaactaaagtggcaagccgcttgccagtaccgcaggtcagccagcagtccgcatgcgagagtgcattttgtccccctacaaaactggacttaaaccacaagacaaagctcaactcgggggctgctaagcgaaagggcagaaaacggaaggttcctgacgaaatcttagcattccagggtaagagacggaagtacataattaataaatgtcgagatgggaaggagagggtgaaaaatgacccccaggaattcagagaccagaaactggggacactgaagaaataccggtccatcatgccaaaaccgattatggtcattcctacactggcttctcttgcctctccaactaccctgcagagtcagatgttgggtggtctggggcaagacgtgcttcttaataactcactgactcccaaatatctgggctgtaagcaggacaatagctcaagccccaagccctcctcagtgtttagaaacgggtttagcggcattaagaaaccttggcatcgctgccacgtatgcaatcaccactttcagtttaagcagcacctgagagaccacatgaacacacacaccaaccggagaccctactcttgtcgcatatgccgcaagtcttacgttcgacctgggtcgctgtccacccacatgaagctacaccacggtgaaaaccgccttaaaaagctgatgtgttgcgaattctgcgccaaagtgttcgggcacattcgagtttatttcggacatttgaaggaggtgcatcgtgtggtaattagcacagagccagctccttcagaactgcagccaggcgatataccaaaaaaccgagatatgtctgtacgcggaatggaaggctccctggaacgggaaaacaaaagcaatctggaggaagattttttactgaatcaggcggacgaagtgaaattgcagataaagtgtgggcgttgtcaaattactgcccagtcctttgcagaaatcaagttccatctgctagatgtacacggcgaggagatcgaaggtcggctgcaggagggcactttccctggatctaagggcactcaagaggagttggtgcagcatgccagccctgactggaagcggcaccccgagaggggaaaacctgagaaggtgcatagctcctcggaagagagtcacgcctgcccaagactgaaacggcaacttcacctgcaccagaacggcgttgagatgctgatggaaaacgagggcccacagagcgggacgaataagccacgcgaaacctgccaagggcctgagtgtcctggacttcacacctttctgttgtggtcccactccgggttcaactgtctgctttgcgcagagatgctagggaggaaagaggatctattgcatcattggaaacatcagcacaactgtgaagaccctagcaagttatgggctatccttaacactgtgagtaatcagggcgtgattgaactatcgtcggaggctgagaagtag

SEQ ID NO: 55121 - DNA, 3243 bp, Artificial Sequence
  derived and/or modified sequence
aattaattaaaaggatttacggtatatcttatgactctacaggagccttgggatatagataaaaatgaatgccatttcccatccagtactgaagtgttaaagttagaagacatttgctaagtcaaatcacttcaggaagctcatcctgggagtggaggaacagatgttctgtcattgccacattcttctggacacagactggagaactataggaatgtatgttgaagaaagtacgcacatcttatcttctgaacattttgatggaattaaccacaaacttcatgcaagaacagtaaaaggaaagatactattcaagtccagtacatcataatgcagaattctgtatcagtaccaccaaaagatgaagatccaatcctttgatggcaatggaggaggaggaggacacacgttgcacattctccaaatatccaacagcctttctggatttctcagagtcctatggatagtgaatcaaacatcccttctggaacaatacagagtaggaaaggtttgcagaataagagtcagtttaggaccattgcaccaaaaattgtgcccaaagtcctaacgtccagaatgctgccatgtcattcaccatcacgctctgatcaggtgaatctgggaccctccatcaactccaagctgctggggatgtccacccagaactatgccctgatgcaggttgctggccaggaggggacattttctcttgttgctctgccacatgttgcctcagctcagccaattcagaaacccagaatgtccctacctgaaaacctgaaacttcctattcctagatatcaaccccctagaaatagcaaagcatcaagaaagaaacccatcctgatctttcctaagagtggctgtagcaaagctcctgcccaaacccaaatgtgtcctcagatgtccccttccccacctcaccaccctgaactcctgtacaaacccagtccatttgaggaagtaccatcactagagcaagccccagccagcattagcacagctgcgctgaccaatggaagtgaccatggggacttgagaccaccagtgaccaacacccatggcagtctgaaccctcctgctaccccagcatcatccacaccagaggagcctgccaagcaggacctcacagctctttcagggaaagcacactttgtaagcaagataacatctagtaaaccttctgctgttgccagtgaaaaatttaaagaacaagttgatcttgcaaaaaccatgaccaatttatcaccaaccattcttggcaatgcagttcagttgatctcttcagtccccaaagggaaactgccaatcccaccctactcaagaatgaagacaatggaggtttacaaaatcaaatcagatgctaacattgcaggtttttctttaccaggacctaaggccgactgtgataagataccctccaccacagaaggctttaatgcagccaccaaggtggcaagcaggctacctgttccacaagtgtcacagcagagtgcctgtgaaagtgccttttgtccacccaccaaacttgatcttaaccacaaaacaaaactgaacagtggagcagcaaagagaaaaggaagaaaacggaaggtaccagatgaaattttggcatttcagggaaaaaggaggaaatatatcattaataagtgtagagatggtaaagaaagagtaaaaaatgatccccaagaattcagagaccaaaagctggggaccctgaaaaaataccgtagcattatgcccaaacctatcatggtcatacccactttggcctccctggcttctccaactacactacagtcccagatgcttgggggcctaggacaggatgttttgttaaataattcactcactcctaaatatcttggctgtaagcaagacaacagctcttcccctaagcccagctccgtgttcagaaatggattctctggcattaagaagccttggcacagatgtcacgtctgcaaccaccacttccagttcaaacagcaccttcgagaccacatgaatacacacaccaacagacgcccttacagttgtcggatttgtcgcaagtcctatgtacgtcctggcagcctgagcacacacatgaaacttcatcatggtgagaaccgtctgaagaaactcatgtgttgtgagttttgtgcaaaagtgtttggccacatccgagtctattttggccatctgaaagaagtgcatagggttgtgatcagcactgagcctgcgcccagtgaactgcagccaggagacataccaaagaacagagacatgagtgtgcgaggcatggagggatcattggagagggaaaacaagtccaacctggaagaagacttccttctaaaccaggcagacgaagtcaaattacaaatcaaatgtggtcgttgtcagattactgctcagtcttttgcggaaataaaatttcatttacttgatgttcatggagaggaaattgagggcaggctacaagaagggaccttcccaggaagcaaggggactcaggaagagttggtgcagcacgctagccccgactggaaaaggcatcctgagagagggaagccggagaaggttcattcctcctccgaggaatcacatgcatgtccaagactgaaaaggcagctccaccttcatcagaatggcgtggaaatgctcatggaaaatgaaggaccccagtcaggaaccaacaagccaagggaaacctgccagggccctgagtgtcctggcctccacacgtttctcttgtggtcccattcaggctttaactgcctgctttgtgcagagatgctgggacggaaagaggacctcctccaccactggaagcaccagcataactgtgaggacccttccaaactgtgggctattttaaatacggtctccaaccagggagtgatcgaactttccagtgaagctgagaaatgagaccccaaggcagcctggggttaaggagagagctctgccgccaccttccttcagagcttcgtgctttatggtggtgcttagtcacaaagatcaaacaacaggattggtgtgagtgaacagaaatgatttttgtacatggttttattttcttaacgaaataaaatataagctctcgaagcatatttttctaactatatgcagtcttattttaaaatacgtactgattcttaatatcttagactttcagaataaataaaaagatcaaaatttgaagattgaaatttagcagaatataggctgttcttcaaatacagctctcagtgaaaa

SEQ ID NO: 55122 - DNA, 3144 bp, Artificial Sequence
  derived and/or modified sequence
aattaattaaaaggatttacggtatatcttatgactctacaggagccttgggatatagataaaaatgaatgccatttcccatccagtactgaagtgttaaagttagaagacatttgctaagtcaaatcacttcaggaagctcatcctgggagtggaggaacagatgttctgtcattgccacattcttctggacacagactggagaactataggaatgtatgttgaagaaagtacgcacatcttatcttctgaacattttgatggaattaaccacaaacttcatgcaagaacagtaaaaggaaagatactattcaagtccagtacatcataatgcagaattctgtatcagtaccaccaaaagatgaaggtgaatcaaacatcccttctggaacaatacagagtaggaaaggtttgcagaataagagtcagtttaggaccattgcaccaaaaattgtgcccaaagtcctaacgtccagaatgctgccatgtcattcaccatcacgctctgatcaggtgaatctgggaccctccatcaactccaagctgctggggatgtccacccagaactatgccctgatgcaggttgctggccaggaggggacattttctcttgttgctctgccacatgttgcctcagctcagccaattcagaaacccagaatgtccctacctgaaaacctgaaacttcctattcctagatatcaaccccctagaaatagcaaagcatcaagaaagaaacccatcctgatctttcctaagagtggctgtagcaaagctcctgcccaaacccaaatgtgtcctcagatgtccccttccccacctcaccaccctgaactcctgtacaaacccagtccatttgaggaagtaccatcactagagcaagccccagccagcattagcacagctgcgctgaccaatggaagtgaccatggggacttgagaccaccagtgaccaacacccatggcagtctgaaccctcctgctaccccagcatcatccacaccagaggagcctgccaagcaggacctcacagctctttcagggaaagcacactttgtaagcaagataacatctagtaaaccttctgctgttgccagtgaaaaatttaaagaacaagttgatcttgcaaaaaccatgaccaatttatcaccaaccattcttggcaatgcagttcagttgatctcttcagtccccaaagggaaactgccaatcccaccctactcaagaatgaagacaatggaggtttacaaaatcaaatcagatgctaacattgcaggtttttctttaccaggacctaaggccgactgtgataagataccctccaccacagaaggctttaatgcagccaccaaggtggcaagcaggctacctgttccacaagtgtcacagcagagtgcctgtgaaagtgccttttgtccacccaccaaacttgatcttaaccacaaaacaaaactgaacagtggagcagcaaagagaaaaggaagaaaacggaaggtaccagatgaaattttggcatttcagggaaaaaggaggaaatatatcattaataagtgtagagatggtaaagaaagagtaaaaaatgatccccaagaattcagagaccaaaagctggggaccctgaaaaaataccgtagcattatgcccaaacctatcatggtcatacccactttggcctccctggcttctccaactacactacagtcccagatgcttgggggcctaggacaggatgttttgttaaataattcactcactcctaaatatcttggctgtaagcaagacaacagctcttcccctaagcccagctccgtgttcagaaatggattctctggcattaagaagccttggcacagatgtcacgtctgcaaccaccacttccagttcaaacagcaccttcgagaccacatgaatacacacaccaacagacgcccttacagttgtcggatttgtcgcaagtcctatgtacgtcctggcagcctgagcacacacatgaaacttcatcatggtgagaaccgtctgaagaaactcatgtgttgtgagttttgtgcaaaagtgtttggccacatccgagtctattttggccatctgaaagaagtgcatagggttgtgatcagcactgagcctgcgcccagtgaactgcagccaggagacataccaaagaacagagacatgagtgtgcgaggcatggagggatcattggagagggaaaacaagtccaacctggaagaagacttccttctaaaccaggcagacgaagtcaaattacaaatcaaatgtggtcgttgtcagattactgctcagtcttttgcggaaataaaatttcatttacttgatgttcatggagaggaaattgagggcaggctacaagaagggaccttcccaggaagcaaggggactcaggaagagttggtgcagcacgctagccccgactggaaaaggcatcctgagagagggaagccggagaaggttcattcctcctccgaggaatcacatgcatgtccaagactgaaaaggcagctccaccttcatcagaatggcgtggaaatgctcatggaaaatgaaggaccccagtcaggaaccaacaagccaagggaaacctgccagggccctgagtgtcctggcctccacacgtttctcttgtggtcccattcaggctttaactgcctgctttgtgcagagatgctgggacggaaagaggacctcctccaccactggaagcaccagcataactgtgaggacccttccaaactgtgggctattttaaatacggtctccaaccagggagtgatcgaactttccagtgaagctgagaaatgagaccccaaggcagcctggggttaaggagagagctctgccgccaccttccttcagagcttcgtgctttatggtggtgcttagtcacaaagatcaaacaacaggattggtgtgagtgaacagaaatgatttttgtacatggttttattttcttaacgaaataaaatataagctctcgaagcatatttttctaactatatgcagtcttattttaaaatacgtactgattcttaatatcttagactttcagaataaataaaaagatcaaaatttgaagattgaaatttagcagaatataggctgttcttcaaatacagctctcagtgaaaa

SEQ ID NO: 55123 - DNA, 3106 bp, Artificial Sequence
  derived and/or modified sequence
agggcggagcctgggggcccagcggcccgcgccccgtggcttgacctccccgactgctgggcccgtgacgtcaccccgctgtgacgcgcacgctgtaggaaaactataaaaatgaatgccatttcccatccagtactgaagtgttaaagttagaagacatttgctaagtcaaatcacttcaggtatgttgaagaaagtacgcacatcttatcttctgaacattttgatggaattaaccacaaacttcatgcaagaacagtaaaaggaaagatactattcaagtccagtacatcataatgcagaattctgtatcagtaccaccaaaagatgaaggtgaatcaaacatcccttctggaacaatacagagtaggaaaggtttgcagaataagagtcagtttaggaccattgcaccaaaaattgtgcccaaagtcctaacgtccagaatgctgccatgtcattcaccatcacgctctgatcaggtgaatctgggaccctccatcaactccaagctgctggggatgtccacccagaactatgccctgatgcaggttgctggccaggaggggacattttctcttgttgctctgccacatgttgcctcagctcagccaattcagaaacccagaatgtccctacctgaaaacctgaaacttcctattcctagatatcaaccccctagaaatagcaaagcatcaagaaagaaacccatcctgatctttcctaagagtggctgtagcaaagctcctgcccaaacccaaatgtgtcctcagatgtccccttccccacctcaccaccctgaactcctgtacaaacccagtccatttgaggaagtaccatcactagagcaagccccagccagcattagcacagctgcgctgaccaatggaagtgaccatggggacttgagaccaccagtgaccaacacccatggcagtctgaaccctcctgctaccccagcatcatccacaccagaggagcctgccaagcaggacctcacagctctttcagggaaagcacactttgtaagcaagataacatctagtaaaccttctgctgttgccagtgaaaaatttaaagaacaagttgatcttgcaaaaaccatgaccaatttatcaccaaccattcttggcaatgcagttcagttgatctcttcagtccccaaagggaaactgccaatcccaccctactcaagaatgaagacaatggaggtttacaaaatcaaatcagatgctaacattgcaggtttttctttaccaggacctaaggccgactgtgataagataccctccaccacagaaggctttaatgcagccaccaaggtggcaagcaggctacctgttccacaagtgtcacagcagagtgcctgtgaaagtgccttttgtccacccaccaaacttgatcttaaccacaaaacaaaactgaacagtggagcagcaaagagaaaaggaagaaaacggaaggtaccagatgaaattttggcatttcagggaaaaaggaggaaatatatcattaataagtgtagagatggtaaagaaagagtaaaaaatgatccccaagaattcagagaccaaaagctggggaccctgaaaaaataccgtagcattatgcccaaacctatcatggtcatacccactttggcctccctggcttctccaactacactacagtcccagatgcttgggggcctaggacaggatgttttgttaaataattcactcactcctaaatatcttggctgtaagcaagacaacagctcttcccctaagcccagctccgtgttcagaaatggattctctggcattaagaagccttggcacagatgtcacgtctgcaaccaccacttccagttcaaacagcaccttcgagaccacatgaatacacacaccaacagacgcccttacagttgtcggatttgtcgcaagtcctatgtacgtcctggcagcctgagcacacacatgaaacttcatcatggtgagaaccgtctgaagaaactcatgtgttgtgagttttgtgcaaaagtgtttggccacatccgagtctattttggccatctgaaagaagtgcatagggttgtgatcagcactgagcctgcgcccagtgaactgcagccaggagacataccaaagaacagagacatgagtgtgcgaggcatggagggatcattggagagggaaaacaagtccaacctggaagaagacttccttctaaaccaggcagacgaagtcaaattacaaatcaaatgtggtcgttgtcagattactgctcagtcttttgcggaaataaaatttcatttacttgatgttcatggagaggaaattgagggcaggctacaagaagggaccttcccaggaagcaaggggactcaggaagagttggtgcagcacgctagccccgactggaaaaggcatcctgagagagggaagccggagaaggttcattcctcctccgaggaatcacatgcatgtccaagactgaaaaggcagctccaccttcatcagaatggcgtggaaatgctcatggaaaatgaaggaccccagtcaggaaccaacaagccaagggaaacctgccagggccctgagtgtcctggcctccacacgtttctcttgtggtcccattcaggctttaactgcctgctttgtgcagagatgctgggacggaaagaggacctcctccaccactggaagcaccagcataactgtgaggacccttccaaactgtgggctattttaaatacggtctccaaccagggagtgatcgaactttccagtgaagctgagaaatgagaccccaaggcagcctggggttaaggagagagctctgccgccaccttccttcagagcttcgtgctttatggtggtgcttagtcacaaagatcaaacaacaggattggtgtgagtgaacagaaatgatttttgtacatggttttattttcttaacgaaataaaatataagctctcgaagcatatttttctaactatatgcagtcttattttaaaatacgtactgattcttaatatcttagactttcagaataaataaaaagatcaaaatttgaagattgaaatttagcagaatataggctgttcttcaaatacagctctcagtg

SEQ ID NO: 55124 - DNA, 3293 bp, Artificial Sequence
  derived and/or modified sequence
agggcggagcctgggggcccagcggcccgcgccccgtggcttgacctccccgactgctgggcccgtgacgtcaccccgctgtgacgcgcacgctgtaggaaaactaattaattaaaaggatttacggtatatcttatgactctacaggagccttgggatatagataaaaatgaatgccatttcccatccagtactgaagtgttaaagttagaagacatttgctaagtcaaatcacttcagaagcagagctcgggaaagaaattgaagaagaaaatgaaactgtcaaatgaaaacaacattggaaggagtacaagagaaaaagatgatacaggaaaaacagtgaggtcatggaaattagacatgagagaggtatgttgaagaaagtacgcacatcttatcttctgaacattttgatggaattaaccacaaacttcatgcaagaacagtaaaaggaaagatactattcaagtccagtacatcataatgcagaattctgtatcagtaccaccaaaagatgaaggtgaatcaaacatcccttctggaacaatacagagtaggaaaggtttgcagaataagagtcagtttaggaccattgcaccaaaaattgtgcccaaagtcctaacgtccagaatgctgccatgtcattcaccatcacgctctgatcaggtgaatctgggaccctccatcaactccaagctgctggggatgtccacccagaactatgccctgatgcaggttgctggccaggaggggacattttctcttgttgctctgccacatgttgcctcagctcagccaattcagaaacccagaatgtccctacctgaaaacctgaaacttcctattcctagatatcaaccccctagaaatagcaaagcatcaagaaagaaacccatcctgatctttcctaagagtggctgtagcaaagctcctgcccaaacccaaatgtgtcctcagatgtccccttccccacctcaccaccctgaactcctgtacaaacccagtccatttgaggaagtaccatcactagagcaagccccagccagcattagcacagctgcgctgaccaatggaagtgaccatggggacttgagaccaccagtgaccaacacccatggcagtctgaaccctcctgctaccccagcatcatccacaccagaggagcctgccaagcaggacctcacagctctttcagggaaagcacactttgtaagcaagataacatctagtaaaccttctgctgttgccagtgaaaaatttaaagaacaagttgatcttgcaaaaaccatgaccaatttatcaccaaccattcttggcaatgcagttcagttgatctcttcagtccccaaagggaaactgccaatcccaccctactcaagaatgaagacaatggaggtttacaaaatcaaatcagatgctaacattgcaggtttttctttaccaggacctaaggccgactgtgataagataccctccaccacagaaggctttaatgcagccaccaaggtggcaagcaggctacctgttccacaagtgtcacagcagagtgcctgtgaaagtgccttttgtccacccaccaaacttgatcttaaccacaaaacaaaactgaacagtggagcagcaaagagaaaaggaagaaaacggaaggtaccagatgaaattttggcatttcagggaaaaaggaggaaatatatcattaataagtgtagagatggtaaagaaagagtaaaaaatgatccccaagaattcagagaccaaaagctggggaccctgaaaaaataccgtagcattatgcccaaacctatcatggtcatacccactttggcctccctggcttctccaactacactacagtcccagatgcttgggggcctaggacaggatgttttgttaaataattcactcactcctaaatatcttggctgtaagcaagacaacagctcttcccctaagcccagctccgtgttcagaaatggattctctggcattaagaagccttggcacagatgtcacgtctgcaaccaccacttccagttcaaacagcaccttcgagaccacatgaatacacacaccaacagacgcccttacagttgtcggatttgtcgcaagtcctatgtacgtcctggcagcctgagcacacacatgaaacttcatcatggtgagaaccgtctgaagaaactcatgtgttgtgagttttgtgcaaaagtgtttggccacatccgagtctattttggccatctgaaagaagtgcatagggttgtgatcagcactgagcctgcgcccagtgaactgcagccaggagacataccaaagaacagagacatgagtgtgcgaggcatggagggatcattggagagggaaaacaagtccaacctggaagaagacttccttctaaaccaggcagacgaagtcaaattacaaatcaaatgtggtcgttgtcagattactgctcagtcttttgcggaaataaaatttcatttacttgatgttcatggagaggaaattgagggcaggctacaagaagggaccttcccaggaagcaaggggactcaggaagagttggtgcagcacgctagccccgactggaaaaggcatcctgagagagggaagccggagaaggttcattcctcctccgaggaatcacatgcatgtccaagactgaaaaggcagctccaccttcatcagaatggcgtggaaatgctcatggaaaatgaaggaccccagtcaggaaccaacaagccaagggaaacctgccagggccctgagtgtcctggcctccacacgtttctcttgtggtcccattcaggctttaactgcctgctttgtgcagagatgctgggacggaaagaggacctcctccaccactggaagcaccagcataactgtgaggacccttccaaactgtgggctattttaaatacggtctccaaccagggagtgatcgaactttccagtgaagctgagaaatgagaccccaaggcagcctggggttaaggagagagctctgccgccaccttccttcagagcttcgtgctttatggtggtgcttagtcacaaagatcaaacaacaggattggtgtgagtgaacagaaatgatttttgtacatggttttattttcttaacgaaataaaatataagctctcgaagcatatttttctaactatatgcagtcttattttaaaatacgtactgattcttaatatcttagactttcagaataaataaaaagatcaaaatttgaagattgaaatttagcagaatataggctgttcttcaaatacagctctcagtg

SEQ ID NO: 55125 - DNA, 3245 bp, Artificial Sequence
  derived and/or modified sequence
agggcggagcctgggggcccagcggcccgcgccccgtggcttgacctccccgactgctgggcccgtgacgtcaccccgctgtgacgcgcacgctgtaggaaaactaattaattaaaaggatttacggtatatcttatgactctacaggagccttgggatatagataaaaatgaatgccatttcccatccagtactgaagtgttaaagttagaagacatttgctaagtcaaatcacttcaggaagctcatcctgggagtggaggaacagatgttctgtcattgccacattcttctggacacagactggagaactataggaatgtatgttgaagaaagtacgcacatcttatcttctgaacattttgatggaattaaccacaaacttcatgcaagaacagtaaaaggaaagatactattcaagtccagtacatcataatgcagaattctgtatcagtaccaccaaaagatgaaggtgaatcaaacatcccttctggaacaatacagagtaggaaaggtttgcagaataagagtcagtttaggaccattgcaccaaaaattgtgcccaaagtcctaacgtccagaatgctgccatgtcattcaccatcacgctctgatcaggtgaatctgggaccctccatcaactccaagctgctggggatgtccacccagaactatgccctgatgcaggttgctggccaggaggggacattttctcttgttgctctgccacatgttgcctcagctcagccaattcagaaacccagaatgtccctacctgaaaacctgaaacttcctattcctagatatcaaccccctagaaatagcaaagcatcaagaaagaaacccatcctgatctttcctaagagtggctgtagcaaagctcctgcccaaacccaaatgtgtcctcagatgtccccttccccacctcaccaccctgaactcctgtacaaacccagtccatttgaggaagtaccatcactagagcaagccccagccagcattagcacagctgcgctgaccaatggaagtgaccatggggacttgagaccaccagtgaccaacacccatggcagtctgaaccctcctgctaccccagcatcatccacaccagaggagcctgccaagcaggacctcacagctctttcagggaaagcacactttgtaagcaagataacatctagtaaaccttctgctgttgccagtgaaaaatttaaagaacaagttgatcttgcaaaaaccatgaccaatttatcaccaaccattcttggcaatgcagttcagttgatctcttcagtccccaaagggaaactgccaatcccaccctactcaagaatgaagacaatggaggtttacaaaatcaaatcagatgctaacattgcaggtttttctttaccaggacctaaggccgactgtgataagataccctccaccacagaaggctttaatgcagccaccaaggtggcaagcaggctacctgttccacaagtgtcacagcagagtgcctgtgaaagtgccttttgtccacccaccaaacttgatcttaaccacaaaacaaaactgaacagtggagcagcaaagagaaaaggaagaaaacggaaggtaccagatgaaattttggcatttcagggaaaaaggaggaaatatatcattaataagtgtagagatggtaaagaaagagtaaaaaatgatccccaagaattcagagaccaaaagctggggaccctgaaaaaataccgtagcattatgcccaaacctatcatggtcatacccactttggcctccctggcttctccaactacactacagtcccagatgcttgggggcctaggacaggatgttttgttaaataattcactcactcctaaatatcttggctgtaagcaagacaacagctcttcccctaagcccagctccgtgttcagaaatggattctctggcattaagaagccttggcacagatgtcacgtctgcaaccaccacttccagttcaaacagcaccttcgagaccacatgaatacacacaccaacagacgcccttacagttgtcggatttgtcgcaagtcctatgtacgtcctggcagcctgagcacacacatgaaacttcatcatggtgagaaccgtctgaagaaactcatgtgttgtgagttttgtgcaaaagtgtttggccacatccgagtctattttggccatctgaaagaagtgcatagggttgtgatcagcactgagcctgcgcccagtgaactgcagccaggagacataccaaagaacagagacatgagtgtgcgaggcatggagggatcattggagagggaaaacaagtccaacctggaagaagacttccttctaaaccaggcagacgaagtcaaattacaaatcaaatgtggtcgttgtcagattactgctcagtcttttgcggaaataaaatttcatttacttgatgttcatggagaggaaattgagggcaggctacaagaagggaccttcccaggaagcaaggggactcaggaagagttggtgcagcacgctagccccgactggaaaaggcatcctgagagagggaagccggagaaggttcattcctcctccgaggaatcacatgcatgtccaagactgaaaaggcagctccaccttcatcagaatggcgtggaaatgctcatggaaaatgaaggaccccagtcaggaaccaacaagccaagggaaacctgccagggccctgagtgtcctggcctccacacgtttctcttgtggtcccattcaggctttaactgcctgctttgtgcagagatgctgggacggaaagaggacctcctccaccactggaagcaccagcataactgtgaggacccttccaaactgtgggctattttaaatacggtctccaaccagggagtgatcgaactttccagtgaagctgagaaatgagaccccaaggcagcctggggttaaggagagagctctgccgccaccttccttcagagcttcgtgctttatggtggtgcttagtcacaaagatcaaacaacaggattggtgtgagtgaacagaaatgatttttgtacatggttttattttcttaacgaaataaaatataagctctcgaagcatatttttctaactatatgcagtcttattttaaaatacgtactgattcttaatatcttagactttcagaataaataaaaagatcaaaatttgaagattgaaatttagcagaatataggctgttcttcaaatacagctctcagtg

SEQ ID NO: 55126 - DNA, 3344 bp, Artificial Sequence
  derived and/or modified sequence
agggcggagcctgggggcccagcggcccgcgccccgtggcttgacctccccgactgctgggcccgtgacgtcaccccgctgtgacgcgcacgctgtaggaaaactaattaattaaaaggatttacggtatatcttatgactctacaggagccttgggatatagataaaaatgaatgccatttcccatccagtactgaagtgttaaagttagaagacatttgctaagtcaaatcacttcaggaagctcatcctgggagtggaggaacagatgttctgtcattgccacattcttctggacacagactggagaactataggaatgtatgttgaagaaagtacgcacatcttatcttctgaacattttgatggaattaaccacaaacttcatgcaagaacagtaaaaggaaagatactattcaagtccagtacatcataatgcagaattctgtatcagtaccaccaaaagatgaagatccaatcctttgatggcaatggaggaggaggaggacacacgttgcacattctccaaatatccaacagcctttctggatttctcagagtcctatggatagtgaatcaaacatcccttctggaacaatacagagtaggaaaggtttgcagaataagagtcagtttaggaccattgcaccaaaaattgtgcccaaagtcctaacgtccagaatgctgccatgtcattcaccatcacgctctgatcaggtgaatctgggaccctccatcaactccaagctgctggggatgtccacccagaactatgccctgatgcaggttgctggccaggaggggacattttctcttgttgctctgccacatgttgcctcagctcagccaattcagaaacccagaatgtccctacctgaaaacctgaaacttcctattcctagatatcaaccccctagaaatagcaaagcatcaagaaagaaacccatcctgatctttcctaagagtggctgtagcaaagctcctgcccaaacccaaatgtgtcctcagatgtccccttccccacctcaccaccctgaactcctgtacaaacccagtccatttgaggaagtaccatcactagagcaagccccagccagcattagcacagctgcgctgaccaatggaagtgaccatggggacttgagaccaccagtgaccaacacccatggcagtctgaaccctcctgctaccccagcatcatccacaccagaggagcctgccaagcaggacctcacagctctttcagggaaagcacactttgtaagcaagataacatctagtaaaccttctgctgttgccagtgaaaaatttaaagaacaagttgatcttgcaaaaaccatgaccaatttatcaccaaccattcttggcaatgcagttcagttgatctcttcagtccccaaagggaaactgccaatcccaccctactcaagaatgaagacaatggaggtttacaaaatcaaatcagatgctaacattgcaggtttttctttaccaggacctaaggccgactgtgataagataccctccaccacagaaggctttaatgcagccaccaaggtggcaagcaggctacctgttccacaagtgtcacagcagagtgcctgtgaaagtgccttttgtccacccaccaaacttgatcttaaccacaaaacaaaactgaacagtggagcagcaaagagaaaaggaagaaaacggaaggtaccagatgaaattttggcatttcagggaaaaaggaggaaatatatcattaataagtgtagagatggtaaagaaagagtaaaaaatgatccccaagaattcagagaccaaaagctggggaccctgaaaaaataccgtagcattatgcccaaacctatcatggtcatacccactttggcctccctggcttctccaactacactacagtcccagatgcttgggggcctaggacaggatgttttgttaaataattcactcactcctaaatatcttggctgtaagcaagacaacagctcttcccctaagcccagctccgtgttcagaaatggattctctggcattaagaagccttggcacagatgtcacgtctgcaaccaccacttccagttcaaacagcaccttcgagaccacatgaatacacacaccaacagacgcccttacagttgtcggatttgtcgcaagtcctatgtacgtcctggcagcctgagcacacacatgaaacttcatcatggtgagaaccgtctgaagaaactcatgtgttgtgagttttgtgcaaaagtgtttggccacatccgagtctattttggccatctgaaagaagtgcatagggttgtgatcagcactgagcctgcgcccagtgaactgcagccaggagacataccaaagaacagagacatgagtgtgcgaggcatggagggatcattggagagggaaaacaagtccaacctggaagaagacttccttctaaaccaggcagacgaagtcaaattacaaatcaaatgtggtcgttgtcagattactgctcagtcttttgcggaaataaaatttcatttacttgatgttcatggagaggaaattgagggcaggctacaagaagggaccttcccaggaagcaaggggactcaggaagagttggtgcagcacgctagccccgactggaaaaggcatcctgagagagggaagccggagaaggttcattcctcctccgaggaatcacatgcatgtccaagactgaaaaggcagctccaccttcatcagaatggcgtggaaatgctcatggaaaatgaaggaccccagtcaggaaccaacaagccaagggaaacctgccagggccctgagtgtcctggcctccacacgtttctcttgtggtcccattcaggctttaactgcctgctttgtgcagagatgctgggacggaaagaggacctcctccaccactggaagcaccagcataactgtgaggacccttccaaactgtgggctattttaaatacggtctccaaccagggagtgatcgaactttccagtgaagctgagaaatgagaccccaaggcagcctggggttaaggagagagctctgccgccaccttccttcagagcttcgtgctttatggtggtgcttagtcacaaagatcaaacaacaggattggtgtgagtgaacagaaatgatttttgtacatggttttattttcttaacgaaataaaatataagctctcgaagcatatttttctaactatatgcagtcttattttaaaatacgtactgattcttaatatcttagactttcagaataaataaaaagatcaaaatttgaagattgaaatttagcagaatataggctgttcttcaaatacagctctcagtg

SEQ ID NO: 55127 - DNA, 3418 bp, Artificial Sequence
  derived and/or modified sequence
attaagctgagaccagaaggctgagtggtggtgacctacaagaagaagaagggaaggtcataacagtaatgacttggagtggagaggccctgcaggttggagaagttcagtgtggctcaccatggagtgtcagagtgagggagatgactgctgagctccgagaggtgaacagagcccctgaattaattaaaaggatttacggtatatcttatgactctacaggagccttgggatatagataaaaatgaatgccatttcccatccagtactgaagtgttaaagttagaagacatttgctaagtcaaatcacttcaggtatgttgaagaaagtacgcacatcttatcttctgaacattttgatggaattaaccacaaacttcatgcaagaacagtaaaaggaaagatactattcaagtccagtacatcataatgcagaattctgtatcagtaccaccaaaagatgaagcaagcaaggagaagcttaggagaaaaaataatggaacaagtatcaggaaagctggactccattccatacctgcctccaaccagctgtggaaccccaggcaaagttattttgcccctgagcctcagttttctcattgaaaaatcgagaatgactaggtgttcctttcaggctctaaaaaggtgaatcaaacatcccttctggaacaatacagagtaggaaaggtttgcagaataagagtcagtttaggaccattgcaccaaaaattgtgcccaaagtcctaacgtccagaatgctgccatgtcattcaccatcacgctctgatcaggtgaatctgggaccctccatcaactccaagctgctggggatgtccacccagaactatgccctgatgcaggttgctggccaggaggggacattttctcttgttgctctgccacatgttgcctcagctcagccaattcagaaacccagaatgtccctacctgaaaacctgaaacttcctattcctagatatcaaccccctagaaatagcaaagcatcaagaaagaaacccatcctgatctttcctaagagtggctgtagcaaagctcctgcccaaacccaaatgtgtcctcagatgtccccttccccacctcaccaccctgaactcctgtacaaacccagtccatttgaggaagtaccatcactagagcaagccccagccagcattagcacagctgcgctgaccaatggaagtgaccatggggacttgagaccaccagtgaccaacacccatggcagtctgaaccctcctgctaccccagcatcatccacaccagaggagcctgccaagcaggacctcacagctctttcagggaaagcacactttgtaagcaagataacatctagtaaaccttctgctgttgccagtgaaaaatttaaagaacaagttgatcttgcaaaaaccatgaccaatttatcaccaaccattcttggcaatgcagttcagttgatctcttcagtccccaaagggaaactgccaatcccaccctactcaagaatgaagacaatggaggtttacaaaatcaaatcagatgctaacattgcaggtttttctttaccaggacctaaggccgactgtgataagataccctccaccacagaaggctttaatgcagccaccaaggtggcaagcaggctacctgttccacaagtgtcacagcagagtgcctgtgaaagtgccttttgtccacccaccaaacttgatcttaaccacaaaacaaaactgaacagtggagcagcaaagagaaaaggaagaaaacggaaggtaccagatgaaattttggcatttcagggaaaaaggaggaaatatatcattaataagtgtagagatggtaaagaaagagtaaaaaatgatccccaagaattcagagaccaaaagctggggaccctgaaaaaataccgtagcattatgcccaaacctatcatggtcatacccactttggcctccctggcttctccaactacactacagtcccagatgcttgggggcctaggacaggatgttttgttaaataattcactcactcctaaatatcttggctgtaagcaagacaacagctcttcccctaagcccagctccgtgttcagaaatggattctctggcattaagaagccttggcacagatgtcacgtctgcaaccaccacttccagttcaaacagcaccttcgagaccacatgaatacacacaccaacagacgcccttacagttgtcggatttgtcgcaagtcctatgtacgtcctggcagcctgagcacacacatgaaacttcatcatggtgagaaccgtctgaagaaactcatgtgttgtgagttttgtgcaaaagtgtttggccacatccgagtctattttggccatctgaaagaagtgcatagggttgtgatcagcactgagcctgcgcccagtgaactgcagccaggagacataccaaagaacagagacatgagtgtgcgaggcatggagggatcattggagagggaaaacaagtccaacctggaagaagacttccttctaaaccaggcagacgaagtcaaattacaaatcaaatgtggtcgttgtcagattactgctcagtcttttgcggaaataaaatttcatttacttgatgttcatggagaggaaattgagggcaggctacaagaagggaccttcccaggaagcaaggggactcaggaagagttggtgcagcacgctagccccgactggaaaaggcatcctgagagagggaagccggagaaggttcattcctcctccgaggaatcacatgcatgtccaagactgaaaaggcagctccaccttcatcagaatggcgtggaaatgctcatggaaaatgaaggaccccagtcaggaaccaacaagccaagggaaacctgccagggccctgagtgtcctggcctccacacgtttctcttgtggtcccattcaggctttaactgcctgctttgtgcagagatgctgggacggaaagaggacctcctccaccactggaagcaccagcataactgtgaggacccttccaaactgtgggctattttaaatacggtctccaaccagggagtgatcgaactttccagtgaagctgagaaatgagaccccaaggcagcctggggttaaggagagagctctgccgccaccttccttcagagcttcgtgctttatggtggtgcttagtcacaaagatcaaacaacaggattggtgtgagtgaacagaaatgatttttgtacatggttttattttcttaacgaaataaaatataagctctcgaagcatatttttctaactatatgcagtcttattttaaaatacgtactgattcttaatatcttagactttcagaataaataaaaagatcaaaatttgaagattgaaatttagcagaatataggctgttcttcaaatacagctctcagtg

SEQ ID NO: 55128 - DNA, 312 bp, Artificial Sequence
  derived and/or modified sequence
atgtgtggctcctattaccggaactacaatggcggtcacggctacggatgctgtggctatgggggtctgggttgcggatacgggggttgtggatatggctgctgcgggtacggcggtcttgggttcggatatggtggtctggactgtggctatggcggtctcggctgtggatatggatccttttgcggctgcggctaccgcggattagactgtgggtacggatgtggctacggatatgtttcccacagtttctgtgggtgtggttacagatgtggcagtggctacggcagttcctttggatattactactag

SEQ ID NO: 55129 - DNA, 1179 bp, Artificial Sequence
  derived and/or modified sequence
atgcccaagcccatcatggtgatccccaccctggccagcctggccagccccaccaccctgcagagccagatgctgggcggcctgggccaggacgtgctgctgaacaacagcctgacccccaagtacctgggctgcaagcaggacaacagcagcagccccaagcccagcagcgtgttcagaaacggcttcagcggcatcaagaagccctggcacagatgccacgtgtgcaaccaccacttccagttcaagcagcacctgagagaccacatgaacacccacaccaacagaagaccctacagctgcagaatctgcagaaagagctacgtgagacccggcagcctgagcacccacatgaagctgcaccacggcgagaacagactgaagaagctgatgtgctgcgagttctgcgccaaggtgttcggccacatcagagtgtacttcggccacctgaaggaggtgcacagagtggtgatcagcaccgagcccgcccccagcgagctgcagcccggcgacatccccaagaacagagacatgagcgtgagaggcatggagggcagcctggagagagagaacaagagcaacctggaggaggacttcctgctgaaccaggccgacgaggtgaagctgcagatcaagtgcggcagatgccagatcaccgcccagagcttcgccgagatcaagttccacctgctggacgtgcacggcgaggagatcgagggcagactgcaggagggcaccttccccggcagcaagggcacccaggaggagctggtgcagcacgccagccccgactggaagagacaccccgagagaggcaagcccgagaaggtgcacagcagcagcgaggagagccacgcctgccccagactgaagagacagctgcacctgcaccagaacggcgtggagatgctgatggagaacgagggcccccagagcggcaccaacaagcccagagagacctgccagggccccgagtgccccggcctgcacaccttcctgctgtggagccacagcggcttcaactgcctgctgtgcgccgagatgctgggcagaaaggaggacctgctgcaccactggaagcaccagcacaactgcgaggaccccagcaagctgtgggccatcctgaacaccgtgagcaaccagggcgtgatcgagctgagcagcgaggccgagaagtag

SEQ ID NO: 55130 - DNA, 1179 bp, Artificial Sequence
  derived and/or modified sequence
atgccaaagccaatcatggttataccaacactggcttccctggcctctcccacaaccctgcagagccagatgcttggtggccttggacaggatgtcctgctgaacaacagtttgaccccaaagtacttgggttgtaagcaagacaactccagctcgccaaaacccagttcagtttttcggaacgggttctccgggatcaagaagccttggcaccgttgccatgtttgcaaccatcatttccaattcaagcaacaccttcgggaccatatgaatactcatactaacagacgaccatactcctgtaggatctgccggaagagctacgtcagaccgggaagtttgagcactcatatgaagctgcaccacggcgaaaaccggctaaagaagctcatgtgttgcgaattctgtgctaaagtcttcggacacattagggtgtactttggccaccttaaggaagtgcacagagtggtaatttccactgagccagctccctccgagctccagcccggcgacatcccgaagaacagagacatgagcgttaggggcatggaaggaagtctggagcgggagaacaaatctaatttagaagaagactttttgttgaaccaagctgatgaggtcaagctgcaaatcaaatgcggccgctgtcaaataacagcgcaatcctttgccgagatcaaatttcacctcttagacgtgcatggagaggagatcgagggcagactgcaggagggaactttcccaggaagtaaggggactcaggaggagctggtgcagcacgcatcaccagattggaaaaggcatcctgaacggggtaagcccgaaaaagtgcattcaagttcggaagaaagccacgcatgtccacgcctcaagaggcagcttcacctgcaccaaaacggcgtggaaatgcttatggagaatgaaggtccacagagtggaaccaacaaaccccgggagacttgtcagggccccgaatgccctggactgcacacgtttctcctctggtcccatagtgggttcaattgcttactgtgtgcagagatgctcggaaggaaagaggacctactgcatcactggaaacaccagcacaactgcgaggacccctccaagctgtgggccattctaaacaccgtgagtaatcagggcgttatagagctctccagcgaagcagagaaatag

SEQ ID NO: 55131 - DNA, 1179 bp, Artificial Sequence
  derived and/or modified sequence
atgcccaagcccatcatggtgatccccaccctggccagcctggccagccccaccaccctgcagagccagatgctgggcggcctgggccaggatgtgctgctgaacaacagcctgacccccaagtacctgggctgcaagcaggacaacagcagcagccccaagcccagctctgtgttcagaaatggcttcagcggcatcaagaagccctggcaccgctgccacgtgtgcaaccaccacttccagttcaagcagcacctgcgggaccacatgaacacccacaccaacagaagaccctacagctgccgcatctgcaggaagagctatgtgcggcccggcagcctgagcacccacatgaagctgcaccacggggagaaccggctgaagaagctgatgtgctgtgagttctgtgccaaggtgtttggccacatccgggtgtacttcggccacctgaaggaggtgcaccgggtggtgatcagcacagagcccgcccccagcgagctgcagcccggggacatccccaagaacagagacatgtctgtgcggggcatggagggcagcctggagcgggagaacaagagcaacctggaggaggacttcctgctgaaccaggctgatgaggtgaagctgcagatcaagtgtggccgctgccagatcacagcccagagctttgctgagatcaagttccacctgctggatgtgcacggggaggagattgagggccgcctgcaggagggcaccttccctggcagcaagggcacccaggaggagctggtgcagcacgccagcccagactggaagaggcaccctgagcggggcaagccagagaaggtgcacagcagcagcgaggagagccacgcctgcccccggctgaagaggcagctgcacctgcaccagaatggagtggagatgctgatggagaatgaaggcccccagagcggcaccaacaagccccgggagacctgccagggcccagaatgtcctggcctgcacaccttcctgctgtggagccacagcggcttcaactgcctgctgtgtgccgagatgctgggcaggaaagaagacctgctgcaccactggaagcaccagcacaactgtgaggaccccagcaagctgtgggccatcctgaacacagtgagcaaccagggcgtcatcgagctgagcagcgaggccgagaagtag

SEQ ID NO: 55132 - DNA, 1179 bp, Artificial Sequence
  derived and/or modified sequence
atgcccaagcccatcatggtgatccccaccctggccagcctggcctctccgaccaccctgcagtcccagatgctgggcgggttggggcaagacgtattactaaacaactcgttaacgcctaagtacttggggtgtaagcaggataatagcagcagccccaagccaagcagtgtatttcgcaacggcttctcaggtattaaaaaaccatggcatcggtgccatgtgtgcaatcaccattttcagtttaagcagcacctccgagaccacatgaatacacatactaacaggcggccttacagctgccgtatctgccgcaagagctatgtccgaccgggctcattgagtactcatatgaaactccaccatggagaaaatagactgaaaaaactgatgtgttgcgaattctgtgcaaaggttttcggtcacatccgagtgtactttggccatctcaaagaggtgcaccgagttgtgatctccacagagcccgcaccttcagagctgcaacctggtgacattcctaagaatagggacatgtctgtaagaggtatggagggctctttagaacgcgagaataaaagcaacctcgaggaagacttcttgctgaaccaggccgacgaggtgaagttgcagatcaaatgtggccggtgtcaaattacggcacagtccttcgctgaaattaaattccatctgttggacgtgcatggggaagaaatagagggccgacttcaggaggggacctttcccggcagcaaggggactcaggaggagctggttcagcacgccagtccagattggaagcgtcacccagagcggggaaagcccgagaaagtacacagtagctctgaggaaagccatgcctgccccagattgaagcgccaactgcacttgcaccagaatggcgtcgagatgcttatggaaaatgaggggccccagtccggtaccaacaaacctagagaaacctgtcagggacctgagtgcccgggcctccacacgttcctgttatggtctcactccgggtttaattgtctcctttgtgcggagatgcttggtaggaaggaagacctcctccaccattggaagcaccagcataattgcgaagatccatccaagctttgggctattctgaacacggtgagcaatcagggagttattgaactgagtagtgaggctgagaaatag

SEQ ID NO: 55133 - DNA, 1179 bp, Artificial Sequence
  derived and/or modified sequence
atgccaaagcccatcatggtgatcccaaccttggctagtcttgcatcccctactacgctacaatcccagatgcttggcggactgggccaggacgtgttgctgaacaacagtctgaccccaaagtacctgggctgtaagcaagacaatagttctagccctaaacctagtagcgtattcagaaacgggtttagtgggatcaagaaaccgtggcatcggtgccacgtttgtaatcatcacttccaatttaagcagcatttgagggaccacatgaacacacataccaatcgcagaccttatagctgccgcatttgccgcaaaagctatgttagacccggatcactgtccacacacatgaagctgcaccatggtgagaacaggctaaagaaacttatgtgctgtgagttctgtgccaaggtgttcgggcatatccgagtatactttggacacctgaaggaggtgcatagggtcgtgatctccaccgagcctgccccttctgaactgcagcctggcgatattccaaaaaaccgggacatgagtgtgagaggcatggaaggcagcctggagcgagaaaataaatctaacctggaggaggattttctcctgaaccaggctgatgaggtgaaactccagattaaatgcggccgttgtcagattaccgcccagtctttcgccgagattaaatttcatctgttggatgttcacggggaggaaatcgaaggtaggttacaggagggcaccttccccggtagcaagggcactcaggaggaacttgtgcagcacgcctctcccgattggaagagacaccccgagagaggaaagcccgagaaagttcacagctcttccgaggagagtcatgcttgccctcggctgaagaggcagctgcatctgcaccagaatggcgtggaaatgcttatggaaaatgagggcccacaatctggcactaataagcctagagaaacatgccaaggaccggagtgtcctggactacataccttcttgctgtggtcccattctgggttcaactgtctgctgtgtgccgaaatgctgggtcgtaaagaggatttactgcatcactggaagcaccagcacaactgcgaggaccctagcaaactgtgggcgatcctgaacactgtatctaatcaaggagtaattgagctgagttctgaggcagagaagtag

SEQ ID NO: 55134 - protein, 818 aa, Artificial Sequence
  derived and/or modified sequence
MDSESNIPSGTIQSRKGLQNKSQFRTIAPKIVPKVLTSRMLPCHSPSRSDQVNLGPSINSKLLGMSTQNYALMQVAGQEGTFSLVALPHVASAQPIQKPRMSLPENLKLPIPRYQPPRNSKASRKKPILIFPKSGCSKAPAQTQMCPQMSPSPPHHPELLYKPSPFEEVPSLEQAPASISTAALTNGSDHGDLRPPVTNTHGSLNPPATPASSTPEEPAKQDLTALSGKAHFVSKITSSKPSAVASEKFKEQVDLAKTMTNLSPTILGNAVQLISSVPKGKLPIPPYSRMKTMEVYKIKSDANIAGFSLPGPKADCDKIPSTTEGFNAATKVASRLPVPQVSQQSACESAFCPPTKLDLNHKTKLNSGAAKRKGRKRKVPDEILAFQGKRRKYIINKCRDGKERVKNDPQEFRDQKLGTLKKYRSIMPKPIMVIPTLASLASPTTLQSQMLGGLGQDVLLNNSLTPKYLGCKQDNSSSPKPSSVFRNGFSGIKKPWHRCHVCNHHFQFKQHLRDHMNTHTNRRPYSCRICRKSYVRPGSLSTHMKLHHGENRLKKLMCCEFCAKVFGHIRVYFGHLKEVHRVVISTEPAPSELQPGDIPKNRDMSVRGMEGSLERENKSNLEEDFLLNQADEVKLQIKCGRCQITAQSFAEIKFHLLDVHGEEIEGRLQEGTFPGSKGTQEELVQHASPDWKRHPERGKPEKVHSSSEESHACPRLKRQLHLHQNGVEMLMENEGPQSGTNKPRETCQGPECPGLHTFLLWSHSGFNCLLCAEMLGRKEDLLHHWKHQHNCEDPSKLWAILNTVSNQGVIELSSEAEK

SEQ ID NO: 55135 - protein, 779 aa, Artificial Sequence
  derived and/or modified sequence
MLPCHSPSRSDQVNLGPSINSKLLGMSTQNYALMQVAGQEGTFSLVALPHVASAQPIQKPRMSLPENLKLPIPRYQPPRNSKASRKKPILIFPKSGCSKAPAQTQMCPQMSPSPPHHPELLYKPSPFEEVPSLEQAPASISTAALTNGSDHGDLRPPVTNTHGSLNPPATPASSTPEEPAKQDLTALSGKAHFVSKITSSKPSAVASEKFKEQVDLAKTMTNLSPTILGNAVQLISSVPKGKLPIPPYSRMKTMEVYKIKSDANIAGFSLPGPKADCDKIPSTTEGFNAATKVASRLPVPQVSQQSACESAFCPPTKLDLNHKTKLNSGAAKRKGRKRKVPDEILAFQGKRRKYIINKCRDGKERVKNDPQEFRDQKLGTLKKYRSIMPKPIMVIPTLASLASPTTLQSQMLGGLGQDVLLNNSLTPKYLGCKQDNSSSPKPSSVFRNGFSGIKKPWHRCHVCNHHFQFKQHLRDHMNTHTNRRPYSCRICRKSYVRPGSLSTHMKLHHGENRLKKLMCCEFCAKVFGHIRVYFGHLKEVHRVVISTEPAPSELQPGDIPKNRDMSVRGMEGSLERENKSNLEEDFLLNQADEVKLQIKCGRCQITAQSFAEIKFHLLDVHGEEIEGRLQEGTFPGSKGTQEELVQHASPDWKRHPERGKPEKVHSSSEESHACPRLKRQLHLHQNGVEMLMENEGPQSGTNKPRETCQGPECPGLHTFLLWSHSGFNCLLCAEMLGRKEDLLHHWKHQHNCEDPSKLWAILNTVSNQGVIELSSEAEK

SEQ ID NO: 55136 - DNA, 2457 bp, Artificial Sequence
  derived and/or modified sequence
atggacagcgagagcaacatccccagcggcaccatccagagcagaaagggcctgcagaacaagagccagttcagaaccatcgcccccaagatcgtgcccaaggtgctgaccagcagaatgctgccctgccacagccccagcagaagcgaccaggtgaacctgggccccagcatcaacagcaagctgctgggcatgagcacccagaactacgccctgatgcaggtggccggccaggagggcaccttcagcctggtggccctgccccacgtggccagcgcccagcccatccagaagcccagaatgagcctgcccgagaacctgaagctgcccatccccagataccagccccccagaaacagcaaggccagcagaaagaagcccatcctgatcttccccaagagcggctgcagcaaggcccccgcccagacccagatgtgcccccagatgagccccagccccccccaccaccccgagctgctgtacaagcccagccccttcgaggaggtgcccagcctggagcaggcccccgccagcatcagcaccgccgccctgaccaacggcagcgaccacggcgacctgagaccccccgtgaccaacacccacggcagcctgaacccccccgccacccccgccagcagcacccccgaggagcccgccaagcaggacctgaccgccctgagcggcaaggcccacttcgtgagcaagatcaccagcagcaagcccagcgccgtggccagcgagaagttcaaggagcaggtggacctggccaagaccatgaccaacctgagccccaccatcctgggcaacgccgtgcagctgatcagcagcgtgcccaagggcaagctgcccatccccccctacagcagaatgaagaccatggaggtgtacaagatcaagagcgacgccaacatcgccggcttcagcctgcccggccccaaggccgactgcgacaagatccccagcaccaccgagggcttcaacgccgccaccaaggtggccagcagactgcccgtgccccaggtgagccagcagagcgcctgcgagagcgccttctgcccccccaccaagctggacctgaaccacaagaccaagctgaacagcggcgccgccaagagaaagggcagaaagagaaaggtgcccgacgagatcctggccttccagggcaagagaagaaagtacatcatcaacaagtgcagagacggcaaggagagagtgaagaacgacccccaggagttcagagaccagaagctgggcaccctgaagaagtacagaagcatcatgcccaagcccatcatggtgatccccaccctggccagcctggccagccccaccaccctgcagagccagatgctgggcggcctgggccaggacgtgctgctgaacaacagcctgacccccaagtacctgggctgcaagcaggacaacagcagcagccccaagcccagcagcgtgttcagaaacggcttcagcggcatcaagaagccctggcacagatgccacgtgtgcaaccaccacttccagttcaagcagcacctgagagaccacatgaacacccacaccaacagaagaccctacagctgcagaatctgcagaaagagctacgtgagacccggcagcctgagcacccacatgaagctgcaccacggcgagaacagactgaagaagctgatgtgctgcgagttctgcgccaaggtgttcggccacatcagagtgtacttcggccacctgaaggaggtgcacagagtggtgatcagcaccgagcccgcccccagcgagctgcagcccggcgacatccccaagaacagagacatgagcgtgagaggcatggagggcagcctggagagagagaacaagagcaacctggaggaggacttcctgctgaaccaggccgacgaggtgaagctgcagatcaagtgcggcagatgccagatcaccgcccagagcttcgccgagatcaagttccacctgctggacgtgcacggcgaggagatcgagggcagactgcaggagggcaccttccccggcagcaagggcacccaggaggagctggtgcagcacgccagccccgactggaagagacaccccgagagaggcaagcccgagaaggtgcacagcagcagcgaggagagccacgcctgccccagactgaagagacagctgcacctgcaccagaacggcgtggagatgctgatggagaacgagggcccccagagcggcaccaacaagcccagagagacctgccagggccccgagtgccccggcctgcacaccttcctgctgtggagccacagcggcttcaactgcctgctgtgcgccgagatgctgggcagaaaggaggacctgctgcaccactggaagcaccagcacaactgcgaggaccccagcaagctgtgggccatcctgaacaccgtgagcaaccagggcgtgatcgagctgagcagcgaggccgagaagtag

SEQ ID NO: 55137 - DNA, 1644 bp, Artificial Sequence
  derived and/or modified sequence
atgcagaacagcgtgagcgtgccccccaaggacgagggcgagagcaacatccccagcggcaccatccagagcagaaagggcctgcagaacaagagccagttcagaaccatcgcccccaagatcgtgcccaaggtgctgaccagcagaatgctgccctgccacagccccagcagaagcgaccaggacctgagacccaccgtgatcagatacccccccccccagaaggccctgatgcagccccccagatggcaggccggctacctgttccacaagaccaagctgaacagcggcgccgccaagagaaagggcagaaagagaaaggtgcccgacgagatcctggccttccagggcaagagaagaaagtacatcatcaacaagtgcagagacggcaaggagagagtgaagaacgacccccaggagttcagagaccagaagctgggcaccctgaagaagtacagaagcatcatgcccaagcccatcatggtgatccccaccctggccagcctggccagccccaccaccctgcagagccagatgctgggcggcctgggccaggacgtgctgctgaacaacagcctgacccccaagtacctgggctgcaagcaggacaacagcagcagccccaagcccagcagcgtgttcagaaacggcttcagcggcatcaagaagccctggcacagatgccacgtgtgcaaccaccacttccagttcaagcagcacctgagagaccacatgaacacccacaccaacagaagaccctacagctgcagaatctgcagaaagagctacgtgagacccggcagcctgagcacccacatgaagctgcaccacggcgagaacagactgaagaagctgatgtgctgcgagttctgcgccaaggtgttcggccacatcagagtgtacttcggccacctgaaggaggtgcacagagtggtgatcagcaccgagcccgcccccagcgagctgcagcccggcgacatccccaagaacagagacatgagcgtgagaggcatggagggcagcctggagagagagaacaagagcaacctggaggaggacttcctgctgaaccaggccgacgaggtgaagctgcagatcaagtgcggcagatgccagatcaccgcccagagcttcgccgagatcaagttccacctgctggacgtgcacggcgaggagatcgagggcagactgcaggagggcaccttccccggcagcaagggcacccaggaggagctggtgcagcacgccagccccgactggaagagacaccccgagagaggcaagcccgagaaggtgcacagcagcagcgaggagagccacgcctgccccagactgaagagacagctgcacctgcaccagaacggcgtggagatgctgatggagaacgagggcccccagagcggcaccaacaagcccagagagacctgccagggccccgagtgccccggcctgcacaccttcctgctgtggagccacagcggcttcaactgcctgctgtgcgccgagatgctgggcagaaaggaggacctgctgcaccactggaagcaccagcacaactgcgaggaccccagcaagctgtgggccatcctgaacaccgtgagcaaccagggcgtgatcgagctgagcagcgaggccgagaagtag

SEQ ID NO: 55138 - DNA, 2340 bp, Artificial Sequence
  derived and/or modified sequence
atgctgccctgccacagccccagcagaagcgaccaggtgaacctgggccccagcatcaacagcaagctgctgggcatgagcacccagaactacgccctgatgcaggtggccggccaggagggcaccttcagcctggtggccctgccccacgtggccagcgcccagcccatccagaagcccagaatgagcctgcccgagaacctgaagctgcccatccccagataccagccccccagaaacagcaaggccagcagaaagaagcccatcctgatcttccccaagagcggctgcagcaaggcccccgcccagacccagatgtgcccccagatgagccccagccccccccaccaccccgagctgctgtacaagcccagccccttcgaggaggtgcccagcctggagcaggcccccgccagcatcagcaccgccgccctgaccaacggcagcgaccacggcgacctgagaccccccgtgaccaacacccacggcagcctgaacccccccgccacccccgccagcagcacccccgaggagcccgccaagcaggacctgaccgccctgagcggcaaggcccacttcgtgagcaagatcaccagcagcaagcccagcgccgtggccagcgagaagttcaaggagcaggtggacctggccaagaccatgaccaacctgagccccaccatcctgggcaacgccgtgcagctgatcagcagcgtgcccaagggcaagctgcccatccccccctacagcagaatgaagaccatggaggtgtacaagatcaagagcgacgccaacatcgccggcttcagcctgcccggccccaaggccgactgcgacaagatccccagcaccaccgagggcttcaacgccgccaccaaggtggccagcagactgcccgtgccccaggtgagccagcagagcgcctgcgagagcgccttctgcccccccaccaagctggacctgaaccacaagaccaagctgaacagcggcgccgccaagagaaagggcagaaagagaaaggtgcccgacgagatcctggccttccagggcaagagaagaaagtacatcatcaacaagtgcagagacggcaaggagagagtgaagaacgacccccaggagttcagagaccagaagctgggcaccctgaagaagtacagaagcatcatgcccaagcccatcatggtgatccccaccctggccagcctggccagccccaccaccctgcagagccagatgctgggcggcctgggccaggacgtgctgctgaacaacagcctgacccccaagtacctgggctgcaagcaggacaacagcagcagccccaagcccagcagcgtgttcagaaacggcttcagcggcatcaagaagccctggcacagatgccacgtgtgcaaccaccacttccagttcaagcagcacctgagagaccacatgaacacccacaccaacagaagaccctacagctgcagaatctgcagaaagagctacgtgagacccggcagcctgagcacccacatgaagctgcaccacggcgagaacagactgaagaagctgatgtgctgcgagttctgcgccaaggtgttcggccacatcagagtgtacttcggccacctgaaggaggtgcacagagtggtgatcagcaccgagcccgcccccagcgagctgcagcccggcgacatccccaagaacagagacatgagcgtgagaggcatggagggcagcctggagagagagaacaagagcaacctggaggaggacttcctgctgaaccaggccgacgaggtgaagctgcagatcaagtgcggcagatgccagatcaccgcccagagcttcgccgagatcaagttccacctgctggacgtgcacggcgaggagatcgagggcagactgcaggagggcaccttccccggcagcaagggcacccaggaggagctggtgcagcacgccagccccgactggaagagacaccccgagagaggcaagcccgagaaggtgcacagcagcagcgaggagagccacgcctgccccagactgaagagacagctgcacctgcaccagaacggcgtggagatgctgatggagaacgagggcccccagagcggcaccaacaagcccagagagacctgccagggccccgagtgccccggcctgcacaccttcctgctgtggagccacagcggcttcaactgcctgctgtgcgccgagatgctgggcagaaaggaggacctgctgcaccactggaagcaccagcacaactgcgaggaccccagcaagctgtgggccatcctgaacaccgtgagcaaccagggcgtgatcgagctgagcagcgaggccgagaagtag

SEQ ID NO: 55139 - DNA, 2457 bp, Artificial Sequence
  derived and/or modified sequence
atggactccgaatctaatattccatcgggcacaattcagtctaggaaaggcctgcagaataaaagccagtttaggacaattgctccaaaaatagtccccaaagtgctgaccagtcggatgctgccatgtcatagtccctctagatccgatcaagtgaatctgggcccatccataaattctaaactattgggaatgagcactcagaattatgctcttatgcaggtggccggacaggaggggacattcagcttggtggcactgcctcatgtggcaagtgctcaacccatccagaaaccccgaatgagcctgcctgagaatttgaagctgcccatcccccgctatcagccaccacgaaacagcaaagcatcacgcaagaagcctattctgattttccctaaaagcggttgttctaaagcccctgcgcagacccaaatgtgtcctcaaatgtctccatcacctccgcatcacccagaattgttgtataagccttccccatttgaagaggtgccttctctggaacaggcccccgcttcgatcagcactgctgcgctgaccaatgggtctgatcacggagacctgaggccgcctgtgacgaacacacacggatccttgaaccctccagccacgcctgcttcttctacgccagaagaaccagcgaaacaggatcttaccgctctttctggtaaggcacatttcgtgtcaaagatcacaagcagcaagccttctgccgtggcctcagaaaagttcaaagagcaggtggacctagccaagaccatgactaaccttagccctaccattctaggtaatgccgttcagctcatttcttccgtccccaagggaaaattaccaataccaccttattccagaatgaagacaatggaagtgtataaaatcaaatctgacgctaatattgcgggattttcgctccccgggccgaaagcagattgtgacaagattccaagtacaactgagggcttcaacgccgcgacaaaagtggcgtcaaggctcccggtgccccaagtatcccagcagtcagcttgtgaatctgcattttgcccacccacaaaactcgacctaaaccacaagacaaaattgaacagcggcgccgctaaacggaagggaaggaagcgcaaagtcccagatgagatcttggccttccagggaaagaggcgtaaatatataattaataagtgtagggatgggaaggagcgggtaaagaacgatccccaggagttcagagatcaaaaactaggcaccctaaaaaaatacagaagcattatgccaaaaccaatcatggtcatcccaacccttgcctcacttgcttcccccacaacactgcaatcacagatgttaggaggcctgggccaagacgtcctgctgaacaactctctcacccccaagtacctgggttgcaaacaagataattcgtcctctcccaagccatctagtgtgttccgcaatggtttcagcggtattaagaagccttggcaccgatgccacgtatgcaaccaccattttcagtttaaacaacatctccgggaccacatgaacacccacaccaatcgccggccctacagctgtaggatctgtaggaagagctacgtcagaccagggagcctgtccacacatatgaaactgcatcatggggaaaaccgcttaaagaagctgatgtgctgtgaattttgcgcaaaggtgttcggccatattagagtgtattttggccacctgaaggaggtacacagggtcgttatttccacagaaccagctccctccgaactccagcctggagacattcctaaaaaccgagatatgtctgttagagggatggagggcagcctggagcgggagaacaagagcaaccttgaagaggactttctgctgaaccaggcagatgaggtgaagttgcagataaaatgcgggagatgtcagattacagctcagagcttcgcagagatcaagttccaccttctagatgtacacggagaagagatcgaagggcgcctgcaggagggcacgtttcctgggagcaaaggaactcaggaagagctggtccaacacgcgagccccgattggaagaggcaccccgagagggggaaaccggaaaaggttcactcttcatctgaagagtcgcatgcctgtccacgcctgaaacgccagctgcacctccatcagaacggggtggagatgctgatggagaacgaggggccacagagcggtacaaacaaacctcgtgaaacttgccaaggcccggagtgccccggcctgcatacgttcttgctgtggtctcactctggtttcaactgtctcctctgcgccgagatgctgggaaggaaggaagatctgctacaccactggaagcaccagcataactgcgaagatccaagtaagctgtgggccatccttaacactgtctcaaatcagggggtcatagagctttccagcgaggctgagaagtag

SEQ ID NO: 55140 - DNA, 1644 bp, Artificial Sequence
  derived and/or modified sequence
atgcagaacagcgtgtccgtgccacccaaggatgagggagagtccaatattccatccggcacgattcagtcgcgtaaaggactgcagaacaaaagtcagtttaggactatcgcccctaagatcgtgcccaaggttcttacctcaagaatgctaccatgtcattctcccagccgatccgaccaagatttgaggcccactgtaatccgatacccgccaccccaaaaagctctcatgcagccaccgcgatggcaagccggctatctgtttcacaaaactaagctgaactcaggcgcggccaaacgcaagggtagaaaacgcaaagtccctgacgaaattctggccttccagggcaagcgcaggaagtatattattaacaagtgtcgggatggtaaggaacgagtaaaaaacgatccccaggagttcagggaccagaagttagggacactgaagaagtatcgctcaatcatgccgaagcccatcatggtcattccaacgttggcctctctcgcctcacctaccactcttcaaagtcagatgctgggcggactgggacaagacgtgctcctcaataattcgctcacacccaagtacctcggatgcaaacaagacaattcaagctccccaaaaccaagctccgtgtttcgtaacggattcagtggaatcaagaagccatggcacaggtgccacgtgtgcaatcaccactttcagttcaaacagcacttacgcgaccacatgaacacacacacaaatcgcagaccatacagttgcagaatatgccgtaaatcttacgtgaggccaggatctttgtctacacatatgaagctgcatcacggcgagaatcgtcttaaaaaattgatgtgttgtgagttctgcgccaaggtgttcggccatatcagagtgtacttcggtcatctcaaggaggtacatagagtggtgatttccaccgaacctgcgccaagcgagctccaacccggggacattccaaagaaccgtgacatgtccgttcgtgggatggagggttctctggaacgagaaaacaaatcaaatcttgaagaagattttctgctgaaccaagcagacgaagtgaagctccaaatcaagtgcggtcgctgccagattacagcacagagctttgccgaaatcaaattccacctgttggacgtgcacggggaggagatcgagggacgcctccaggagggaacgtttccagggtccaaagggacccaagaagagctggtacagcacgcctccccggattggaagcgacatcccgaacgtggaaaacccgagaaggtgcactcctctagcgaagagtctcatgcgtgcccacggctgaagcgccagctccacctgcatcagaatggcgtggagatgttgatggaaaatgagggtcctcagtcaggcacaaacaagccccgggagacttgtcaggggccagaatgtccaggtcttcatacctttttgctgtggagccacagcggcttcaattgcctattatgcgcagaaatgctaggcaggaaggaagatctcctccaccactggaagcaccagcataactgtgaggatccctcaaagttatgggcaatactgaataccgtctctaatcaaggcgtgatcgaattgagcagcgaggctgaaaaatag

SEQ ID NO: 55141 - DNA, 2457 bp, Artificial Sequence
  derived and/or modified sequence
atggattccgagagcaacatcccttccggcacaattcagtcccgcaaggggctgcagaataagagccagttccgaactatcgctcccaaaatagtgcctaaagtactgacttccagaatgctcccctgccatagtccttcacggtcagatcaagtgaacctgggcccttccattaacagcaaacttttaggcatgtccacccaaaattacgccctcatgcaggtggctggccaggagggaacctttagtcttgtcgctctccctcacgtggccagtgcgcagccaatccagaagccccgcatgagtcttcctgaaaacctcaaactccccataccaaggtatcagccccctagaaacagcaaagcatctcggaaaaaacctatcctcattttccctaaatcaggatgtagcaaggcaccggcacagacacagatgtgtccccagatgtctccttctccgccacatcatccagagctgctatataaaccaagccctttcgaggaggttccctcccttgagcaggcgcctgcgagtatatcaaccgctgcactaacaaacggcagcgatcacggcgatcttaggccaccagtcaccaacactcacggttccctgaacccaccggccactcccgctagctccacccctgaggagcctgccaagcaggacttgaccgccctgtccgggaaggctcacttcgtctcaaagatcaccagttcaaaaccttctgccgtggcgagcgagaagtttaaagaacaagtcgacctcgccaagaccatgacaaacctttctcctactattcttggaaacgctgttcagctgatctcatcggtcccaaaaggtaaactgccgatcccaccatattccagaatgaagacaatggaagtgtacaaaattaaatccgacgccaatatagctgggttctcactccctggccctaaggctgactgtgacaaaataccaagcaccacagagggcttcaatgctgcaacaaaggtggcgtcccgtctacctgtcccgcaggttagccaacagagtgcctgtgaaagtgcgttttgccctcctactaagttagacctcaaccacaagacaaagctcaactccggtgcagccaagaggaagggcagaaagcggaaagtccccgatgagattctcgcttttcaagggaaacggcgcaagtacatcataaataagtgtcgagacggcaaggaacgagtcaaaaacgacccgcaggaattcagggatcagaagttgggcactctgaagaagtaccggagtataatgcccaagccaatcatggttattccaactctggcctctttggccagtcccacgaccctccagtctcagatgctgggggggttgggtcaagacgtgctcctgaacaactcactgacacccaaatacctgggctgtaaacaggacaactcctcgagccccaagccgtccagcgttttccggaacggattctccggtattaaaaagccttggcatcggtgccacgtctgtaatcaccacttccagttcaaacagcatctgcgggaccacatgaacacccatactaatcggcgtccgtactcttgtaggatctgccggaaaagctacgtgcgacctgggtccctttcaacacatatgaaactgcatcacggagaaaacagattgaagaagctaatgtgctgcgaattttgtgccaaggtgtttggacacattcgcgtctacttcggtcacctcaaagaggtgcatcgcgtagtaatctccacagagcctgctccgtcggaactgcaacccggcgacattcccaagaatagagacatgagcgtgcgcggtatggagggctcactcgagagagaaaacaagtctaacctcgaagaggacttcctcctcaaccaggccgacgaggtaaagctgcagattaaatgtgggcgctgccagattacagcccagagctttgcggaaattaagtttcacttgttagacgtccacggtgaggagatcgaagggagattacaggaaggcacctttcctggctccaagggaactcaggaagagctggtgcagcatgcttctccagattggaagcgtcaccccgaacgaggcaagccagagaaggtccacagttctagcgaagagagtcacgcctgcccccggctgaaacgacagctgcatctgcaccagaatggagttgagatgcttatggaaaacgagggaccacagtctggaacaaataagccccgggaaacgtgccagggtcctgagtgcccagggctgcacaccttcctgttgtggagccacagcggattcaattgtttgctctgcgccgaaatgctcggtcgaaaggaggacctgctccatcactggaaacatcaacataactgtgaagacccgtctaaactttgggcaatactcaacaccgtcagcaaccagggagtgattgaattgagctcagaggctgagaaatag

SEQ ID NO: 55142 - DNA, 2457 bp, Artificial Sequence
  derived and/or modified sequence
atggattccgagagcaacatcccatcagggactattcaatctcggaaaggactccagaataaatctcagtttcggactatcgctcccaagatcgtcccaaaagtactgactagtaggatgctcccctgccactccccaagccgttccgatcaggtgaacctaggaccttcaatcaattccaagcttctaggaatgtctacgcaaaactatgcccttatgcaggtggcagggcaggagggcacattctcactcgttgcattgccgcatgtcgcctcagctcaacctatccaaaagccccgtatgtccctgcccgagaatttaaagctgcccattccgcggtatcagccacccagaaattcaaaggcttctcgaaagaaacctattctgatttttcccaagtcaggatgttcaaaagcgcccgctcagactcagatgtgcccccagatgtccccttcgccccctcaccatccagagctcttgtataaacctagtccctttgaagaagtgccgagcctggagcaggcacccgcttccatcagtaccgccgccctaacaaatggttcagatcacggagacctccgtcctccggtcacgaacacacatgggtcattaaaccccccagccactccagcatccagcacccctgaggagccggccaaacaagatttgacagctctgagcggcaaagcacactttgtttctaagatcacttcttcgaaaccttccgccgttgcctcagagaaatttaaggagcaggtcgacttggccaaaacaatgacaaacctctcacctaccattctgggcaatgccgttcaattaatcagcagcgtgcctaagggaaaactcccaattccaccctattcaagaatgaaaacaatggaggtctataagatcaaaagcgacgccaacattgctggattctctttgccagggcctaaggcagactgtgataaaattccttccacaacagaaggcttcaacgccgccacaaaggtggcctctcgcctccctgtaccacaggtgtcccagcagtccgcatgcgagtccgccttctgccctcctacaaaactcgatctgaaccacaaaacaaagttgaattccggagctgcaaaacggaagggacgcaaaaggaaggttccagacgagattctagccttccaaggaaaacggcggaagtacattattaataagtgcagagatggcaaggagcgtgtcaaaaatgacccccaagagtttagggatcagaaattaggcacacttaaaaagtatcgctctattatgcctaaacctattatggtgatccctactctggcaagcttggccagtccgacaactttgcagagccagatgctggggggactgggacaggacgtcctcctgaacaactctttaacacctaagtacctgggttgtaagcaggataactcctcgagccctaagcccagctccgtgttcaggaacggtttctccgggattaagaagccctggcatcgatgtcatgtctgtaaccaccacttccagtttaaacagcacttaagggatcacatgaacacacacaccaatcgacgtccctacagttgtcgcatatgccgcaagtcttacgttcgcccaggctctctttctacccacatgaagttgcatcatggagagaataggctcaaaaagttaatgtgctgcgaattctgtgcaaaagtgtttggccatattagggtgtacttcggccatcttaaggaagtgcatcgagtcgtaatttcaaccgaaccagctccctccgaattacagccgggggacatccccaaaaaccgggatatgagcgttcggggcatggaaggctccctcgagcgcgagaacaagagtaaccttgaggaagattttctcctgaaccaagctgacgaggtcaagctgcagataaagtgtggccgctgtcaaattaccgcccagagcttcgctgaaattaagtttcatctgctcgatgtgcacggagaggagattgaaggtcggcttcaagaagggacattccctggttccaaagggacgcaggaggagctggtgcagcacgcctcacccgactggaaacgccacccagaaagagggaagcctgagaaggttcatagctcctctgaggaaagccacgcttgtccacggctcaaacgtcagttgcatctccaccagaatggggttgagatgttgatggagaatgaaggcccccaaagtggaactaacaaaccacgcgaaacctgtcaggggcctgagtgccctgggctgcatacattcctgctgtggtcccactctggcttcaattgcctcctatgcgctgagatgttgggaaggaaagaagatctgctacaccactggaaacatcagcacaactgcgaagacccctccaaactatgggccattttgaacaccgtgagcaaccagggcgtcatcgagctctccagcgaagccgagaaatag

SEQ ID NO: 55143 - DNA, 2340 bp, Artificial Sequence
  derived and/or modified sequence
atgctgccttgccactccccctcaagaagtgaccaggtgaatttagggccctctatcaattctaagcttctaggaatgagcacacaaaattacgccttgatgcaggttgctggacaggaaggaaccttctctttggtagcactcccccatgtggcgagcgcccagccgattcagaagcctcgcatgtcattacccgagaacctgaagttgcctatcccaaggtaccagcccccaaggaattcaaaggcatctcgaaagaagccaatccttatatttcccaaaagtggatgcagcaaggcccctgcccagacccagatgtgccctcaaatgtccccatctccaccccatcaccccgaactgctgtataagccctcaccattcgaagaggttccatctctggagcaggccccagcatcaatttccacggccgccctcaccaacgggtctgatcacggggacttacgcccacccgtcaccaacactcatggatctctgaaccctccagccacaccagcttccagcacccctgaagaaccagctaaacaggatctcacagccttgtcagggaaagctcactttgtgtctaagattaccagctcaaaaccatcagctgttgccagtgagaagtttaaggagcaggtggatcttgcgaaaacaatgacaaatctctctcccaccatactcggtaacgccgtccagctcatctccagcgttcccaaaggaaaacttccaatcccaccttatagccgaatgaaaactatggaagtgtacaagatcaaatcagatgctaacattgcgggatttagtctgcccgggccgaaggcagattgcgacaagatcccgagcacaacagagggatttaatgcagccaccaaagtagcttcccggttacctgtaccacaggtcagccaacagtctgcctgtgaaagtgccttttgtcccccaactaaactcgatttgaatcataaaactaaactgaacagcggtgctgccaagcgcaaagggcggaaacgtaaagtgcccgatgagatcctcgccttccagggcaaacgtaggaaatacatcatcaataaatgtcgggacgggaaggaacgggtgaaaaacgacccacaggagttcagggaccagaaactgggcactcttaagaagtaccgtagcattatgcccaaacctattatggtaattcctacactcgcatccttggcgtccccgactacccttcagagccaaatgcttggaggtctaggccaggacgtcctcttgaataatagtctgactcctaagtacctgggctgcaagcaggataatagtagcagccctaaaccaagctccgtgttcaggaacggctttagcggcattaagaaaccctggcaccgctgccacgtttgtaatcaccatttccaatttaagcagcatctgcgggatcacatgaacacccacacaaaccgccgaccttactcctgcaggatctgtcgaaagagctacgtgaggccagggagcctctcaacacatatgaagctgcatcacggtgaaaacagactcaagaaactgatgtgctgtgagttctgcgctaaggtcttcggtcacatccgggtgtattttggccacctgaaggaagtgcatagggtggtcatttccacagagccggcccccagcgaactacagcctggcgacattcctaaaaaccgagatatgagcgtgcgcggtatggaaggctcactggaaagggaaaacaagtctaatctcgaggaggacttcctcttaaatcaggctgacgaggtcaaactgcagattaagtgtggtcgctgtcaaatcaccgctcagagtttcgctgaaataaaattccatctcttggatgtgcacggcgaggagatagaagggcgcctccaggaaggcaccttcccaggaagtaagggaacccaggaagaattggtacaacatgcgtcacctgattggaaacgacaccctgaaaggggaaaacccgagaaggttcattcttctagcgaggagtcccacgcgtgccctagactcaagcgccagctgcacctccaccagaacggagtcgaaatgctaatggagaacgagggccctcagagcggcactaataagccgcgggaaacttgccaggggccagagtgtcccggattacacactttcctgttgtggtcccacagcggttttaattgtcttctttgtgccgagatgctggggaggaaggaagatctcctgcaccactggaagcaccagcacaactgcgaagacccaagcaaactgtgggccatactaaatacagtgtctaaccagggagttatagagctgagttccgaggccgaaaaatag

SEQ ID NO: 55144 - DNA, 2457 bp, Artificial Sequence
  derived and/or modified sequence
atggattctgagagcaacatccccagcggcaccatccagagcaggaagggcctgcagaacaagagccagttccgcaccatcgcccccaagatcgtgcccaaggtgctgaccagcaggatgctgccctgccacagccccagcagaagtgaccaggtgaacctgggccccagcatcaacagcaagctgctgggcatgagcacccagaactatgccctgatgcaggtggccggccaggagggcaccttcagcctggtggccctgccccacgtggccagcgcccagcccatccagaagcccaggatgagcctgcctgagaacctgaagctgcccatcccccgctaccagccccccaggaacagcaaggccagcaggaagaagcccatcctgatcttccccaagagcggctgcagcaaggccccagcccagacccagatgtgcccccagatgagccccagccccccccaccaccctgagctgctgtacaagcccagcccctttgaggaggtgcccagcctggagcaggccccagccagcatcagcacagctgccctgaccaacggcagtgaccacggggacctgcggccccctgtgaccaacacccacggcagcctgaaccccccagccaccccagccagcagcaccccagaggagcccgccaagcaggacctgacagccctgagcggcaaggcccactttgtgtccaagatcaccagcagcaagcccagcgctgtggccagcgagaagttcaaggagcaggtggacctggccaagaccatgaccaacctgagccccaccatcctgggcaatgctgtgcagctgatcagctctgtgcccaagggcaagctgcccatccccccctacagcaggatgaagaccatggaggtgtacaagatcaagagtgatgccaacattgctggcttcagcctgcccggccccaaggctgactgtgacaagatccccagcaccacagagggcttcaatgctgccaccaaggtggccagccggctgcctgtgccccaggtgtcccagcagagcgcctgtgagagcgccttctgcccccccaccaagctggacctgaaccacaagaccaagctgaacagcggggccgccaagaggaaaggaaggaagaggaaggtgcctgatgagatcctggccttccagggcaagaggaggaagtacatcatcaacaagtgcagagatggcaaggagcgggtgaagaatgacccccaggagttccgggaccagaagctgggcaccctgaagaagtaccgcagcatcatgcccaagcccatcatggtgatccccaccctggccagcctggccagccccaccaccctgcagagccagatgctgggcggcctgggccaggatgtgctgctgaacaacagcctgacccccaagtacctgggctgcaagcaggacaacagcagcagccccaagcccagctctgtgttcagaaatggcttcagcggcatcaagaagccctggcaccgctgccacgtgtgcaaccaccacttccagttcaagcagcacctgcgggaccacatgaacacccacaccaacagaagaccctacagctgccgcatctgcaggaagagctatgtgcggcccggcagcctgagcacccacatgaagctgcaccacggggagaaccggctgaagaagctgatgtgctgtgagttctgtgccaaggtgtttggccacatccgggtgtacttcggccacctgaaggaggtgcaccgggtggtgatcagcacagagcccgcccccagcgagctgcagcccggggacatccccaagaacagagacatgtctgtgcggggcatggagggcagcctggagcgggagaacaagagcaacctggaggaggacttcctgctgaaccaggctgatgaggtgaagctgcagatcaagtgtggccgctgccagatcacagcccagagctttgctgagatcaagttccacctgctggatgtgcacggggaggagattgagggccgcctgcaggagggcaccttccctggcagcaagggcacccaggaggagctggtgcagcacgccagcccagactggaagaggcaccctgagcggggcaagccagagaaggtgcacagcagcagcgaggagagccacgcctgcccccggctgaagaggcagctgcacctgcaccagaatggagtggagatgctgatggagaatgaaggcccccagagcggcaccaacaagccccgggagacctgccagggcccagaatgtcctggcctgcacaccttcctgctgtggagccacagcggcttcaactgcctgctgtgtgccgagatgctgggcaggaaagaagacctgctgcaccactggaagcaccagcacaactgtgaggaccccagcaagctgtgggccatcctgaacacagtgagcaaccagggcgtcatcgagctgagcagcgaggccgagaagtag

SEQ ID NO: 55145 - DNA, 1644 bp, Artificial Sequence
  derived and/or modified sequence
atgcagaacagcgtgtctgtgccccccaaggatgaaggagagagcaacatccccagcggcaccatccagagcaggaagggcctgcagaacaagagccagttccgcaccatcgcccccaagatcgtgcccaaggtgctgaccagcaggatgctgccctgccacagccccagcagaagtgaccaggacctgcggcccaccgtcatccgctaccccccaccccagaaggccctgatgcagcccccacgctggcaggccggctacctgttccacaagaccaagctgaacagcggggccgccaagaggaagggcaggaagaggaaggtgcctgatgagatcctggccttccagggcaagaggaggaagtacatcatcaacaagtgcagagatggcaaggagcgggtgaagaatgacccccaggagttccgggaccagaagctgggcaccctgaagaagtaccgcagcatcatgcccaagcccatcatggtgatccccaccctggccagcctggccagccccaccaccctgcagagccagatgctgggcggcctgggccaggatgtgctgctgaacaacagcctgacccccaagtacctgggctgcaagcaggacaacagcagcagccccaagcccagcagcgtcttcagaaatggcttcagcggcatcaagaagccctggcaccgctgccacgtgtgcaaccaccacttccagttcaagcagcacctgcgggaccacatgaacacccacaccaacagaagaccctacagctgccgcatctgcaggaagagctatgtgcggcccggcagcctgagcacccacatgaagctgcaccacggagaaaatcggctgaagaagctgatgtgctgtgagttctgtgccaaggtgtttggccacatccgggtgtacttcggccacctgaaggaggtgcaccgggtggtgatcagcacagagcccgcccccagcgagctgcagcccggggacatccccaagaacagagacatgtctgtgcggggcatggagggcagcctggagcgggagaacaagagcaacctggaggaggacttcctgctgaaccaggctgatgaggtgaagctgcagatcaagtgtggccgctgccagatcacagcccagagctttgctgagatcaagttccacctgctggatgtgcatggagaggagattgagggccgcctgcaggagggcaccttccctggcagcaagggcacccaggaggagctggtgcagcacgccagcccagactggaagaggcaccctgagcggggcaagccagagaaggtgcacagcagcagcgaggagagccacgcctgcccccggctgaagaggcagctgcacctgcaccagaatggagtggagatgctgatggagaatgaaggcccccagagcggcaccaacaagccccgggagacctgccagggccctgagtgccccggcctgcacaccttcctgctgtggagccacagcggcttcaactgcctgctgtgtgccgagatgctgggcaggaaggaggacctgctgcaccactggaagcaccagcacaactgtgaggaccccagcaagctgtgggccatcctgaacacagtgagcaaccagggcgtgattgagctgagcagcgaggccgagaagtag

SEQ ID NO: 55146 - DNA, 2340 bp, Artificial Sequence
  derived and/or modified sequence
atgctgccctgccacagccccagcagaagtgaccaggtgaacctgggccccagcatcaacagcaagctgctgggcatgagcacccagaactatgccctgatgcaggtggccggccaggagggcaccttcagcctggtggccctgccccacgtggccagcgcccagcccatccagaagcccaggatgagcctgcctgagaacctgaagctgcccatcccccgctaccagcccccaagaaacagcaaggccagcaggaagaagcccatcctgatcttccccaagagcggctgcagcaaggccccagcccagacccagatgtgcccccagatgagccccagccccccccaccaccctgagctgctgtacaagcccagcccctttgaggaggtgcccagcctggagcaggccccagccagcatcagcacagctgccctgaccaatggaagtgaccatggagacctgcggccccctgtgaccaacacccacggcagcctgaaccccccagccaccccagccagcagcaccccagaggagcccgccaagcaggacctgacagccctgagcggcaaggcccactttgtgtccaagatcaccagcagcaagcccagcgctgtggccagcgagaagttcaaggagcaggtggacctggccaagaccatgaccaacctgagccccaccatcctgggcaatgctgtgcagctgatcagctctgtgcccaagggcaagctgcccatccccccctacagcaggatgaagaccatggaggtgtacaagatcaagagtgatgccaacattgctggcttcagcctgcccggccccaaggctgactgtgacaagatccccagcaccacagagggcttcaatgctgccaccaaggtggccagccggctgcctgtgccccaggtgtcccagcagagcgcctgtgagagcgccttctgcccccccaccaagctggacctgaaccacaagaccaagctgaacagcggggccgccaagaggaagggcaggaagaggaaggtgcctgatgagatcctggccttccagggcaagaggaggaagtacatcatcaacaagtgcagagatggcaaggagcgggtgaagaatgacccccaggagttccgggaccagaagctgggcaccctgaagaagtaccgcagcatcatgcccaagcccatcatggtgatccccaccctggccagcctggccagccccaccaccctgcagagccagatgctgggcggcctgggccaggatgtgctgctgaacaacagcctgacccccaagtacctgggctgcaagcaggacaacagcagcagccccaagcccagcagcgtcttcagaaatggcttcagcggcatcaagaagccctggcaccgctgccacgtgtgcaaccaccacttccagttcaagcagcacctgcgggaccacatgaacacccacaccaacagaagaccctacagctgccgcatctgcaggaagagctatgtgcggcccggcagcctgagcacccacatgaagctgcaccacggagaaaatcggctgaagaagctgatgtgctgtgagttctgtgccaaggtgtttggccacatccgggtgtacttcggccacctgaaggaggtgcaccgggtggtgatcagcacagagcccgcccccagcgagctgcagcccggggacatccccaagaacagagacatgtctgtgcggggcatggagggcagcctggagcgggagaacaagagcaacctggaggaggacttcctgctgaaccaggctgatgaggtgaagctgcagatcaagtgtggccgctgccagatcacagcccagagctttgctgagatcaagttccacctgctggatgtgcatggagaggagattgagggccgcctgcaggagggcaccttccctggcagcaagggcacccaggaggagctggtgcagcacgccagcccagactggaagaggcaccctgagcggggcaagccagagaaggtgcacagcagcagcgaggagagccacgcctgcccccggctgaagaggcagctgcacctgcaccagaatggagtggagatgctgatggagaatgaaggcccccagagcggcaccaacaagccccgggagacctgccagggccctgagtgccccggcctgcacaccttcctgctgtggagccacagcggcttcaactgcctgctgtgtgccgagatgctgggcaggaaggaggacctgctgcaccactggaagcaccagcacaactgtgaggaccccagcaagctgtgggccatcctgaacacagtgagcaaccagggcgtgattgagctgagcagcgaggccgagaagtag

SEQ ID NO: 55147 - DNA, 2457 bp, Artificial Sequence
  derived and/or modified sequence
atggacagcgagagcaacatccccagcggcaccatccagagccggaaaggtctccagaacaaatctcagttcaggactatcgcaccaaagattgtgcccaaggtccttacaagtagaatgttgccctgccatagtccctcacgcagtgatcaggtgaatctgggaccttctataaacagcaaactgttagggatgtccactcaaaactacgcgctgatgcaggttgccgggcaagagggaacgttctctctcgtggcacttcctcacgttgcatccgcccagccaatccaaaagcccagaatgtctttaccagaaaatctgaagttgccaatacccaggtaccaacctccacgcaactccaaagcaagccgcaagaaaccgattctgatttttcccaaatcaggatgctccaaggccccagctcagacacagatgtgtccacagatgtccccatccccgccccaccacccggaacttttgtacaagcctagcccgtttgaggaagtcccgtctcttgaacaggccccagcaagtatctccacagctgctttgaccaatggatccgatcatggcgacctgcggcctcccgtcacaaatactcatggctcactaaatcctccagccacccccgctagtagcactcctgaggaacctgcgaagcaggacctcactgccttgagtggcaaggcacactttgtgtccaaaattacatccagcaagcccagcgcggttgcttcagagaaattcaaagagcaggtggacttggccaaaacaatgactaaccttagtcctactatccttgggaatgccgtgcagctgattagcagcgtcccgaagggaaagctgccaattcctccttactcacgcatgaaaacaatggaagtgtataagattaaatctgatgccaatattgccgggttcagtttgcccggacctaaagccgactgtgacaagatcccgtcaactactgagggattcaacgctgcgactaaagtcgccagtcggctaccggtgccacaagtgagccaacagtctgcatgcgaatctgctttctgccctcctactaagctcgacctgaatcacaagacgaaactgaactcaggggccgccaagaggaaagggcgaaaacggaaagttccagatgagattctggcattccagggcaagagacgtaaatatatcattaataaatgccgcgatggcaaagagagagttaaaaatgatccccaggagtttagggaccagaagctggggaccctgaagaaataccggtccataatgcctaaacccattatggtgatcccgaccctggcctcactcgctagtccaacgaccctgcaaagccagatgcttggcggtttgggtcaagacgttctgctcaacaactccctcacccctaagtacctcggttgtaagcaagacaattcaagcagccccaagccaagttcggtgtttaggaacggcttcagcgggatcaagaaaccgtggcacagatgccacgtgtgtaaccaccactttcaatttaagcagcatctgcgggaccacatgaatacccataccaacaggaggccttattcatgccggatctgccggaaatcctacgtgcgtcctggcagtctctcaactcacatgaaactccaccacggcgaaaaccgcctaaaaaagctgatgtgctgcgaattttgcgcaaaagtttttgggcatattcgcgtttactttggtcacctcaaggaggtacacagagttgtcattagcaccgagccagcaccaagcgaactccaacctggggatatcccaaagaaccgggatatgtccgtgcggggcatggaggggagtctggaacgagaaaacaaatcgaacctggaagaggacttcttactgaaccaggccgatgaggtgaaattacaaataaagtgtgggcgctgccagataaccgctcaaagctttgcggaaatcaaatttcatttgttggacgtgcacggcgaggagatcgaaggaaggctgcaagagggaacattccccggaagcaagggcactcaagaggaactcgtccaacacgcgagcccagactggaagcggcatccagagagaggtaagcccgaaaaggtccattcttcatctgaagagtctcatgcttgtcctcggttaaaacgacagctacacttgcaccaaaacggggtggagatgctgatggaaaatgaaggtccccagtcaggaaccaacaaacccagagaaacatgccagggtcctgagtgtccgggtctccacactttcctcctctggagccactcaggctttaattgtctactgtgcgcggagatgcttgggcgcaaagaagacttgctgcaccactggaagcatcagcacaattgcgaagatccttcaaaactgtgggccatcctgaataccgtcagtaatcaaggggttattgaattaagctccgaggccgaaaaatag

SEQ ID NO: 55148 - DNA, 1644 bp, Artificial Sequence
  derived and/or modified sequence
atgcagaacagcgtgagcgtgccccccaaggacgagggcgagagcaatatcccttcaggcaccatccagtcaaggaaggggttacagaacaagagccagtttcgcacaattgcacccaaaattgtgccaaaagtactgacaagtagaatgctgccctgccattcaccatcgcgaagtgatcaggacctgcgccctaccgtcatcaggtacccaccaccccagaaggctctaatgcaacctccccggtggcaggctgggtatctgttccacaaaacaaagctgaactctggcgccgcaaaaaggaagggtagaaagcggaaagtgccagacgagatattggcttttcagggtaaaaggagaaagtacattatcaataagtgccgcgatggaaaggagcgcgtaaaaaacgatcctcaagaatttcgagaccagaagctcggcacgctaaaaaaatatcgcagtataatgcctaaacctataatggtcatccctactctagcctctctggcttcaccaacaacgttgcagtcccagatgctgggggggctcggtcaagatgtactactgaacaattctctgacccctaagtatctggggtgcaagcaggacaacagtagctcacccaaaccgtcatcagtgtttaggaacggattctccggcatcaagaaaccatggcatcgctgtcacgtgtgtaaccatcactttcagttcaagcagcacctgcgggatcatatgaacacccacactaacagaagaccctacagctgccgcatttgtcgaaagtcctacgtacggcctggctccctgtccacccacatgaaactacatcacggagagaataggctcaagaagttaatgtgttgtgaattctgcgccaaggtgttcgggcacatcagggtatattttgggcacctgaaggaagtgcatcgagttgtgatcagcactgagcctgccccctccgagctgcagccaggggacatacccaagaatagagatatgagtgtgcgaggtatggaaggttcactcgagagagaaaacaagtctaacttagaagaggactttctcctcaaccaggctgatgaggtgaagctgcagataaaatgcggccgctgccagatcacggcgcagagcttcgcggagatcaagttccatctgctcgacgtgcatggagaggaaattgaaggaagacttcaggaggggacctttcccggatcgaaggggactcaggaggaattggtgcagcacgcgtctcccgattggaaacgccatcctgaaagaggcaaacctgaaaaagttcactccagctcagaggaatcgcacgcatgcccacgcttaaagcggcagttacacctgcatcagaacggtgtggaaatgctgatggaaaatgagggaccacagtctgggaccaataaaccgcgcgaaacatgtcaaggtccagagtgtccagggctgcacacctttttgttgtggagtcattccggctttaactgcttactgtgcgccgagatgttagggcgtaaggaagatctgctgcaccactggaagcaccagcataactgtgaggacccaagtaaactttgggccatcctaaatacagtgagcaatcagggggtgatcgaactgtcaagtgaggcggaaaaatag

SEQ ID NO: 55149 - DNA, 2457 bp, Artificial Sequence
  derived and/or modified sequence
atggacagcgagagcaacatccccagcggcaccatccagagccggaaagggttacagaacaagtctcagtttcgcactattgcacccaagatcgtccctaaggtcctgacaagtcgtatgctgccttgtcactccccgagtaggagcgatcaagtaaacttgggccccagcataaatagtaagctcttgggcatgagcacacagaactatgccttaatgcaggtcgcgggacaggaagggacatttagtttggtggcccttccacacgtggccagcgctcaacccattcaaaaaccacgaatgtcactgccggagaatttaaagctgcctattccgcgatatcagcctcctcgtaattcaaaagcctccagaaaaaaaccaatcttgatcttccctaagagcggctgcagcaaggcccccgctcagacccagatgtgcccacagatgagtccttcgccccctcaccaccccgaactgctgtataaaccttctccatttgaagaagtgcctagcctggagcaggcccccgcctcgataagtaccgccgcacttaccaacggttctgaccatggggatcttagacctccagttacgaatacacatggttccttgaaccccccggctactcctgcgtcatccactcctgaggaacctgcgaaacaggacctgaccgcactgagcggtaaagcccatttcgtctcaaaaataacttctagcaagccttctgccgtggcaagcgagaagttcaaggagcaggtggacttggctaagacgatgacaaacctgtctcccaccatcctgggcaacgccgtccagcttatcagcagtgttcccaagggcaagttgccaattccgccctactcccgaatgaagacaatggaggtttataaaattaagagcgacgcgaacatcgccgggtttagtttacccggcccaaaggccgactgcgataaaatcccttccaccactgaagggttcaatgccgccactaaggtcgcctccagattaccagtcccccaagtgagtcagcagtctgcttgcgagtccgctttctgtccccccactaagctggaccttaatcacaaaacgaaactgaattccggggctgctaagcgcaagggtagaaagaggaaggtgcctgatgagattttggcattccagggcaaaagacgaaagtacatcattaacaagtgtagggatggcaaagagcgtgttaaaaacgacccacaggaattccgagaccagaaactcgggacactgaaaaagtatcgatcaattatgcctaagcccatcatggtcattccaactttagcgtctttggcctctcctaccacactgcagagccagatgctcggtggccttggccaagatgttctgctgaacaattcactgacacccaaatacctgggatgcaagcaggacaattccagctctccaaaacctagttctgtttttcgtaatggcttttcaggtattaaaaagccctggcaccggtgtcacgtgtgcaatcaccactttcagttcaagcaacacctccgggaccacatgaacacccatacgaaccgtcggccttattcctgtcggatctgtcgcaaaagttacgtgaggcccggttctctgtccacacacatgaagttacaccatggggagaatcggctgaaaaagctgatgtgctgcgaattctgcgcaaaagtctttggacatattcgcgtctactttggtcacctaaaagaggtgcatcgggtcgttatttcaactgagcctgccccctcggagctacagcctggggatatcccgaagaacagggacatgtccgtccgaggcatggaggggagcctagagcgcgagaacaagagcaatctggaagaggatttccttttaaatcaggcggatgaagtgaagctacagataaagtgcgggcgctgccaaattactgctcagtcctttgcagaaatcaaatttcacctgcttgacgtgcacggggaggaaattgaaggacggcttcaggaaggaacctttcccgggtctaagggaacccaagaggagctcgttcagcacgcctcacccgattggaaaaggcaccctgagcgcggaaagccggagaaagtgcacagtagcagtgaagaaagtcacgcctgtccacgactgaagcgccagctacacttacatcagaatggcgtcgaaatgctgatggaaaatgaagggccccagagtgggaccaataaaccccgggagacctgccagggaccggagtgccccgggctccataccttcctgctctggtcccatagcggtttcaactgcctcctgtgtgcggagatgttgggacgaaaggaggacctcctgcatcactggaagcatcagcataactgtgaggaccccagcaaactctgggccatcctcaataccgtcagtaatcagggtgttatagaactgtcttctgaggccgagaagtag

SEQ ID NO: 55150 - DNA, 2457 bp, Artificial Sequence
  derived and/or modified sequence
atggacagcgagagcaacatccccagcggcaccatccagagccggaagggattgcagaacaaatcacagttccgaactattgcacccaaaatcgttcctaaggtcctgacatcccggatgctgccttgtcacagcccctctcgctccgaccaggtcaacttaggcccctctattaactcaaagctgctgggaatgtccacacagaactacgcgctcatgcaggtggccggtcaagagggcacgtttagtctggttgccctgcctcacgttgcatcagcacagcctattcagaagccccggatgtcgctcccagagaatttaaagctgcccatcccacgctaccaaccgccacgcaactccaaagcctcaagaaagaaacccattctcattttccctaaaagcggttgttcaaaggcgccggcccagactcagatgtgcccgcagatgtcccctagtccgccacaccatcctgagctgctgtataaaccaagtccttttgaggaggtgccatccttagagcaggccccagcctcaatctcaactgccgctttgacaaatgggagcgaccacggtgatctgcggccccccgtgaccaatactcacggatcactgaaccctcctgcaacacctgcgtccagcactcccgaggaacccgcaaagcaggatttaactgccttatcaggcaaagcccactttgtctcaaagattacatcatccaaacccagcgccgtggcctccgagaagttcaaagagcaagtagatctggccaaaaccatgaccaatctgtcccctaccattctgggcaatgcagtgcagttaattagcagtgtacctaaaggtaagttgccaatacctccttattcccggatgaagactatggaagtatataagatcaaatcagacgcaaacattgcagggttctcattgcccggaccgaaggccgactgcgacaagataccgagcactacagaggggtttaacgccgcgaccaaggtcgcctcccgtttgccagtcccccaagtctctcaacaatcagcttgtgaatccgctttctgccctccaactaagctagacctgaatcacaagactaagttaaacagtggcgccgccaagagaaagggtcggaaacgcaaagtccctgacgaaatcctcgccttccagggtaaacgccgaaagtacatcatcaacaagtgtagagacgggaaggagcgggtcaaaaatgatccacaagagttccgcgatcagaaactgggtactcttaaaaagtataggagcatcatgccaaaaccaatcatggtgattccaaccctggcgtcactcgcaagtcccacgaccctccagtctcagatgttaggtggcctcggccaggatgtgctgctgaataattctctcaccccgaagtatttggggtgtaagcaggacaactcaagctcccccaaaccttctagtgtatttaggaatggttttagcggaatcaagaagccctggcacagatgccacgtgtgcaatcaccactttcagttcaaacagcacctgagagatcatatgaatacgcataccaatcgcagaccatacagttgtcgaatctgcaggaagagctatgtgcggcctggtagtctctctactcacatgaagctgcaccatggcgagaaccggctgaaaaaacttatgtgctgcgaattttgtgctaaagtcttcggacatatccgtgtatactttgggcatctgaaagaagtgcaccgagtagtcatctcaaccgaacctgctcctagcgaactgcaacccggcgacatcccgaagaatagggacatgagcgttcgcggtatggaaggttctctggaacgggaaaataagtccaacttggaggaagacttcttgctgaatcaagcggacgaggtgaaactgcagatcaaatgcggtaggtgccagataacagcgcaaagcttcgccgaaatcaagttccacctgctggatgttcatggggaggagatcgagggccgtctgcaagaggggacctttccggggtccaaggggactcaagaagaacttgtccagcacgcctctccagattggaaacgccatccagagagggggaaacctgagaaagttcatagcagctccgaagagtcccacgcttgcccacggctcaagcggcagctacatctacatcagaacggcgtagagatgttaatggaaaacgagggaccacagagtggtaccaacaagccccgggagacctgtcaagggcccgaatgtcctggattgcacactttcctgctttggagccattccggctttaattgtttattatgcgccgagatgcttgggcgaaaggaggacctgctccaccattggaagcatcaacataattgtgaggatccttccaagctttgggccatcctcaatacagtgtcaaatcagggagtgatcgaactgagcagtgaggcagagaagtag

SEQ ID NO: 55151 - DNA, 2340 bp, Artificial Sequence
  derived and/or modified sequence
atgctgccctgccacagccccagccggagcgaccaggtgaacctggggccctctattaatagcaagctcctagggatgagtactcaaaactacgctttgatgcaggtggcagggcaggaaggaacattctctttggtggcccttccacatgtggcctctgcgcagcccatccagaagccgcggatgtctctgcctgaaaacttgaaattacctatccctcgctaccagccccccaggaacagtaaagccagtaggaaaaagcccatactgatatttcccaaatcaggttgctcaaaagcccccgcccaaacccagatgtgtcctcagatgagtccttctccacctcaccaccctgagctgttgtataagccctcccctttcgaggaggtgccctccctcgagcaggcccccgcctccatttcaactgccgctctgacaaatggatccgaccacggcgatctcaggccaccagtgactaatacacacggctctctcaatccaccagctacaccggccagcagtacccccgaagagccggccaagcaggatttgacggccctcagcggcaaggctcattttgtgagtaaaatcaccagttctaaacctagcgccgttgcatccgaaaagttcaaagaacaggtggatctggcgaaaaccatgacaaacttaagccccacaatcttgggaaacgccgtgcagctcatttcttcagttccaaagggaaaattgcctatcccaccctactccaggatgaaaactatggaagtatacaaaataaagagcgatgcaaacattgcgggcttttctctacccggcccaaaagctgactgcgataagatccccagcaccacagaaggcttcaatgccgccaccaaagtggctagcagacttcccgtgccacaagtgtcccagcagagtgcctgtgagagcgctttttgtcccccgacaaaactggatctaaaccacaaaactaaactcaactccggggcagctaagaggaagggtagaaaacgcaaggtgcctgatgagatcttggcgtttcaggggaagagaagaaaatatattatcaacaaatgtcgagacggaaaggagagggttaagaatgacccgcaggaattcagggaccagaagcttggaaccctgaaaaaatatcgcagcattatgcctaaaccgatcatggtgattcccacactagcaagcctggccagccccaccactttacagagtcagatgctggggggcctgggccaggacgttctattaaataactcactgacgcctaagtatcttggttgtaagcaggacaatagttcgtccccgaaaccatcatctgtttttcgtaatggatttagtggtatcaagaagccgtggcataggtgccacgtttgtaaccatcattttcagttcaagcagcatttgagagaccacatgaatacccacaccaaccgacgtccctactcttgtcgcatttgccgcaagtcatatgtccgcccaggatctctgtcaacacacatgaagctccaccatggcgagaataggttgaagaagttgatgtgctgtgagttttgtgcaaaggttttcggccacatcagggtgtattttggtcatctgaaagaggtgcatcgggttgtcatcagcaccgagcctgcgccttccgaacttcagccaggcgacattccaaagaatcgtgatatgagcgtgcgaggcatggaagggtccctggaacgtgaaaataagagcaatctggaagaagatttcttactgaaccaggctgatgaagtgaaactacaaatcaaatgtgggcgatgtcaaattaccgctcagagcttcgctgagattaaatttcaccttctggatgtacacggcgaggagatcgagggaagactgcaggaaggaaccttcccagggtccaagggtactcaggaggagctcgtgcagcatgcatcccccgactggaagcgccaccccgagcgaggcaagcctgagaaagtacactcttcctcagaggaaagtcacgcctgtccccgtcttaagcggcagctccacctccaccagaatggggttgaaatgctgatggaaaatgagggacctcagagcgggacgaacaagccccgggaaacatgtcagggaccagaatgtcctggtctccatacgtttttgttatggtctcactctggtttcaactgtctcctatgcgcagaaatgctaggacggaaagaggatttactccaccactggaaacatcagcataactgtgaggatccaagcaaactgtgggctattcttaacacagtgtccaatcagggggtgatcgaattgtcgagcgaggcagaaaagtag

SEQ ID NO: 55152 - DNA, 2457 bp, Artificial Sequence
  derived and/or modified sequence
atggattcggagtcgaacatcccatctggaactattcaatctagaaaaggactgcagaataaatcccagttccggacaattgcccctaaaatagtgcccaaggtgctaacctccaggatgctgccttgtcactccccctcaagatctgaccaggtgaatctcggaccatctattaactccaagttactggggatgagcactcagaactacgccctgatgcaagtagccggacaggaaggaaccttttcattggtggccttaccacacgtggcttctgcccagccaatccagaagcctagaatgagcctgcccgaaaaccttaagctccccattcccagatatcagccgcctcgcaatagcaaggccagtaggaaaaagcccattcttatctttcctaagagcggatgctctaaagcccctgctcagacccaaatgtgcccgcagatgtcccccagccctcctcaccaccccgagttactgtacaagccgtcaccctttgaggaggttccatctctcgaacaggcccctgccagtatttctacagctgcacttactaatggaagcgaccacggggacctgcgtccaccagtcactaatacccacggcagcctgaaccctccagcgaccccagcctcttccacccctgaagaacccgcaaaacaagatctcacggcattatctggcaaggcacacttcgtctccaagataacctcatcaaagccatcagccgttgccagcgaaaagtttaaggaacaggtcgatctggccaaaactatgaccaacctgagtcccacaatcctcgggaatgcagtccagctcattagcagcgtgcccaaggggaagttaccaatccctccttacagcaggatgaagactatggaggtgtacaagatcaagtccgatgcaaacatcgctgggttttctctgcccggtcccaaagctgactgcgataaaattccgtcaaccaccgaaggctttaatgccgcaacaaaagtggcttcaaggctgcctgttccacaagtgagtcagcaaagtgcatgtgagtccgccttctgcccacctaccaaactggacctgaaccataaaacaaaattaaactccggagccgctaaacgcaaggggcgtaagcggaaggtccctgacgaaattcttgcatttcagggcaagcggcgtaaatatattataaacaagtgcagggatggcaaggaacgcgtcaagaatgatcctcaggagtttagggaccagaaactggggaccctcaaaaagtacaggtctatcatgcctaaaccgatcatggtaatcccgaccttggctagcctggcatctcctaccaccctacagtctcagatgctaggagggttggggcaagacgtgctgttaaacaacagtctgacaccgaagtatctgggatgcaagcaggacaatagtagcagcccaaaacctagttctgtcttccggaacggtttttccggaataaaaaagccttggcatcgctgccacgtttgcaaccaccatttccagtttaaacagcacctccgagatcacatgaacacccacactaatcgacggccatatagctgtcggatctgccgaaagtcctatgtgcgcccaggcagcttgtcgacacacatgaaactccaccacggcgaaaacaggttgaagaagttgatgtgctgcgaattctgtgctaaagtctttggccacatccgggtctactttggccatctcaaggaggtgcatcgtgtagtgatctcaacggagcccgctcccagtgagttgcaaccaggggatatccccaaaaatcgagatatgagtgtgcgagggatggaagggagtctagagcgtgagaataagtcgaacctggaggaagacttcctcctgaaccaggccgacgaggttaaattacagattaagtgcggccgatgccagatcacagcccagagctttgctgagatcaagttccatcttcttgatgtgcatggtgaggagatcgaaggaaggttgcaggagggtacgttcccagggtcaaagggaacccaagaggagcttgtacagcacgcatcccctgattggaaacgtcatcccgagagggggaagcctgaaaaagtacattccagttctgaggagtcccatgcatgtccccgtctgaagagacagctgcacttgcaccagaacggcgtggagatgttaatggagaatgaaggaccacagtccggtaccaacaaaccccgagagacctgccaaggaccggagtgcccaggcttgcacaccttcctgctttggagccactctggctttaactgtttactgtgcgctgagatgctaggcagaaaggaggatcttctccaccactggaagcaccagcataactgcgaagatcctagcaagctctgggctattctgaataccgtctccaaccagggcgtcattgaactcagcagtgaggccgagaaatag

SEQ ID NO: 55153 - DNA, 1644 bp, Artificial Sequence
  derived and/or modified sequence
atgcagaattctgtatctgtcccgccaaaagatgagggggaaagcaatattcccagtggtaccatacagagcagaaaaggcctccaaaataagagccagttccgcactatagcaccaaaaatcgtgcctaaagtcctgaccagtagaatgctcccgtgccattcaccctctcggtcggatcaggacctgaggcctacagttatccgatacccccctccacagaaggccctcatgcagcctccgagatggcaagcagggtatttgttccacaaaacgaaactaaatagcggagctgccaaacgcaagggaaggaaaaggaaggtgcccgatgaaatcttagccttccagggaaaacgtcggaagtacattataaacaagtgccgggatggcaaagagcgcgtgaaaaatgatcctcaggaattcagggaccagaagctcggcaccctgaaaaaataccggtccataatgcctaagcctataatggtcattcctaccctcgcatctctcgctagccccactacacttcagagccagatgttgggcggactcgggcaggacgtcctgttaaataattcacttacacctaagtaccttggctgtaagcaggacaattccagtagccctaagcctagttctgtgtttagaaatggctttagcggtatcaagaaaccctggcatcggtgtcatgtatgcaatcatcatttccagttcaagcagcatctgcgggaccacatgaatactcacaccaaccgccgaccttactcatgcagaatctgtaggaagagctacgtgaggcccggtagtctttccacacacatgaaattgcaccacggcgagaatcggctcaagaagcttatgtgctgcgaattctgtgccaaggtgttcgggcatattagggtctatttcggccacctgaaagaggtgcacagggtcgtgataagcactgaacccgctccaagtgaactccaaccaggcgacatccccaaaaaccgggacatgtccgtgaggggtatggaaggcagtttggaacgagaaaacaagagcaacctggaggaagactttctgctgaatcaagccgatgaggtgaagctgcagatcaagtgcggaagatgtcaaatcacggctcagagttttgctgaaattaaattccacctactcgacgtgcacggggaggagattgaaggacggctgcaggagggtactttccccggttcgaagggaactcaggaggaactcgtgcagcacgccagcccagactggaagcggcaccccgagagggggaagcccgagaaagtgcactctagcagcgaggaatcacacgcttgtcctaggttaaaaaggcagctgcacttgcaccagaatggggtagaaatgctcatggagaatgagggcccacagtccggcaccaataagcctagagaaacttgccaagggccagagtgtccagggttgcacacatttctgttgtggagtcatagcgggtttaattgcctcctgtgcgctgagatgctggggagaaaagaagacctccttcatcattggaagcaccagcacaactgcgaggatcccagcaaactctgggccattttgaataccgtgtccaatcagggcgtgattgaactgagcagtgaagccgaaaagtag

SEQ ID NO: 55154 - DNA, 2457 bp, Artificial Sequence
  derived and/or modified sequence
atggactcggagagcaacatacccagtgggaccattcagtctaggaaggggctgcaaaacaaatcccaatttcgtacgattgctcctaagattgtccccaaggtgttgacctctagaatgctgccgtgccactctcctagccggtcagatcaggtcaatctgggcccttcaataaattccaaacttctgggaatgtctacccagaactatgccctcatgcaagtagccggacaagagggcacattcagtcttgttgcgctccctcatgtggcgagcgcccagcctatccagaagccgagaatgtcattacccgaaaacctcaagctgcccatccctcggtatcagccgccaagaaatagcaaggccagcagaaaaaaacctatcttgattttcccaaagtctggctgctcgaaagcacctgctcaaactcagatgtgcccacaaatgtccccttcccccccacatcatcctgagctgctgtacaagccgtcaccattcgaagaggtaccttctttggagcaggcccctgccagcatctccaccgccgctctgacgaatggctccgatcatggtgatctgcggcctcctgtgacgaacacccacggaagcctgaacccccctgcaaccccagctagtagtacacctgaggaacctgcaaaacaagaccttaccgcgctctcaggaaaggcgcacttcgtatcaaagatcacttccagtaaaccctcggccgtagcaagcgaaaagttcaaagaacaggtagacctggcgaagaccatgaccaacctgagtcctacgattctgggtaatgcagtccagcttatttcctctgtcccgaagggcaaactccccatcccaccttattcgcgcatgaagacgatggaagtctataagatcaagtcagatgccaacatcgctggcttttctcttcccggaccgaaagccgattgtgacaaaatcccctctactactgaaggctttaatgccgctactaaggtggcatcccggctgcccgtgcctcaggtatcccagcaaagcgcgtgcgagtccgcattctgccccccaactaaacttgatctgaatcacaagaccaaactaaactctggagccgcaaagcgtaagggcagaaagaggaaggtgcctgatgaaatcctggctttccagggtaagcggaggaaatacattattaataagtgtagagatggaaaagagcgggtgaagaacgaccctcaagaattcagagatcaaaaacttggcaccctgaagaaatacaggtctataatgccaaaaccaatcatggtgatccccaccctcgccagtttggctagcccgactacccttcagagccagatgctcgggggtctcggccaggatgttcttctaaacaacagtttaactccaaagtatctcggttgcaaacaggataactcaagcagcccaaagccttcctctgtgttccgcaatggcttcagcgggattaagaagccctggcatcggtgtcacgtgtgcaatcaccactttcaattcaaacagcacctgcgtgatcacatgaacacccacaccaaccgcaggccttattcttgcaggatttgtaggaaatcatacgtaaggccaggatcactgtcaactcacatgaagctgcaccatggtgagaacaggctaaaaaagttaatgtgttgcgagttttgcgcaaaggtgtttggccacatccgtgtgtactttgggcatttgaaggaagtccaccgcgtggtgataagcactgaaccagccccaagcgagctgcaacccggagatattcccaagaaccgtgatatgagtgtcagaggtatggagggttctctggagcgggaaaacaagtcaaatcttgaagaggacttcctcctcaaccaggccgatgaagtcaagctccagataaagtgtgggcgttgtcagattaccgcccagtcttttgcagaaatcaaattccacctgctggatgtacacggagaggagattgagggacggttgcaggaaggaacttttccagggtctaaggggacacaggaggaattagtacagcatgctagtccagactggaaaagacatccagagagaggcaaacccgagaaagttcattcaagtagcgaagaatcacatgcctgtcctcggctcaagcggcagttacacctgcatcagaacggcgtggagatgttgatggaaaacgaggggcctcaatcagggacaaacaagccccgtgagacctgtcaagggccagagtgcccaggactccacacatttctcctctggtctcactctggctttaactgcctgttatgcgctgaaatgctcggtcggaaagaggacttactgcaccattggaagcaccagcacaactgcgaggatccatcaaagctgtgggccatcctgaatactgtctccaaccagggagtgatagagctcagctccgaggccgagaaatag

SEQ ID NO: 55155 - DNA, 2457 bp, Artificial Sequence
  derived and/or modified sequence
atggactcagagtcaaacatccctagcggcaccatacagtcccgcaaggggctccagaacaagtcccagttccgcaccatcgctcctaagatcgttcctaaggtgctgacctccagaatgcttccatgccacagccctagtcgatctgaccaagtgaacttaggaccaagtatcaatagcaagttgttaggaatgagtactcagaactacgctttgatgcaggtggcagggcaggagggcacattctccctggtcgcactgccacacgtggcttctgcgcagcccattcagaagcccaggatgtctctgcccgagaatctcaagttgccaataccgcgttaccaaccacccagaaattcgaaagcttctaggaaaaagcccattctaatcttccctaaatcaggctgcagcaaggccccagcacagacccagatgtgtcctcagatgtctcccagtccgcctcatcaccccgaactgctgtacaaaccgagcccttttgaggaggttccctccctggaacaggccccagcatccatcagcacagctgcacttaccaatgggagtgatcacggcgatctccggcctcctgtgacgaatactcacggatcactgaaccctcccgctacacctgcctccagcactcctgaggaaccagccaagcaggacctgaccgctctgagcggcaaggcacacttcgtcagtaaaattactagtagtaagcctagcgccgtggcctcagagaaatttaaggaacaggtggacttggccaaaacaatgaccaatctgtcccccacaattctgggtaacgcggtacagctgattagtagcgtgcccaagggcaaacttcctatccctccctattcacggatgaagacgatggaggtgtacaaaatcaaaagcgatgccaatattgctgggtttagcctccccggaccgaaggccgattgcgacaaaattccctctaccactgaaggttttaacgcagccaccaaagtggcaagccgcctacctgtgccacaagttagtcagcagtccgcgtgtgagtccgcgttctgtcctccaactaagctggatttaaaccacaaaaccaaattgaacagcggagctgccaagaggaaaggacgcaagaggaaggtgccagacgagattttagcgtttcagggaaaacgtcggaaatatataattaacaagtgccgggacggcaaagaaagagtaaaaaatgacccacaagaattcagagaccagaaactcggcacattaaagaagtatcgcagtattatgccaaaacccatcatggtcatcccaacgctggcaagtctcgccagtccaaccaccctccagagccaaatgcttggtggcctgggccaagacgtgcttttaaataatagtcttactcctaagtaccttggatgcaaacaggacaactcgtccagtccgaaaccaagtagcgtgtttagaaatggcttcagcggcattaaaaagccctggcacaggtgtcacgtgtgcaatcaccacttccagttcaagcagcacctgcgcgatcacatgaatacccatactaacagacggccatacagctgcaggatttgcagaaaatcatacgtccggcctggctccttaagcacccatatgaagttgcatcacggagaaaaccgtctgaagaaactgatgtgttgcgaattctgtgctaaagtctttgggcacatccgcgtttacttcggccacctgaaagaagttcatcgcgtggtgatttcgacggagccagctcctagtgagttgcaaccaggcgacatccctaaaaatcgtgatatgagtgtacgcggtatggaaggaagcctggaacgcgagaataagtctaacttagaggaggattttctcttaaatcaagctgacgaggttaaacttcaaataaagtgtggaagatgccaaattacggcccagagcttcgctgagattaaatttcaccttctcgatgtccatggcgaggaaatagaaggtcgtctgcaggagggcactttcccagggtcgaagggtactcaggaagagcttgtgcaacacgcaagccccgattggaagcggcaccccgagaggggaaagcccgaaaaagtgcactcaagttcagaagagagccatgcttgcccccgtctgaagcgtcaactccacttgcaccagaatggtgttgagatgctcatggagaatgagggtccccagagtggtactaataagccgagagaaacatgccaggggcctgaatgtccaggtctgcacacgttcctcctctggagtcacagtggctttaattgtttgctgtgtgccgaaatgctgggacgaaaggaagacctgctacaccactggaagcatcagcacaactgtgaagacccctccaaactgtgggccatccttaacaccgtgtcaaaccagggcgttatcgagttatctagcgaggctgagaagtag

SEQ ID NO: 55156 - DNA, 2340 bp, Artificial Sequence
  derived and/or modified sequence
atgctgccttgtcacagcccaagcagatccgatcaagttaacctgggacctagcattaattcaaaattgcttgggatgtccacccagaactatgcactaatgcaggttgcgggacaggaaggaaccttcagcttagttgccttaccacacgtcgccagcgcgcagccgatccagaagcctcgcatgagtttgcccgagaacttgaaactgccaataccaagataccaaccaccacggaattcaaaggcttctagaaagaaacccattctgattttccctaagtctggatgcagtaaagcacccgcacaaacacagatgtgccctcagatgtccccttctcctccacaccaccccgagttactctacaaaccgtcccccttcgaggaggttccctctctggaacaggcaccagccagcatctccacagcggctctgaccaatggatcggatcatggagacctgcgacctccggtgactaacacccatggatccctgaatccccctgcaactccggcaagtagcacaccggaagaacccgcaaagcaagatctcacagccttgagcggtaaggcccattttgtcagtaaaattacaagcagtaagccgtcagccgtcgctagcgagaaatttaaagagcaggtggatttagccaagacaatgaccaatctctctcccacaatactcggcaatgccgttcagcttatcagcagcgtgcctaaaggcaaacttcctattcctccatacagccggatgaagacaatggaggtatacaaaatcaaatcagacgctaatatagccggattttctctgcccggacctaaagccgattgcgacaagatcccatcaactaccgaggggttcaacgcagcaacgaaggtcgcctcaaggctgcccgttccacaagtgtctcagcagtccgcctgcgaatccgcattctgtccgccaaccaagctcgatcttaatcataaaacaaagctgaactcaggcgctgcgaaacgcaagggccgaaagaggaaggtcccagacgagattctggcgttccagggcaaacgtcgcaaatatatcattaataaatgccgggacggaaaagaacgtgtgaaaaacgacccgcaggagtttcgagaccagaagttaggcaccttgaaaaaataccggagcattatgccgaaacccatcatggtgatcccaacactcgccagcctggcctcccctaccacgctgcagtcacagatgctggggggtctgggacaggacgtgttacttaacaatagtctcacaccgaagtacctcggctgtaagcaggataactcttcctctccaaaaccaagttctgtttttcgaaacggcttctccggaatcaagaaaccctggcaccggtgccatgtgtgtaaccaccactttcagtttaaacagcatctaagagaccatatgaacacccacaccaacaggcgtccttacagttgtcgcatatgtcgcaaatcttatgtcaggccaggctcgttgtccacccacatgaagctgcaccacggcgagaaccggctgaagaagctgatgtgctgcgaattctgtgcaaaggtcttcggtcatatcagggtgtactttggacacctcaaagaggtgcatagagtagtgatttctacagagcccgctcccagtgagttacagcctggagatatccccaaaaacagagatatgtctgtccgcggtatggaaggcagtctggaaagagagaacaagagcaatttggaggaggatttcctcctcaaccaggccgacgaggtcaagctgcagataaagtgtgggagatgtcagattaccgcgcagagcttcgccgagattaaattccacctgttggatgtgcacggcgaggaaatagaaggtcggttacaggagggcaccttccccggtagtaaagggacccaggaggaattagtgcagcacgcctcgccagactggaaacggcacccagagcgcggaaagccagaaaaggtacactccagttctgaggaatctcacgcctgccccagattgaagcgtcaactgcatttgcatcaaaacggagtggagatgctgatggagaacgaaggcccacaatccggaaccaacaagccacgcgagacttgccagggtccggaatgccctgggctgcacacgttcctgttatggtcccactcaggattcaactgtctactgtgcgcagaaatgttgggacgaaaggaagacctcctgcatcactggaagcaccagcacaattgcgaagatcctagcaagctctgggccattctgaacaccgtatctaatcagggtgtgatcgaactctccagcgaggcggagaagtag

SEQ ID NO: 55157 - DNA, 2173 bp, Artificial Sequence
  derived and/or modified sequence
gggggcccagcggcccgcgccccgtggcttgacctccccgactgctgggcccgtgacgtcaccccgctgtgacgcgcacgctgtaggaaaactataaaaatgaatgccatttcccatccagtactgaagtgttaaagttagaagacatttgctaagtcaaatcacttcaggtatgttgaagaaagtacgcacatcttatcttctgaacattttgatggaattaaccacaaacttcatgcaagaacagtaaaaggaaagatactattcaagtccagtacatcataatgcagaattctgtatcagtaccaccaaaagatgaaggtgaatcaaacatcccttctggaacaatacagagtaggaaaggtttgcagaataagagtcagtttaggaccattgcaccaaaaattgtgcccaaagtcctaacgtccagaatgctgccatgtcattcaccatcacgctctgatcaggacctaaggccgactgtgataagataccctccaccacagaaggctttaatgcagccaccaaggtggcaagcaggctacctgttccacaagtgtcacagcagagtgcctgtgaaagtgccttttgtccacccaccaaacttgatcttaaccacaaaacaaaactgaacagtggagcagcaaagagaaaaggaagaaaacggaaggtaccagatgaaattttggcatttcagggaaaaaggaggaaatatatcattaataagtgtagagatggtaaagaaagagtaaaaaatgatccccaagaattcagagaccaaaagctggggaccctgaaaaaataccgtagcattatgcccaaacctatcatggtcatacccactttggcctccctggcttctccaactacactacagtcccagatgcttgggggcctaggacaggatgttttgttaaataattcactcactcctaaatatcttggctgtaagcaagacaacagctcttcccctaagcccagctccgtgttcagaaatggattctctggcattaagaagccttggcacagatgtcacgtctgcaaccaccacttccagttcaaacagcaccttcgagaccacatgaatacacacaccaacagacgcccttacagttgtcggatttgtcgcaagtcctatgtacgtcctggcagcctgagcacacacatgaaacttcatcatggtgagaaccgtctgaagaaactcatgtgttgtgagttttgtgcaaaagtgtttggccacatccgagtctattttggccatctgaaagaagtgcatagggttgtgatcagcactgagcctgcgcccagtgaactgcagccaggagacataccaaagaacagagacatgagtgtgcgaggcatggagggatcattggagagggaaaacaagtccaacctggaagaagacttccttctaaaccaggcagacgaagtcaaattacaaatcaaatgtggtcgttgtcagattactgctcagtcttttgcggaaataaaatttcatttacttgatgttcatggagaggaaattgagggcaggctacaagaagggaccttcccaggaagcaaggggactcaggaagagttggtgcagcacgctagccccgactggaaaaggcatcctgagagagggaagccggagaaggttcattcctcctccgaggaatcacatgcatgtccaagactgaaaaggcagctccaccttcatcagaatggcgtggaaatgctcatggaaaatgaaggaccccagtcaggaaccaacaagccaagggaaacctgccagggccctgagtgtcctggcctccacacgtttctcttgtggtcccattcaggctttaactgcctgctttgtgcagagatgctgggacggaaagaggacctcctccaccactggaagcaccagcataactgtgaggacccttccaaactgtgggctattttaaatacggtctccaaccagggagtgatcgaactttccagtgaagctgagaaatgagaccccaaggcagcctggggttaaggagagagctctgccgccaccttccttcagagcttcgtgctttatggtggtgcttagtcacaaagatcaaacaacaggattggtgtgagtgaacagaaatgatttttgtacatggttttattttcttaacgaaataaaatataagctctcgaagca

SEQ ID NO: 55158 - DNA, 2097 bp, Artificial Sequence
  derived and/or modified sequence
gacgcgcacgctgtaggaaaactaattaattaaaaggatttacggtatatcttatgactctacaggagccttgggatatagataaaaatgaatgccatttcccatccagtactgaagtgttaaagttagaagacatttgctaagtcaaatcacttcaggtatgttgaagaaagtacgcacatcttatcttctgaacattttgatggaattaaccacaaacttcatgcaagaacagtaaaaggaaagatactattcaagtccagtacatcataatgcagaattctgtatcagtaccaccaaaagatgaaggtgaatcaaacatcccttctggaacaatacagagtaggaaaggtttgcagaataagagtcagtttaggaccattgcaccaaaaattgtgcccaaagtcctaacgtccagaatgctgccatgtcattcaccatcacgctctgatcaggacctaaggccgactgtgataagataccctccaccacagaaggctttaatgcagccaccaaggtggcaagcaggctacctgttccacaaaacaaaactgaacagtggagcagcaaagagaaaaggaagaaaacggaaggtaccagatgaaattttggcatttcagggaaaaaggaggaaatatatcattaataagtgtagagatggtaaagaaagagtaaaaaatgatccccaagaattcagagaccaaaagctggggaccctgaaaaaataccgtagcattatgcccaaacctatcatggtcatacccactttggcctccctggcttctccaactacactacagtcccagatgcttgggggcctaggacaggatgttttgttaaataattcactcactcctaaatatcttggctgtaagcaagacaacagctcttcccctaagcccagctccgtgttcagaaatggattctctggcattaagaagccttggcacagatgtcacgtctgcaaccaccacttccagttcaaacagcaccttcgagaccacatgaatacacacaccaacagacgcccttacagttgtcggatttgtcgcaagtcctatgtacgtcctggcagcctgagcacacacatgaaacttcatcatggtgagaaccgtctgaagaaactcatgtgttgtgagttttgtgcaaaagtgtttggccacatccgagtctattttggccatctgaaagaagtgcatagggttgtgatcagcactgagcctgcgcccagtgaactgcagccaggagacataccaaagaacagagacatgagtgtgcgaggcatggagggatcattggagagggaaaacaagtccaacctggaagaagacttccttctaaaccaggcagacgaagtcaaattacaaatcaaatgtggtcgttgtcagattactgctcagtcttttgcggaaataaaatttcatttacttgatgttcatggagaggaaattgagggcaggctacaagaagggaccttcccaggaagcaaggggactcaggaagagttggtgcagcacgctagccccgactggaaaaggcatcctgagagagggaagccggagaaggttcattcctcctccgaggaatcacatgcatgtccaagactgaaaaggcagctccaccttcatcagaatggcgtggaaatgctcatggaaaatgaaggaccccagtcaggaaccaacaagccaagggaaacctgccagggccctgagtgtcctggcctccacacgtttctcttgtggtcccattcaggctttaactgcctgctttgtgcagagatgctgggacggaaagaggacctcctccaccactggaagcaccagcataactgtgaggacccttccaaactgtgggctattttaaatacggtctccaaccagggagtgatcgaactttccagtgaagctgagaaatgagaccccaaggcagcctggggttaaggagagagctctgccgccaccttccttcagagcttcgtgctttatggtggtgcttagtcacaaagatcaaacaacaggattggtgtgagtgaacagaaatgatttttgtacatggttttattttcttaacgaaataaaatataagctctcgaagcat

SEQ ID NO: 55159 - DNA, 2780 bp, Artificial Sequence
  derived and/or modified sequence
atggatagtgaatcaaacatcccttctggaacaatacagagtaggaaaggtttgcagaataagagtcagtttaggaccattgcaccaaaaattgtgcccaaagtcctaacgtccagaatgctgccatgtcattcaccatcacgctctgatcaggtgaatctgggaccctccatcaactccaagctgctggggatgtccacccagaactatgccctgatgcaggttgctggccaggaggggacattttctcttgttgctctgccacatgttgcctcagctcagccaattcagaaacccagaatgtccctacctgaaaacctgaaacttcctattcctagatatcaaccccctagaaatagcaaagcatcaagaaagaaacccatcctgatctttcctaagagtggctgtagcaaagctcctgcccaaacccaaatgtgtcctcagatgtccccttccccacctcaccaccctgaactcctgtacaaacccagtccatttgaggaagtaccatcactagagcaagccccagccagcattagcacagctgcgctgaccaatggaagtgaccatggggacttgagaccaccagtgaccaacacccatggcagtctgaaccctcctgctaccccagcatcatccacaccagaggagcctgccaagcaggacctcacagctctttcagggaaagcacactttgtaagcaagataacatctagtaaaccttctgctgttgccagtgaaaaatttaaagaacaagttgatcttgcaaaaaccatgaccaatttatcaccaaccattcttggcaatgcagttcagttgatctcttcagtccccaaagggaaactgccaatcccaccctactcaagaatgaagacaatggaggtttacaaaatcaaatcagatgctaacattgcaggtttttctttaccaggacctaaggccgactgtgataagataccctccaccacagaaggctttaatgcagccaccaaggtggcaagcaggctacctgttccacaagtgtcacagcagagtgcctgtgaaagtgccttttgtccacccaccaaacttgatcttaaccacaaaacaaaactgaacagtggagcagcaaagagaaaaggaagaaaacggaaggtaccagatgaaattttggcatttcagggaaaaaggaggaaatatatcattaataagtgtagagatggtaaagaaagagtaaaaaatgatccccaagaattcagagaccaaaagctggggaccctgaaaaaataccgtagcattatgcccaaacctatcatggtcatacccactttggcctccctggcttctccaactacactacagtcccagatgcttgggggcctaggacaggatgttttgttaaataattcactcactcctaaatatcttggctgtaagcaagacaacagctcttcccctaagcccagctccgtgttcagaaatggattctctggcattaagaagccttggcacagatgtcacgtctgcaaccaccacttccagttcaaacagcaccttcgagaccacatgaatacacacaccaacagacgcccttacagttgtcggatttgtcgcaagtcctatgtacgtcctggcagcctgagcacacacatgaaacttcatcatggtgagaaccgtctgaagaaactcatgtgttgtgagttttgtgcaaaagtgtttggccacatccgagtctattttggccatctgaaagaagtgcatagggttgtgatcagcactgagcctgcgcccagtgaactgcagccaggagacataccaaagaacagagacatgagtgtgcgaggcatggagggatcattggagagggaaaacaagtccaacctggaagaagacttccttctaaaccaggcagacgaagtcaaattacaaatcaaatgtggtcgttgtcagattactgctcagtcttttgcggaaataaaatttcatttacttgatgttcatggagaggaaattgagggcaggctacaagaagggaccttcccaggaagcaaggggactcaggaagagttggtgcagcacgctagccccgactggaaaaggcatcctgagagagggaagccggagaaggttcattcctcctccgaggaatcacatgcatgtccaagactgaaaaggcagctccaccttcatcagaatggcgtggaaatgctcatggaaaatgaaggaccccagtcaggaaccaacaagccaagggaaacctgccagggccctgagtgtcctggcctccacacgtttctcttgtggtcccattcaggctttaactgcctgctttgtgcagagatgctgggacggaaagaggacctcctccaccactggaagcaccagcataactgtgaggacccttccaaactgtgggctattttaaatacggtctccaaccagggagtgatcgaactttccagtgaagctgagaaatgagaccccaaggcagcctggggttaaggagagagctctgccgccaccttccttcagagcttcgtgctttatggtggtgcttagtcacaaagatcaaacaacaggattggtgtgagtgaacagaaatgatttttgtacatggttttattttcttaacgaaataaaatataagctctcgaagcatatttttctaactatatgcagtcttattttaaaatacgtactgattcttaatatcttagactttcagaataaataaaaagatcaaaatttgaagattgaaatttagcagaatataggctgttcttcaaatacagctctcagtg

SEQ ID NO: 55160 - protein, 502 aa, Artificial Sequence
  derived and/or modified sequence
MGNFKSRKPKSIFKAESGRSHGESQETEHVVSSQSECQVRAGTPAHESPQNNAFKCQETVRLQPRIDQRTAISPKDAFETRQDLNEEEAAQVHGVKDPAPASTQSVLADGTDSADPSPVHKDGQNEADSAPEDLHSVGTSRLLYHITDGDNPLLSPRCSIFSQSQRFNLDPESAPSPPSTQQFMMPRSSSRCSCGDGKEPQTITQLTKHIQSLKRKIRKFEEKFEQEKKYRPSHGDKTSNPEVLKWMNDLAKGRKQLKELKLKLSEEQGSAPKGPPRNLLCEQPTVPRENGKPEAAGPEPSSSGEETPDAALTCLKERREQLPPQEDSKVTKQDKNLIKPLYDRYRIIKQILSTPSLIPTIQEEEDSDEDRPQGSQQPSLADPASHLPVGDHLTYSNETEPVRALLPDEKKEVKPPALSMSNLHEATMPVLLDHLRETRADKKRLRKALREFEEQFFKQTGRSPQKEDRIPMADEYYEYKHIKAKLRLLEVLISKQDVAKTI

SEQ ID NO: 55161 - DNA, 300 bp, Artificial Sequence
  derived and/or modified sequence
atgtgcgtgggcgagaagagaagagccatcatccccagccacctggcctacggcaagagaggcttcccccccagcgtgcccgccgacgccgtggtgcagtacgacgtggagctgatcgccctgatcagagccaactactggctgaagctggtgaagggcatcctgcccctggtgggcatggccatggtgcccgccctgctgggcctgatcggctaccacctgtacagaaaggccaacagacccaaggtgagcaagaagaagctgaaggaggagaagagaaacaagagcaagaagaagtag

SEQ ID NO: 55162 - DNA, 300 bp, Artificial Sequence
  derived and/or modified sequence
atgtgtgtgggtgaaaagaggagggcaataatccccagccatctggcttatggcaagaggggcttccctccctccgtccccgcggatgccgtcgtgcagtacgatgtcgaacttattgctctgattcgcgctaactactggctcaaactagttaaagggatcttgcccctggtggggatggcaatggttccagcccttctggggctgataggctaccatttatatcgcaaagcaaacaggccgaaagtatcgaaaaagaagcttaaggaagagaagcgcaacaagtcaaaaaagaagtag

SEQ ID NO: 55163 - DNA, 300 bp, Artificial Sequence
  derived and/or modified sequence
atgtgtgtgggggagaagagaagagccatcatccccagccacctggcctacggcaagaggggcttccccccatctgtgcctgcagatgctgtggtgcagtatgatgtggagctgattgccctgatccgggccaactactggctgaagctggtgaagggcatcctgcccctggtgggcatggccatggtgcctgccctgctgggcctcatcggctaccacctgtacaggaaggccaaccggcccaaggtgtccaagaagaagctgaaggaggagaagaggaacaagagcaagaagaagtag

SEQ ID NO: 55164 - DNA, 300 bp, Artificial Sequence
  derived and/or modified sequence
atgtgcgtgggcgagaagcggcgggccatcatccccagccacctggcgtacgggaagcgcggcttccccccaagcgtgccagcagacgccgtcgtgcaatatgatgtcgagttgattgcacttatcagggcaaactactggctgaagcttgttaaaggcattctgcctctggtcggtatggctatggtgccagctctgctgggcctgattggataccatctctatcggaaggcaaacagacctaaggtgagcaagaaaaagctgaaggaagaaaaaaggaacaagagcaagaagaagtag

SEQ ID NO: 55165 - DNA, 300 bp, Artificial Sequence
  derived and/or modified sequence
atgtgcgtgggcgagaagcggcgagctataattccgtcacatctggcttacggtaaacgtggcttccccccatccgtccccgcagacgctgttgtgcagtacgacgttgagctgattgctcttatccgggctaactattggctcaagctagtcaaagggatactgccgctggtgggcatggccatggtccccgctctcctcgggctgataggctatcatctgtatcgcaaagccaaccgtccgaaggttagcaagaagaagctgaaggaggagaagcgcaacaagtctaagaaaaagtag

SEQ ID NO: 55166 - protein, 146 aa, Artificial Sequence
  derived and/or modified sequence
MTLRPSLLPLHLLLLLLLSAAVCRAEAGLETESPVRTLQVETLVEPPEPCAEPAAFGDTLHIHYTGSLVDGRIIDTSLTRDPLVIELGQKQVIPGLEQSLLDMCVGEKRRAIIPSHLAYGKRGFPPSVPGTKDNLMRPPGMTSSSQ

SEQ ID NO: 55167 - DNA, 441 bp, Artificial Sequence
  derived and/or modified sequence
atgaccctgagacccagcctgctgcccctgcacctgctgctgctgctgctgctgagcgccgccgtgtgcagagccgaggccggcctggagaccgagagccccgtgagaaccctgcaggtggagaccctggtggagccccccgagccctgcgccgagcccgccgccttcggcgacaccctgcacatccactacaccggcagcctggtggacggcagaatcatcgacaccagcctgaccagagaccccctggtgatcgagctgggccagaagcaggtgatccccggcctggagcagagcctgctggacatgtgcgtgggcgagaagagaagagccatcatccccagccacctggcctacggcaagagaggcttcccccccagcgtgcccggcaccaaggacaacctgatgagaccccccggcatgaccagcagcagccagtag

SEQ ID NO: 55168 - DNA, 959 bp, Artificial Sequence
  derived and/or modified sequence
agtctggcctgggcgccgcgggaacgctgtcctggctgccgccacccgaacagcctgtcctggtgccccggctccctgccccgcgcccagtcatgaccctgcgcccctcactcctcccgctccatctgctgctgctgctgctgctcagtgcggcggtgtgccgggctgaggctgggctcgaaaccgaaagtcccgtccggaccctccaagtggagaccctggtggagcccccagaaccatgtgccgagcccgctgcttttggagacacgcttcacatacactacacgggaagcttggtagatggacgtattattgacacctccctgaccagagaccctctggttatagaacttggccaaaagcaggtgattccaggtctggagcagagtcttctcgacatgtgtgtgggagagaagcgaagggcaatcattccttctcacttggcctatggaaaacggggatttccaccatctgtcccagggactaaagacaacctgatgaggccacctggcatgacctccagcagccagtaacttgttagggaagagacctgcttgggccacatgggtctgctgcctgtgccaccacctttcccagaacactggacttctttcctgcccttttctacaactctacgctgtgtcagctgtacagccaccccccaccccttcctttcagcctccatcagggaagagacagtaaaaataatcacagtcaagtgattcaaaacaaaacaaaaagcaactgttaaagccaagtctgccccataactttaaaagccatcattggtcactgccgatgtctatttttgaagggttgagatggacagatttcccaagatgcatatcttttgctttcagttctaacaaatgttctattagctaaaatgtgttgtactccacagagtattgggctcgtaattctttttttttttttgagatggagtttcactcttgttg

SEQ ID NO: 55169 - DNA, 441 bp, Artificial Sequence
  derived and/or modified sequence
atgactttgcggccaagcctgctccccctgcacctgctattgctcctgctgctgagcgcggccgtctgcagagccgaggctggtctggagaccgagagcccagtgcgaactctccaagtcgagactttggttgagccaccagagccttgcgcagaacccgctgccttcggagataccctgcatatccactatacaggctctctggtggacggcagaatcattgatacatccctgacccgcgatcccttagtaatcgagctgggccagaagcaggtgattcccggactggaacagagcctgctggacatgtgtgtgggtgaaaagaggcgtgccattatcccatcacatctggcgtacggtaaacgtggtttcccgccttcagtgcccggaacaaaggataatctgatgcgcccaccaggaatgacctcctcctcccaatag

SEQ ID NO: 55170 - DNA, 441 bp, Artificial Sequence
  derived and/or modified sequence
atgaccctgcggcccagcctgctgcccctgcacctgctgctgctgctgctgctgtctgctgctgtgtgcagagctgaggccggcctggagacagagagccctgtgaggaccctgcaggtggagaccctggtggagcccccagagccctgtgccgagcctgctgccttcggggacaccctgcacatccactacacaggcagcctggtggatggccgcatcatcgacaccagcctgacccgggaccccctggtgattgagctgggccagaagcaggtgattcctggcctggagcagagcctgctggacatgtgtgtgggggagaagagaagagccatcatccccagccacctggcctacggcaagaggggcttccccccatctgtgcccggcaccaaggacaacctgatgaggcctcctggcatgaccagcagcagccagtag

SEQ ID NO: 55171 - DNA, 441 bp, Artificial Sequence
  derived and/or modified sequence
atgaccctgcggcccagcctgctgcccctgcacctgctgctgctgctgctactttctgcagcggtgtgccgcgcggaggccgggctggagaccgagtcacctgttagaacacttcaggtcgagaccctggtcgaacccccagaaccctgcgccgagccagccgccttcggagatactctgcacatccattataccggttctctggtggacggtcgaataatcgatacttccctgaccagagaccccctggtgatcgaactgggccagaaacaggtgatcccgggcctagaacagtctctgctcgatatgtgcgtgggtgaaaagaggcgtgccatcatcccctcgcacctggcctatggtaaaagaggcttccctccttctgtcccaggcaccaaggacaacctgatgagaccgcctggcatgaccagcagtagccagtag

SEQ ID NO: 55172 - DNA, 441 bp, Artificial Sequence
  derived and/or modified sequence
atgaccctgagaccctccctgttgccccttcatttgctgctcctcctcctgctgtcagctgctgtgtgtcgggcagaggccggactcgagactgagtctccagtgcgaacgttgcaagttgagacactggtcgaaccccctgagccttgtgcagaacccgctgccttcggagacacgctgcacattcattacactggttctctggtcgacgggaggatcatcgataccagcctcacccgagacccactggtcatcgagctgggccagaaacaagtgattcctgggttggaacagtccctgcttgatatgtgcgttggagagaagcggagggctattatccccagccacctggcttatggtaaacgcggtttccccccatcagtgccaggcactaaggataatctcatgaggccccctggcatgacctcttctagccagtag

SEQ ID NO: 55173 - protein, 681 aa, Artificial Sequence
  derived and/or modified sequence
MGFSSELCSPQGHGVLQQMQEAELRLLEGMRKWMAQRVKSDREYAGLLHHMSLQDSGGQSRAISPDSPISQTHSQDIEKLKSQYRALARDSAQAKRKYQEASKDKDRDKAKDKYVRSLWKLFAHHNRYVLGVRAAQLHHQHHHQLLLPGLLRSLQDLHEEMACILKEILQEYLEISSLVQDEVVAIHREMAAAAARIQPEAEYQGFLRQYGSAPDVPPCVTFDESLLEEGEPLEPGELQLNELTVESVQHTLTSVTDELAVATEMVFRRQEMVTQLQQELRNEEENTHPRERVQLLGKRQVLQEALQGLQVALCSQAKLQAQQELLQTKLEHLGPGEPPPVLLLQDDRHSTSSSEQEREGGRTPTLEILKSHISGIFRPKFSNLYRLEGEGFPSIPLLIDHLLSTQQPLTKKSGVVLHRAVPKDKWVLNHEDLVLGEQIGRGNFGEVFSGRLRADNTLVAVKSCRETLPPDLKAKFLQEARSSPSTSSWSLCRGSSPPAGGDFLTFLRTEGARLRVKTLLQMVGDAAAGMEYLESKCCIHRDLAARNCLVTEKNVLKISDFGMSREEADGVYAASGGLRQVPVKWTAPEALNYGRYSSESDVWSFGILLWETFSLGASPYPNLSNQQTREFVEKGGRLPCPELCPDAVFRLMEQCWAYEPGQRPSFSTIYQELQSIRKRHR

SEQ ID NO: 55174 - protein, 694 aa, Artificial Sequence
  derived and/or modified sequence
MGFSSELCSPQGHGVLQQMQEAELRLLEGMRKWMAQRVKSDREYAGLLHHMSLQDSGGQSRAISPDSPISQTHSQDIEKLKSQYRALARDSAQAKRKYQEASKDKDRDKAKDKYVRSLWKLFAHHNRYVLGVRAAQLHHQHHHQLLLPGLLRSLQDLHEEMACILKEILQEYLEISSLVQDEVVAIHREMAAAAARIQPEAEYQGFLRQYGSAPDVPPCVTFDESLLEEGEPLEPGELQLNELTVESVQHTLTSVTDELAVATEMVFRRQEMVTQLQQELRNEEENTHPRERVQLLGKRQVLQEALQGLQVALCSQAKLQAQQELLQTKLEHLGPGEPPPVLLLQDDRHSTSSSEQEREGGRTPTLEILKSHISGIFRPKFSNLYRLEGEGFPSIPLLIDHLLSTQQPLTKKSGVVLHRAVPKDKWVLNHEDLVLGEQIGRGNFGEVFSGRLRADNTLVAVKSCRETLPPDLKAKFLQEARILKQYSHPNIVRLIGVCTQKQPIYIVMELVQGGDFLTFLRTEGARLRVKTLLQMVGDAAAGMEYLESKCCIHRDLAARNCLVTEKNVLKISDFGMSREEADGVYAASGGLRQVPVKWTAPEALNYGRYSSESDVWSFGILLWETFSLGASPYPNLSNQQTREFVEKGGRLPCPELCPDAVFRLMEQCWAYEPGQRPSFSTIYQELQSIRKRHR

SEQ ID NO: 55175 - protein, 121 aa, Artificial Sequence
  derived and/or modified sequence
MGFSSELCSPQGHGVLQQMQEAELRLLEGMRKWMAQRVKSDREYAGLLHHMSLQDSGGQSRAISPDSPISQVGLYGTLVGAGCICLLLPLLGALWGSGWRSGRPMLGSHCAPLPASPICAV

SEQ ID NO: 55176 - DNA, 2046 bp, Artificial Sequence
  derived and/or modified sequence
atgggcttcagcagcgagctgtgcagcccccagggccacggcgtgctgcagcagatgcaggaggccgagctgagactgctggagggcatgagaaagtggatggcccagagagtgaagagcgacagagagtacgccggcctgctgcaccacatgagcctgcaggacagcggcggccagagcagagccatcagccccgacagccccatcagccagacccacagccaggacatcgagaagctgaagagccagtacagagccctggccagagacagcgcccaggccaagagaaagtaccaggaggccagcaaggacaaggacagagacaaggccaaggacaagtacgtgagaagcctgtggaagctgttcgcccaccacaacagatacgtgctgggcgtgagagccgcccagctgcaccaccagcaccaccaccagctgctgctgcccggcctgctgagaagcctgcaggacctgcacgaggagatggcctgcatcctgaaggagatcctgcaggagtacctggagatcagcagcctggtgcaggacgaggtggtggccatccacagagagatggccgccgccgccgccagaatccagcccgaggccgagtaccagggcttcctgagacagtacggcagcgcccccgacgtgcccccctgcgtgaccttcgacgagagcctgctggaggagggcgagcccctggagcccggcgagctgcagctgaacgagctgaccgtggagagcgtgcagcacaccctgaccagcgtgaccgacgagctggccgtggccaccgagatggtgttcagaagacaggagatggtgacccagctgcagcaggagctgagaaacgaggaggagaacacccaccccagagagagagtgcagctgctgggcaagagacaggtgctgcaggaggccctgcagggcctgcaggtggccctgtgcagccaggccaagctgcaggcccagcaggagctgctgcagaccaagctggagcacctgggccccggcgagcccccccccgtgctgctgctgcaggacgacagacacagcaccagcagcagcgagcaggagagagagggcggcagaacccccaccctggagatcctgaagagccacatcagcggcatcttcagacccaagttcagcaacctgtacagactggagggcgagggcttccccagcatccccctgctgatcgaccacctgctgagcacccagcagcccctgaccaagaagagcggcgtggtgctgcacagagccgtgcccaaggacaagtgggtgctgaaccacgaggacctggtgctgggcgagcagatcggcagaggcaacttcggcgaggtgttcagcggcagactgagagccgacaacaccctggtggccgtgaagagctgcagagagaccctgccccccgacctgaaggccaagttcctgcaggaggccagaagcagccccagcaccagcagctggagcctgtgcagaggcagcagcccccccgccggcggcgacttcctgaccttcctgagaaccgagggcgccagactgagagtgaagaccctgctgcagatggtgggcgacgccgccgccggcatggagtacctggagagcaagtgctgcatccacagagacctggccgccagaaactgcctggtgaccgagaagaacgtgctgaagatcagcgacttcggcatgagcagagaggaggccgacggcgtgtacgccgccagcggcggcctgagacaggtgcccgtgaagtggaccgcccccgaggccctgaactacggcagatacagcagcgagagcgacgtgtggagcttcggcatcctgctgtgggagaccttcagcctgggcgccagcccctaccccaacctgagcaaccagcagaccagagagttcgtggagaagggcggcagactgccctgccccgagctgtgccccgacgccgtgttcagactgatggagcagtgctgggcctacgagcccggccagagacccagcttcagcaccatctaccaggagctgcagagcatcagaaagagacacagatag

SEQ ID NO: 55177 - DNA, 2085 bp, Artificial Sequence
  derived and/or modified sequence
atgggcttcagcagcgagctgtgcagcccccagggccacggcgtgctgcagcagatgcaggaggccgagctgagactgctggagggcatgagaaagtggatggcccagagagtgaagagcgacagagagtacgccggcctgctgcaccacatgagcctgcaggacagcggcggccagagcagagccatcagccccgacagccccatcagccagacccacagccaggacatcgagaagctgaagagccagtacagagccctggccagagacagcgcccaggccaagagaaagtaccaggaggccagcaaggacaaggacagagacaaggccaaggacaagtacgtgagaagcctgtggaagctgttcgcccaccacaacagatacgtgctgggcgtgagagccgcccagctgcaccaccagcaccaccaccagctgctgctgcccggcctgctgagaagcctgcaggacctgcacgaggagatggcctgcatcctgaaggagatcctgcaggagtacctggagatcagcagcctggtgcaggacgaggtggtggccatccacagagagatggccgccgccgccgccagaatccagcccgaggccgagtaccagggcttcctgagacagtacggcagcgcccccgacgtgcccccctgcgtgaccttcgacgagagcctgctggaggagggcgagcccctggagcccggcgagctgcagctgaacgagctgaccgtggagagcgtgcagcacaccctgaccagcgtgaccgacgagctggccgtggccaccgagatggtgttcagaagacaggagatggtgacccagctgcagcaggagctgagaaacgaggaggagaacacccaccccagagagagagtgcagctgctgggcaagagacaggtgctgcaggaggccctgcagggcctgcaggtggccctgtgcagccaggccaagctgcaggcccagcaggagctgctgcagaccaagctggagcacctgggccccggcgagcccccccccgtgctgctgctgcaggacgacagacacagcaccagcagcagcgagcaggagagagagggcggcagaacccccaccctggagatcctgaagagccacatcagcggcatcttcagacccaagttcagcaacctgtacagactggagggcgagggcttccccagcatccccctgctgatcgaccacctgctgagcacccagcagcccctgaccaagaagagcggcgtggtgctgcacagagccgtgcccaaggacaagtgggtgctgaaccacgaggacctggtgctgggcgagcagatcggcagaggcaacttcggcgaggtgttcagcggcagactgagagccgacaacaccctggtggccgtgaagagctgcagagagaccctgccccccgacctgaaggccaagttcctgcaggaggccagaatcctgaagcagtacagccaccccaacatcgtgagactgatcggcgtgtgcacccagaagcagcccatctacatcgtgatggagctggtgcagggcggcgacttcctgaccttcctgagaaccgagggcgccagactgagagtgaagaccctgctgcagatggtgggcgacgccgccgccggcatggagtacctggagagcaagtgctgcatccacagagacctggccgccagaaactgcctggtgaccgagaagaacgtgctgaagatcagcgacttcggcatgagcagagaggaggccgacggcgtgtacgccgccagcggcggcctgagacaggtgcccgtgaagtggaccgcccccgaggccctgaactacggcagatacagcagcgagagcgacgtgtggagcttcggcatcctgctgtgggagaccttcagcctgggcgccagcccctaccccaacctgagcaaccagcagaccagagagttcgtggagaagggcggcagactgccctgccccgagctgtgccccgacgccgtgttcagactgatggagcagtgctgggcctacgagcccggccagagacccagcttcagcaccatctaccaggagctgcagagcatcagaaagagacacagatag

SEQ ID NO: 55178 - DNA, 366 bp, Artificial Sequence
  derived and/or modified sequence
atgggcttcagcagcgagctgtgcagcccccagggccacggcgtgctgcagcagatgcaggaggccgagctgagactgctggagggcatgagaaagtggatggcccagagagtgaagagcgacagagagtacgccggcctgctgcaccacatgagcctgcaggacagcggcggccagagcagagccatcagccccgacagccccatcagccaggtgggcctgtacggcaccctggtgggcgccggctgcatctgcctgctgctgcccctgctgggcgccctgtggggcagcggctggagaagcggcagacccatgctgggcagccactgcgcccccctgcccgccagccccatctgcgccgtgtag

SEQ ID NO: 55179 - DNA, 2046 bp, Artificial Sequence
  derived and/or modified sequence
atgggatttagcagcgagttatgctcacctcaaggtcacggtgtcttgcagcagatgcaggaagctgagctccggctactcgaaggaatgcgaaaatggatggctcagagggtcaaaagcgatagggaatatgccgggctgctgcatcacatgagccttcaagacagcggcgggcagtcccgagcaatatcacccgactcacccatctcccagacccacagtcaggacatcgagaaactcaagagccagtaccgggccttagcacgggattcagcacaggctaaaagaaagtaccaggaggcctccaaggacaaagatcgggacaaagccaaagacaagtatgtgcgcagtctgtggaagctcttcgcccaccataatcgctacgttttaggggtcagagccgctcaactccatcaccagcatcatcatcagctcctcttgcctggcctgttgcgtagccttcaggatctgcatgaagagatggcctgtattctgaaagaaattctccaggagtatctcgaaattagttccctcgttcaagatgaggtggtggccatacatagagagatggccgccgccgccgcccgaatccagcccgaggctgaatatcagggctttctgcgacagtacggctccgcacctgatgtgcctccgtgcgtcaccttcgatgagtcacttctagaggaaggggaacccttagagcctggagagctgcaactcaatgaacttactgtcgagagcgtgcaacacactctcacatctgtcactgatgaactggctgtggcaaccgagatggtatttaggaggcaggagatggtaacccagctgcaacaagaactgagaaacgaggaggaaaatacgcaccccagagagagagtccagctgctcgggaaaaggcaggtgttacaggaagctctgcagggtctccaagtcgcgctctgctcacaggccaaattgcaggcacagcaggagttactacagaccaaactagaacatctgggacctggtgagcctcctccagtcttattgctccaagacgatcgtcactctacctccagcagtgagcaggaaagagaaggcggacgcacccccacactcgaaatactcaagagtcatatctccggaatttttcgacccaagttttcaaacctctatagactcgaaggcgagggttttccatctatcccgctgctgattgaccacttgctgtccacacagcagcctctcactaagaagtctggcgtcgtgttgcaccgcgctgtgccgaaagacaagtgggtgttaaaccacgaagaccttgtcctgggggaacaaatcggccgtggaaattttggcgaggtattctcagggcggctgagagcagacaacacactggtcgccgtgaaatcttgcagggagaccttgccccctgaccttaaagccaagtttcttcaagaagccagatcttccccatctacatccagctggtccctctgtcgcgggtcttctcctcccgctggcggcgatttcctcacatttctgcgcaccgagggagcaagactccgagtgaagaccctgctgcaaatggtcggggacgccgcagctggaatggagtacctcgaatccaaatgttgcattcatagggacctggctgccagaaactgcctggtcacagagaaaaatgtcttgaagattagcgattttgggatgtcaagagaggaagccgacggagtctacgctgcctcaggagggctgcggcaggttccagtcaaatggacggcaccagaggccctgaactacggacgatatagctcggagagtgatgtgtggtcattcggcattctactgtgggaaacattctctcttggggccagtccataccctaatctgtccaatcagcaaacccgcgagttcgttgagaagggcggaaggctgccctgccctgaactctgccccgatgccgtattcaggttgatggaacagtgctgggcctacgaaccgggccagagaccctccttttcaactatctaccaggaacttcagagcatccggaagcgtcatagatag

SEQ ID NO: 55180 - DNA, 2085 bp, Artificial Sequence
  derived and/or modified sequence
atggggttttccagcgaattgtgtagtcctcagggtcacggggtacttcagcaaatgcaggaagcggaactgaggctactcgaagggatgagaaagtggatggctcaacgcgtgaaaagcgatagggaatatgctggactgctccatcatatgagtctgcaggattctggggggcagtctcgggcaatctctccagattcaccgatcagccagacgcatagccaggacatagagaagctcaagtcccagtaccgtgctctggcccgcgatagtgctcaggccaaaagaaagtaccaggaagcaagtaaggacaaggaccgcgataaagccaaagataaatatgtaagaagcctttggaagctcttcgcacatcataatcgctacgtgctcggagttcgcgccgcccagctgcatcatcagcatcatcatcagttgttgctgccggggctcctgaggtctcttcaggatctacatgaggagatggcatgtatcctaaaagaaatactacaggaataccttgaaatcagcagtctggtccaggacgaggtcgtcgcaatccacagggagatggctgctgctgccgctaggatccaacctgaagcagaatatcaggggtttctgaggcagtacgggtccgctccagatgtgcctccctgtgttacattcgatgaatccttgctggaggagggggaacccctcgagccaggtgagctccagttaaacgagctgaccgtagaatctgttcaacataccctcacctcggtgacagatgagctggcagttgccaccgagatggtctttaggagacaggagatggtgactcagctgcagcaggaattgcggaatgaggaggagaacactcacccacgggaacgtgttcaactcttgggcaaaagacaggtgttacaggaggctttacaggggttgcaggtggcgctttgttcacaggctaaacttcaggctcagcaggagctgctacagacaaagctggagcacctgggacctggggaaccgccacctgttctcctgctgcaggacgatcgccactccacatcgagctcagagcaggagcgcgagggaggcagaactccgacccttgagatcctcaagtctcacatttccggcatatttaggcccaagttcagcaacctgtatcgcctggagggagaaggattcccatccatcccattgttaatagaccatctgctgtccacccaacagccacttaccaagaaatcaggcgtggtgctccatagggctgtcccaaaggacaaatgggtattaaaccacgaggatttagttctcggagaacagattggtagaggcaattttggtgaggtattcagcgggcggctgagagctgacaataccttggtcgcggtgaagtcgtgcagagaaactcttccaccagacctgaaagcaaaatttttacaagaggcgagaattctgaaacagtatagccatccaaatatcgtccggttaattggcgtatgcacccaaaagcagccgatatatattgtaatggaattggtgcagggaggagacttcctcacattcctccgaactgaaggcgccagactcagagtcaagacactgctacagatggttggggatgctgctgccggtatggaatacctggagtcgaagtgctgtatccatcgagaccttgcggctagaaattgtctcgttactgagaaaaatgtgttgaagattagcgacttcggcatgtctcgggaagaggccgacggtgtgtatgcagccagtgggggactgcggcaagtgccagtgaagtggacagctcccgaagcgctgaattatggtagatattcaagcgagtcagacgtgtggagttttggaatcctcctttgggagactttttccctcggcgccagcccttaccccaacctgagtaaccagcaaaccagagaattcgtggagaagggtgggcggctgccatgcccggaactttgtccggacgcggtattccgtctgatggagcagtgttgggcctacgagcccgggcaacgaccttctttctctaccatttaccaggaactgcagagtattagaaagcggcatcgttag

SEQ ID NO: 55181 - DNA, 2085 bp, Artificial Sequence
  derived and/or modified sequence
atggggtttagctcagagctctgcagtcctcaggggcacggtgtgctgcagcagatgcaggaggcagagctgaggctcctcgagggcatgagaaagtggatggctcagagagttaagtccgaccgggagtacgctggactactgcatcacatgagcttgcaggatagcggcggtcagtcaagagccatctcccccgatagcccaatttcgcagacacacagccaggacattgaaaaactgaagtcccagtaccgggcgttggccagagacagtgcacaggcaaaaaggaagtatcaggaggcatcaaaggacaaagacagagacaaggccaaagacaagtacgtaagaagtctttggaagctattcgcacaccacaatcgttatgtactgggggttagagctgcccaactgcaccatcagcaccatcaccagctgcttttaccaggcctgttacggtcactccaggatctgcatgaagagatggcctgtatactgaaggagattctccaggagtatctcgaaatctcctccctagttcaggacgaggtggtcgccatacacagagagatggccgctgcggccgccagaatccagccagaagcagaatatcaggggtttctgaggcagtatggctctgctccagatgtgcctccctgcgtgactttcgacgagagcctgctggaagagggagagccattagaaccaggcgagcttcaacttaacgaactaacagtcgagagtgtgcaacacactctgacatccgtgaccgacgaactagccgtggcaacagagatggtgtttaggcggcaggagatggtgacccagctccagcaagagctgagaaatgaagaggaaaatacgcaccctcgtgagagagtgcaactactgggcaaacgccaagttcttcaggaagctctccaagggttgcaggtcgcgttgtgctctcaggcgaagcttcaggctcagcaggagttactccaaactaagctggaacacctgggtcctggcgaacctccacccgtactgttactccaggacgatcgtcactctaccagttccagtgaacaggaacgcgaggggggccgtacgcctaccctggagattctcaaatcccacatcagtgggatctttaggcccaagttcagcaatctgtataggttggaaggggagggttttccaagcattcccctgctgattgatcacctgctcagcacgcagcagcccttgaccaaaaagtctggtgtggtccttcacagagccgtgccgaaggataagtgggtgctaaatcatgaagacctcgttctgggagaacaaattgggaggggcaatttcggtgaagtattttctggacggctgagagcagacaataccttggtggccgtcaagtcctgccgggaaacactgcccccggatctgaaggcaaaatttcttcaggaggctagaatcctcaaacagtatagccaccctaatattgtcagacttatcggcgtctgcacacagaaacagccaatctacattgtcatggagctggtacaaggtggcgactttctcaccttccttcgaacagagggggcccgcctcagagttaaaacactcctccagatggttggtgatgctgcagctggtatggagtacctggagtctaagtgttgtattcatagggatctggctgctcggaactgccttgtaactgagaagaacgtcctgaagatttccgattttggcatgtccagagaggaagctgatggtgtctatgcagcctctggcggattgcgacaagtgcccgtcaaatggaccgctccagaggccctaaactatggcagatactcctctgaaagcgatgtgtggtcattcgggatcctgttgtgggaaacattctcgctcggcgcttctccgtacccaaatctttcaaaccaacagactagggagttcgtcgaaaaaggcgggcgactgccatgtcctgagctttgcccagacgctgtcttccgcctgatggaacagtgttgggcctatgaaccaggccagaggccttcatttagcacaatctatcaggagttacagagcataagaaagaggcaccgatag

SEQ ID NO: 55182 - DNA, 366 bp, Artificial Sequence
  derived and/or modified sequence
atgggattttcatccgagctgtgctcaccccaggggcacggagtactccagcagatgcaagaggcggaactccgactgttagaaggtatgagaaagtggatggcccagagagtgaagtcagacagggagtatgctggcctcttacaccacatgagccttcaagactctggggggcagagcagagctatctcgcctgattccccaataagtcaggtgggcctgtatgggactttagtgggggctggatgtatttgcttgctacttcccctgctgggagccttatgggggtcgggatggaggagcggaaggcctatgttgggtagccactgcgcaccactccctgcttcacctatctgtgcagtttag

SEQ ID NO: 55183 - DNA, 2133 bp, Artificial Sequence
  derived and/or modified sequence
ggaatcaggaactggccggggtccgcaccgggcctgagtcggtccgaggccgtcccaggagcagctgcccgtgcggaacagcactatgggcttctcttccgagctgtgcagcccccagggccacggggtcctgcagcaaatgcaggaggccgagcttcgtctactggagggcatgagaaagtggatggcccagcgggtcaagagtgacagggagtatgcaggactgcttcaccacatgtccctgcaggacagtgggggccagagccgggccatcagccctgacagccccatcagtcagacccacagccaggacattgagaagctgaagagccagtaccgagctctggcacgggacagtgcccaagccaagcgcaagtaccaggaggccagcaaagacaaggaccgtgacaaggctaaggacaagtatgtgcgcagcctgtggaagctctttgctcaccacaaccgctatgtgctgggcgtgcgggctgcgcagctacaccaccagcaccaccaccagctcctgctgcccggcctgctgcggtcactgcaggacctgcacgaggagatggcttgcatcctgaaggagatcctgcaggaatacctggagattagcagcctggtgcaggatgaggtggtggccattcaccgggagatggctgcagctgctgcccgcatccagcctgaggctgagtaccaaggcttcctgcgacagtatgggtccgcacctgacgtcccaccctgtgtcacgttcgatgagtcactgcttgaggagggtgaaccgctggagcctggggagctccagctgaacgagctgactgtggagagcgtgcagcacacgctgacctcagtgacagatgagctggctgtggccaccgagatggtgttcaggcggcaggagatggttacgcagctgcaacaggagctccggaatgaagaggagaacacccacccccgggagcgggtgcagctgctgggcaagaggcaagtgctgcaagaagcactgcaggggctgcaggtagcgctgtgcagccaggccaagctgcaggcccagcaggagttgctgcagaccaagctggagcacctgggccccggcgagcccccgcctgtgctgctcctgcaggatgaccgccactccacgtcgtcctcggagcaggagcgagaggggggaaggacacccacgctggagatccttaagagccacatctcaggaatcttccgccccaagttctcgaacctgtaccgactggaaggggaaggctttcctagcattcctttgctcatcgaccacctactgagcacccagcagcccctcaccaagaagagtggtgttgtcctgcacagggctgtgcccaaggacaagtgggtgctgaaccatgaggacctggtgttgggtgagcagattggacgggggaactttggcgaagtgttcagcggacgcctgcgagccgacaacaccctggtggcggtgaagtcttgtcgagagacgctcccacctgacctcaaggccaagtttctacaggaagcgagaagcagcccatctacatcgtcatggagcttgtgcagggggtcctccccacctgcagggggcgacttcctgaccttcctccgcacggagggggcccgcctgcgggtgaagactctgctgcagatggtgggggatgcagctgctggcatggagtacctggagagcaagtgctgcatccaccgggacctggctgctcggaactgcctggtgacagagaagaatgtcctgaagatcagtgactttgggatgtcccgagaggaagccgatggggtctatgcagcctcagggggcctcagacaagtccccgtgaagtggaccgcacctgaggcccttaactacggccgctactcctccgaaagcgacgtgtggagctttggcatcttgctctgggagaccttcagcctgggggcctccccctatcccaacctcagcaatcagcagacacgggagtttgtggagaaggggggccgtctgccctgcccagagctgtgtcctgatgccgtgttcaggctcatggagcagtgctgggcctatgagcctgggcagcggcccagcttcagcaccatctaccaggagctgcagagcatccgaaagcggcatcggtgagg

SEQ ID NO: 55184 - DNA, 2327 bp, Artificial Sequence
  derived and/or modified sequence
aaaccgcgggaggaggaagcgcggaatcaggaactggccggggtccgcaccgggcctgagtcggtccgaggccgtcccaggagcagctgcccgtgcggaacagcactatgggcttctcttccgagctgtgcagcccccagggccacggggtcctgcagcaaatgcaggaggccgagcttcgtctactggagggcatgagaaagtggatggcccagcgggtcaagagtgacagggagtatgcaggactgcttcaccacatgtccctgcaggacagtgggggccagagccgggccatcagccctgacagccccatcagtcagacccacagccaggacattgagaagctgaagagccagtaccgagctctggcacgggacagtgcccaagccaagcgcaagtaccaggaggccagcaaagacaaggaccgtgacaaggctaaggacaagtatgtgcgcagcctgtggaagctctttgctcaccacaaccgctatgtgctgggcgtgcgggctgcgcagctacaccaccagcaccaccaccagctcctgctgcccggcctgctgcggtcactgcaggacctgcacgaggagatggcttgcatcctgaaggagatcctgcaggaatacctggagattagcagcctggtgcaggatgaggtggtggccattcaccgggagatggctgcagctgctgcccgcatccagcctgaggctgagtaccaaggcttcctgcgacagtatgggtccgcacctgacgtcccaccctgtgtcacgttcgatgagtcactgcttgaggagggtgaaccgctggagcctggggagctccagctgaacgagctgactgtggagagcgtgcagcacacgctgacctcagtgacagatgagctggctgtggccaccgagatggtgttcaggcggcaggagatggttacgcagctgcaacaggagctccggaatgaagaggagaacacccacccccgggagcgggtgcagctgctgggcaagaggcaagtgctgcaagaagcactgcaggggctgcaggtagcgctgtgcagccaggccaagctgcaggcccagcaggagttgctgcagaccaagctggagcacctgggccccggcgagcccccgcctgtgctgctcctgcaggatgaccgccactccacgtcgtcctcggagcaggagcgagaggggggaaggacacccacgctggagatccttaagagccacatctcaggaatcttccgccccaagttctcgaacctgtaccgactggaaggggaaggctttcctagcattcctttgctcatcgaccacctactgagcacccagcagcccctcaccaagaagagtggtgttgtcctgcacagggctgtgcccaaggacaagtgggtgctgaaccatgaggacctggtgttgggtgagcagattggacgggggaactttggcgaagtgttcagcggacgcctgcgagccgacaacaccctggtggcggtgaagtcttgtcgagagacgctcccacctgacctcaaggccaagtttctacaggaagcgaggatcctgaagcagtacagccaccccaacatcgtgcgtctcattggtgtctgcacccagaagcagcccatctacatcgtcatggagcttgtgcaggggggcgacttcctgaccttcctccgcacggagggggcccgcctgcgggtgaagactctgctgcagatggtgggggatgcagctgctggcatggagtacctggagagcaagtgctgcatccaccgggacctggctgctcggaactgcctggtgacagagaagaatgtcctgaagatcagtgactttgggatgtcccgagaggaagccgatggggtctatgcagcctcagggggcctcagacaagtccccgtgaagtggaccgcacctgaggcccttaactacggccgctactcctccgaaagcgacgtgtggagctttggcatcttgctctgggagaccttcagcctgggggcctccccctatcccaacctcagcaatcagcagacacgggagtttgtggagaaggggggccgtctgccctgcccagagctgtgtcctgatgccgtgttcaggctcatggagcagtgctgggcctatgagcctgggcagcggcccagcttcagcaccatctaccaggagctgcagagcatccgaaagcggcatcggtgaggctgggacccccttctcaagctggtggcctctgcaggcctaggtgcagctcctcagcggctccagctcatatgctgacagctcttcacagtcctggactcctgccaccagcatccacactgccggcaggatgca

SEQ ID NO: 55185 - DNA, 485 bp, Artificial Sequence
  derived and/or modified sequence
agtgtgaagaactgggcctattgtgtcttcctgggctgaagtgatctggtcgccacaggctatagggctgaggcctaaggtggagggaggcctgactgaatcaagatgacttcttgtggggagcctgagtcccaaatggaaaactccacgcctgtccgctccccaacccctgccccttgatttccccaggtctcccttgggacaggaagcccctgcctgggggtaggaggatggggacaaaaccactaggatctgtatccgagaagcagtctctgttcgggatatttacttggaaattttattcaaatggaagctggcgcctgagcctctccttagggaattccgtgagaacagcactatgggcttctcttccgagctgtgcagcccccagggccacggggtcctgcagcaaatgcaggaggccgagcttcgtctactggagggcatgagaaagtggatggcccagcgggtcaagagtgacaggg

SEQ ID NO: 55186 - DNA, 2085 bp, Artificial Sequence
  derived and/or modified sequence
atgggcttctcttccgagctgtgcagcccccagggccacggggtcctgcagcaaatgcaggaggccgagcttcgtctactggagggcatgagaaagtggatggcccagcgggtcaagagtgacagggagtatgcaggactgcttcaccacatgtccctgcaggacagtgggggccagagccgggccatcagccctgacagccccatcagtcagacccacagccaggacattgagaagctgaagagccagtaccgagctctggcacgggacagtgcccaagccaagcgcaagtaccaggaggccagcaaagacaaggaccgtgacaaggctaaggacaagtatgtgcgcagcctgtggaagctctttgctcaccacaaccgctatgtgctgggcgtgcgggctgcgcagctacaccaccagcaccaccaccagctcctgctgcccggcctgctgcggtcactgcaggacctgcacgaggagatggcttgcatcctgaaggagatcctgcaggaatacctggagattagcagcctggtgcaggatgaggtggtggccattcaccgggagatggctgcagctgctgcccgcatccagcctgaggctgagtaccaaggcttcctgcgacagtatgggtccgcacctgacgtcccaccctgtgtcacgttcgatgagtcactgcttgaggagggtgaaccgctggagcctggggagctccagctgaacgagctgactgtggagagcgtgcagcacacgctgacctcagtgacagatgagctggctgtggccaccgagatggtgttcaggcggcaggagatggttacgcagctgcaacaggagctccggaatgaagaggagaacacccacccccgggagcgggtgcagctgctgggcaagaggcaagtgctgcaagaagcactgcaggggctgcaggtagcgctgtgcagccaggccaagctgcaggcccagcaggagttgctgcagaccaagctggagcacctgggccccggcgagcccccgcctgtgctgctcctgcaggatgaccgccactccacgtcgtcctcggagcaggagcgagaggggggaaggacacccacgctggagatccttaagagccacatctcaggaatcttccgccccaagttctcgaacctgtaccgactggaaggggaaggctttcctagcattcctttgctcatcgaccacctactgagcacccagcagcccctcaccaagaagagtggtgttgtcctgcacagggctgtgcccaaggacaagtgggtgctgaaccatgaggacctggtgttgggtgagcagattggacgggggaactttggcgaagtgttcagcggacgcctgcgagccgacaacaccctggtggcggtgaagtcttgtcgagagacgctcccacctgacctcaaggccaagtttctacaggaagcgaggatcctgaagcagtacagccaccccaacatcgtgcgtctcattggtgtctgcacccagaagcagcccatctacatcgtcatggagcttgtgcaggggggcgacttcctgaccttcctccgcacggagggggcccgcctgcgggtgaagactctgctgcagatggtgggggatgcagctgctggcatggagtacctggagagcaagtgctgcatccaccgggacctggctgctcggaactgcctggtgacagagaagaatgtcctgaagatcagtgactttgggatgtcccgagaggaagccgatggggtctatgcagcctcagggggcctcagacaagtccccgtgaagtggaccgcacctgaggcccttaactacggccgctactcctccgaaagcgacgtgtggagctttggcatcttgctctgggagaccttcagcctgggggcctccccctatcccaacctcagcaatcagcagacacgggagtttgtggagaaggggggccgtctgccctgcccagagctgtgtcctgatgccgtgttcaggctcatggagcagtgctgggcctatgagcctgggcagcggcccagcttcagcaccatctaccaggagctgcagagcatccgaaagcggcatcggtga

SEQ ID NO: 55187 - DNA, 2046 bp, Artificial Sequence
  derived and/or modified sequence
atgggcttcagcagcgagctgtgcagcccccagggccatggagtgctgcagcagatgcaggaggccgagctgcggctgctggagggcatgaggaagtggatggcccagagggtgaagagtgaccgggagtatgccggcctgctgcaccacatgagcctgcaggacagcggcggccagagccgggccatcagcccagacagccccatcagccagacccacagccaggacatcgagaagctgaagagccagtaccgggccctggcccgggacagcgcccaggccaagaggaagtaccaggaggccagcaaggacaaggaccgggacaaggccaaggacaagtatgtgcgcagcctgtggaagctgtttgcccaccacaaccgctacgtgctgggcgtgcgggccgcccagctgcaccaccagcaccaccaccagctgctgctgcccggcctgctgcggagcctgcaggacctgcacgaggagatggcctgcatcctgaaggagatcctgcaggagtacctggagatcagcagcctggtgcaggatgaggtggtggccatccaccgggagatggctgctgctgctgcccgcatccagcctgaggccgagtaccagggcttcctgcggcagtatggcagcgccccagatgtgcccccctgtgtgacctttgatgagagcctgctggaggagggggagcccctggagcctggagagctgcagctgaatgagctgactgtggagagcgtgcagcacaccctgacctctgtgacagatgagctggccgtggccacagagatggtgttccggcggcaggagatggtgacccagctgcagcaggagctgagaaatgaggaggagaacacccacccccgggagcgggtgcagctgctgggcaagaggcaggtgctgcaggaggccctgcagggcctgcaggtggccctgtgcagccaggccaagctgcaggcccagcaggagctgctgcagaccaagctggagcacctgggccctggagagcccccacctgtgctgctgctgcaggatgacagacacagcaccagcagcagcgagcaggagcgggagggcggccgcacccccaccctggagatcctgaagagccacatcagcggcatcttccggcccaagttcagcaacctgtaccgcctggagggggagggcttccccagcatccccctgctgattgaccacctgctgagcacccagcagcccctgaccaagaagtctggagtggtgctgcacagagctgtgcccaaggacaagtgggtgctgaaccacgaggacctggtgctgggggagcagatcggccggggcaactttggagaggtgttttctggccgcctgcgggctgacaacaccctggtggccgtgaagagctgccgggagaccctgcccccagacctgaaggccaagttcctgcaggaggcccggagcagccccagcaccagctcctggagcctgtgccggggcagcagccccccagctggaggagacttcctgaccttcctgaggacagaaggagcccggctgcgggtgaagaccctgctgcagatggtgggagatgctgctgctggcatggagtacctggagagcaagtgctgcatccaccgggacctggccgccaggaactgcctggtgacagagaagaatgtgctgaagatcagtgactttggcatgagccgggaggaggctgatggagtgtatgctgccagcggcggcctgcggcaggtgcctgtgaagtggacagcccctgaggccctgaactacggccgctacagcagcgagagtgatgtgtggagctttggcatcctgctgtgggagaccttcagcctgggcgccagcccctaccccaacctgagcaaccagcagacccgggagtttgtggagaagggcggccgcctgccctgcccagagctgtgcccagatgctgtgttccggctgatggagcagtgctgggcctatgagcccggccagaggcccagcttcagcaccatctaccaggagctgcagagcatcaggaagaggcacaggtag

SEQ ID NO: 55188 - DNA, 2085 bp, Artificial Sequence
  derived and/or modified sequence
atgggcttcagcagcgagctgtgcagcccccagggccatggagtgctgcagcagatgcaggaggccgagctgcggctgctggagggcatgaggaagtggatggcccagagggtgaagagtgaccgggagtatgccggcctgctgcaccacatgagcctgcaggacagcggcggccagagccgggccatcagcccagacagccccatcagccagacccacagccaggacatcgagaagctgaagagccagtaccgggccctggcccgggacagcgcccaggccaagaggaagtaccaggaggccagcaaggacaaggaccgggacaaggccaaggacaagtatgtgcgcagcctgtggaagctgtttgcccaccacaaccgctacgtgctgggcgtgcgggccgcccagctgcaccaccagcaccaccaccagctgctgctgcccggcctgctgcggagcctgcaggacctgcacgaggagatggcctgcatcctgaaggagatcctgcaggagtacctggagatcagcagcctggtgcaggatgaggtggtggccatccaccgggagatggctgctgctgctgcccgcatccagcctgaggccgagtaccagggcttcctgcggcagtatggcagcgccccagatgtgcccccctgtgtgacctttgatgagagcctgctggaggagggggagcccctggagcctggagagctgcagctgaatgagctgactgtggagagcgtgcagcacaccctgacctctgtgacagatgagctggccgtggccacagagatggtgttccggcggcaggagatggtgacccagctgcagcaggagctgagaaatgaggaggagaacacccacccccgggagcgggtgcagctgctgggcaagaggcaggtgctgcaggaggccctgcagggcctgcaggtggccctgtgcagccaggccaagctgcaggcccagcaggagctgctgcagaccaagctggagcacctgggccctggagagcccccacctgtgctgctgctgcaggatgacagacacagcaccagcagcagcgagcaggagcgggagggcggccgcacccccaccctggagatcctgaagagccacatcagcggcatcttccggcccaagttcagcaacctgtaccgcctggagggggagggcttccccagcatccccctgctgattgaccacctgctgagcacccagcagcccctgaccaagaagtctggagtggtgctgcacagagctgtgcccaaggacaagtgggtgctgaaccacgaggacctggtgctgggggagcagatcggccggggcaactttggagaggtgttttctggccgcctgcgggctgacaacaccctggtggccgtgaagagctgccgggagaccctgcccccagacctgaaggccaagttcctgcaggaggcccgcatcctgaagcagtacagccaccccaacatcgtgcggctgattggagtgtgcacccagaagcagcccatctacatcgtgatggagctggtgcagggcggggacttcctgaccttcctgaggacagagggcgcccggctgcgggtgaagaccctgctgcagatggtgggagatgctgctgctggcatggagtacctggagagcaagtgctgcatccaccgggacctggccgccaggaactgcctggtgacagagaagaatgtgctgaagatcagtgactttggcatgagccgggaggaggctgatggagtgtatgctgccagcggcggcctgcggcaggtgcctgtgaagtggacagcccctgaggccctgaactacggccgctacagcagcgagagtgatgtgtggagctttggcatcctgctgtgggagaccttcagcctgggcgccagcccctaccccaacctgagcaaccagcagacccgggagtttgtggagaagggcggccgcctgccctgcccagagctgtgcccagatgctgtgttccggctgatggagcagtgctgggcctatgagcccggccagaggcccagcttcagcaccatctaccaggagctgcagagcatcaggaagaggcacaggtag

SEQ ID NO: 55189 - DNA, 366 bp, Artificial Sequence
  derived and/or modified sequence
atgggcttcagcagcgagctgtgcagcccccagggccatggagtgctgcagcagatgcaggaggccgagctgcggctgctggagggcatgaggaagtggatggcccagagggtgaagagtgaccgggagtatgccggcctgctgcaccacatgagcctgcaggacagcggcggccagagccgggccatcagcccagacagccccatcagccaggtgggcctgtatggcaccctggtgggcgccggctgcatctgcctgctgctgcccctgctgggcgccctgtggggcagcggctggaggagcggccggcccatgctgggcagccactgtgcccccctgcctgccagccccatctgtgctgtgtag

SEQ ID NO: 55190 - DNA, 2046 bp, Artificial Sequence
  derived and/or modified sequence
atgggcttcagcagcgagctgtgcagcccccagggccacggcgtgcttcagcagatgcaggaggcagagctcagactgctcgaaggcatgcgaaaatggatggcccagcgcgttaaaagcgatcgcgaatatgcaggtcttctccaccacatgtctcttcaagattcaggggggcagtctagagcaataagtcctgattctcccataagtcaaacgcacagccaggacattgagaagctcaagagccaatatagagccctcgctcgagattccgcacaggctaaacgtaagtaccaagaggcttccaaagataaagatcgcgacaaagcaaaagataaatacgttcgatccctttggaagctgttcgcccatcacaatcgctacgtgttaggcgtacgagctgcccagctgcatcatcagcaccaccatcaattactgctgcccgggctgttgcgctcactacaggatctgcacgaagaaatggcctgcatcctgaaggaaattctgcaggagtacctcgaaatatcatccctcgtgcaggatgaggtggtcgcaatccatagagaaatggccgccgccgccgcacggatacaaccagaggcagaataccaaggcttcctacggcagtatgggtctgcaccagacgtgcccccttgtgtgaccttcgatgagtccctcctagaagaaggcgagccactggagccaggtgagcttcagctgaacgagctcacggtggaatccgtgcagcacaccttgacctccgtgactgatgagctcgccgtggccaccgaaatggtctttagacgtcaagaaatggtcacgcagctgcagcaggaactgagaaacgaggaagagaacacccatccgcgggagagggtgcagctccttggaaaacggcaggtccttcaagaggccctgcagggactacaggtggcactgtgttcacaggcaaagctccaggcccagcaggagctgcttcagacaaagctcgaacacctcgggcccggcgagccgcctccggttctattgctgcaagacgatagacacagcacttctagctcggaacaggaaagagaaggcggtcgcacccctacactggagatcctcaagagccacatatcaggcatcttcagaccaaagttctccaatctctatcggctggagggtgaggggtttcctagcatccctctgctgattgaccacctactttcgacgcagcagccccttacaaagaagtctggcgttgtcctgcaccgtgcagtgccgaaggacaagtgggttttaaaccacgaagacttggtgctgggggagcaaattggccgaggaaatttcggcgaagttttttcaggccgcctccgagcagacaataccttggtggccgtcaagagctgtcgggaaacattaccacctgatttaaaagcaaaattcttgcaggaggcccgttccagcccatcgacgtcctcctggagtctctgccgtggatcctctcccccagccggaggagattttctgacttttttgcggactgaaggagcccggctgagagtcaagaccctgctgcagatggtcggtgacgccgccgccggaatggagtaccttgaatcaaaatgctgtattcacagggatctcgcagcaaggaactgcttagttacagaaaaaaatgtcttaaagattagtgatttcgggatgagcagagaggaggcagacggagtgtatgctgcctctggaggactgaggcaggttcccgtaaaatggaccgcacccgaggccctcaactacggaagatacagttcggagagcgacgtctggagtttcggcattctgctgtgggaaacattttccctgggggcctccccctaccccaatcttagcaaccaacaaacccgagagtttgtagaaaagggaggcagattgccttgtcctgagctgtgtcccgatgccgttttccgattgatggaacagtgctgggcgtacgagccaggccagagaccctctttcagcacaatttaccaggagctgcagtctatcagaaaaagacaccgatag

SEQ ID NO: 55191 - DNA, 2085 bp, Artificial Sequence
  derived and/or modified sequence
atgggcttcagcagcgagctgtgcagcccccagggccacggcgtgttgcagcagatgcaggaggcagaacttaggctactggaaggcatgagaaagtggatggcccagcgtgttaagtcagaccgcgagtacgcagggctgttgcaccacatgagcctgcaggattccggaggccagtccagagcgatctcccctgacagccctatctctcagacgcattctcaggacattgagaaacttaaaagccagtacagagccttggccagagatagtgcccaagccaagaggaaatatcaagaggcctctaaagataaagatcgggacaaggctaaggacaaatacgttcgatcgctctggaaattgtttgcccatcacaaccgctacgtgttgggcgtgcgcgcggcgcagctgcatcatcagcaccatcatcagctgctgctccccggacttctaaggtcactccaagatctgcacgaagagatggcctgcatcctcaaggagatacttcaagagtaccttgagattagcagtctcgtgcaggatgaggtggtggccattcatcgcgagatggcagcagctgccgccaggatacaacctgaggcagagtaccaaggattcctccggcaatatgggtctgcaccagatgttccaccctgcgtcacttttgacgagagtctacttgaggaaggcgagcccctggaacccggggaattgcagctgaacgaactgactgtcgaatctgtgcagcatactctcacttcagtaaccgatgaactggccgtggccacagaaatggtcttccgacgccaagaaatggttactcagcttcagcaggagctgcgcaatgaggaggagaacacccatccccgggagagagttcagttgctagggaagagacaggtgctgcaggaggccctgcagggactgcaggtggccctttgctcccaagctaagttgcaggctcagcaggagcttctgcagaccaagcttgagcacttagggcccggagagccaccacctgtcttgctgctgcaagatgaccggcacagcaccagttcttcagagcaagagcgggaaggcggccgcactcccaccctcgagatactcaaatcccatatcagcggcatatttcgtccaaaattctctaatctataccgcttggaaggcgagggatttccctccattccactacttattgatcacctgctgtcaacacagcagccactaacaaagaagtccggcgtagtgttgcaccgtgctgtacctaaggacaagtgggtcctcaatcacgaagaccttgtgctcggagaacagatcgggagaggtaattttggggaggtgttttcagggcgccttcgggcagataacacccttgttgccgtcaaatcctgcagggaaaccctgcccccggaccttaaagccaagtttctgcaggaggccaggatcttaaagcaatatagccacccaaacattgtgcgcctgataggcgtctgcactcagaaacagccgatctacatagttatggaactagtgcaagggggcgacttcctgacttttctgcggactgagggtgctcgcctgcgggttaagacccttctgcaaatggtgggtgacgctgccgcagggatggaatatttggagtccaaatgctgtattcaccgcgacttggccgccagaaattgcctggttacagaaaaaaatgtccttaagatttctgacttcggtatgtctagagaagaggctgatggcgtttacgcagccagcggtggcctgcgccaggtccccgtgaaatggaccgcacccgaagccctgaactatggcagatacagtagcgagtccgatgtctggagctttggcatcctgctctgggagactttctccctgggtgcatccccctatcctaatctgagcaatcagcagacgcgcgaattcgtagaaaagggtgggagactgccttgtccagagctttgtccagacgccgtgtttcgactgatggagcagtgctgggcctacgagccagggcagagacctagctttagcactatctatcaagagctccaaagcatccgtaagaggcatagatag

SEQ ID NO: 55192 - DNA, 2085 bp, Artificial Sequence
  derived and/or modified sequence
atgggcttcagcagcgagctgtgcagcccccagggccacggcgtgctgcaacagatgcaagaagctgaactgaggctcctggagggcatgaggaaatggatggctcagagggtgaagtcagatcgggagtatgctgggctactccatcacatgagccttcaggattcagggggccagtcgagggctataagccccgattctccaatctcacaaacacactcccaggacatcgagaaattaaaatcgcaatacagagcattggcaagagatagcgcacaagctaaaaggaagtaccaagaagcttctaaggataaagatcgagacaaagctaaggacaaatatgtccggtccctgtggaaactttttgcccatcacaatcgttatgtgctaggagtacgcgccgctcaactacaccaccagcaccaccatcagctgctcctccccgggttactcaggtcactgcaggatctccacgaagaaatggcctgtatactcaaggagattttgcaagaatacctcgaaattagctctctggtgcaggacgaagtggtggcaattcaccgagaaatggctgcagccgccgctcgaatacaaccagaagcagagtaccaggggttcctgcgccaatacgggtctgcccctgatgttcccccctgcgtgacctttgacgagagcctcttggaagagggagagcccctggagcccggagagttgcaactcaacgaactcactgtagaatctgtgcagcatacattgacgtctgtcaccgacgaactggccgtggctacggagatggtgtttaggcggcaggaaatggttacacagctgcagcaggagctcagaaacgaggaggagaatactcatcctcgggaaagggttcagctcctgggcaagcgccaggtgctgcaggaagctctgcagggactgcaagttgccctctgctcccaagctaaactacaagcgcagcaggagctgttacagactaaactcgagcacctggggccgggcgagccacctcccgtccttctcctgcaggatgacagacatagcacatcctcttctgagcaggagagggagggcggtagaacaccgaccctcgagattttgaagtcccacatttcagggatctttcgtcctaagttttctaatctataccggcttgagggcgagggattccccagcattccactgctgattgatcacttactcagcactcagcagcccttaacgaaaaagagcggagttgtgctgcaccgggctgtcccaaaggacaagtgggttttaaatcacgaggatttagtcttgggcgaacaaattggacgggggaacttcggggaagtgtttagcgggagactgagagccgacaacaccctcgtggctgtgaagtcatgccgtgaaactttaccccctgacctgaaagccaaatttctacaggaggctagaatcctgaagcagtactcgcaccctaatatcgtcagactgatcggagtgtgcacccagaaacaaccaatatatatcgtgatggagcttgttcaaggaggcgatttccttacttttctgaggaccgaaggtgctagactgcgggtgaagactctgttgcagatggtgggagatgcggcggctggaatggagtatttagagagtaaatgctgcattcatcgggacctcgccgcccggaattgtctggtgacagagaagaacgtgctcaagatatctgatttcggcatgtcgcgcgaggaagctgacggggtgtacgctgctagcggcggcctgcgccaggtgcccgtgaagtggacggctcccgaggctctcaattacgggaggtactcctccgagagtgacgtttggagtttcggtattcttttgtgggagacatttagcctgggcgcttccccctacccaaatctaagtaaccagcagacccgcgagtttgtggagaagggaggacggcttccctgtcccgagttgtgcccggacgctgtcttccgcctgatggagcagtgttgggcttacgaaccaggtcagcgaccaagtttctcaactatctaccaagaacttcagtccattcgcaaaaggcaccgctag

SEQ ID NO: 55193 - DNA, 366 bp, Artificial Sequence
  derived and/or modified sequence
atgggcttcagcagcgagctgtgcagcccccagggccacggcgtgctgcagcagatgcaggaagccgagcttcgactcctggaaggtatgcgtaagtggatggcgcagagggtaaaatctgatagagaatacgctgggttactgcatcacatgagtctccaggattccggcgggcagtcccgagccatcagccctgacagcccaatttcacaagtcggtctgtacgggacactggtcggcgcaggatgcatctgtttgctgctgcctctgctcggagccttatggggctcaggctggcggtctggtcgtccaatgctgggaagccactgtgcccccctgccagcctcccctatttgcgccgtatag

SEQ ID NO: 55194 - DNA, 2046 bp, Artificial Sequence
  derived and/or modified sequence
atgggtttttccagtgagctgtgtagtccccagggccacggagtcctgcagcaaatgcaggaagctgaactgagacttttggagggcatgaggaaatggatggcccaaagagtcaaatctgacagggagtacgctgggcttctgcatcatatgtccttacaggactctgggggtcagagccgggcaatcagtcctgatagtccaatttctcagacacattcgcaagacatcgagaaattgaaatcccaataccgcgctctggccagagactctgcacaggctaaacggaaataccaggaggcttctaaagataaggatcgcgataaggcaaaagacaagtacgttaggtctttgtggaagcttttcgctcaccacaatcggtatgtcctgggggtgagagctgcgcaactgcaccaccaacatcatcaccagctgttactgcccggtctcttacgcagtctgcaggaccttcacgaagagatggcttgtattttgaaagagatcctacaagagtatttagagatctcctccctcgtccaggatgaagtagtggccattcatcgggaaatggcagcagcagcagcacgcattcagccggaagcagagtaccaagggtttctgcgacagtacggatcagcgccagatgtgcctccatgcgtgacatttgacgagtccctgctggaggagggtgagccccttgagcccggagaactccaattgaatgagctcactgtggagtccgtgcagcatacccttacgagcgtcactgacgagctggcagtggccacagaaatggtattcagacgccaagaaatggtgacgcaattgcagcaagaactacggaacgaggaagaaaatacgcatcctagggagagagtccagctcctgggtaaacgtcaggtcttgcaggaagctcttcaggggttgcaagtggctttatgctcgcaggccaaactgcaggcacagcaggaactgctgcaaactaagcttgagcacttgggaccaggagagccccctcctgttctgctccttcaagatgataggcacagcaccagctctagcgagcaagagcgggaagggggaagaaccccaaccctggaaatcctgaagagccatatcagcggcattttcagacccaagtttagtaacctatatagactcgaaggcgagggattcccatcaattcccctgcttattgatcatttgctctctacacagcaacccctgacaaaaaagtccggggttgtcctgcatcgcgcagtgcccaaggacaaatgggtgctcaaccacgaagatctcgtccttggtgagcaaattggacgtggtaactttggcgaggtattctccggcaggctgcgcgcagacaacactctcgtggcagtgaagtcttgccgtgaaaccttgccccctgacctcaaggccaagttcttgcaggaagccagaagcagcccatccacctcgtcatggagtctgtgcagagggtcttcacctcctgcaggtggcgatttccttaccttcctccgcacggagggcgctaggttacgggtgaagactttgctgcagatggttggcgatgccgctgcgggaatggagtacctagagtccaagtgctgtatccatcgggacctggccgctcggaattgtctcgtcactgagaagaatgttctcaaaatctctgattttggtatgagtcgagaggaagctgatggcgtttatgccgcatccggtggactgagacaagtgcctgttaaatggacggcaccagaggcactcaattacggtagatacagcagtgaaagcgacgtctggagcttcgggatactgctttgggagacttttagcctcggcgctagtccctatcccaatctctctaatcaacagactcgcgagtttgtggaaaaaggagggaggttgccatgcccggaactgtgccccgacgccgtgttccggttaatggagcagtgttgggcatacgagccaggacaaagaccaagcttctcgaccatctaccaagaacttcagtctattcgcaagcgccaccgctag

SEQ ID NO: 55195 - DNA, 2085 bp, Artificial Sequence
  derived and/or modified sequence
atgggtttctccagcgagctatgcagcccacaggggcatggagtcttgcaacagatgcaagaagccgaactgcgcttgctcgaggggatgcgcaagtggatggcccagagagtgaaatcagatcgggaatacgctggactgttacaccatatgagcttacaagattctggcggtcagtcgcgcgctatcagcccggactctccaattagccaaacgcatagccaggacatcgagaagttgaagagccagtacagggctctggctcgggactcagcccaggctaagcgaaagtaccaggaggcttcaaaagacaaggatagagacaaggccaaggacaaatatgtgcgctccctgtggaaactctttgctcaccacaacaggtacgtgctgggggttcgagctgcccagctgcaccaccagcaccaccatcaactgttgctcccgggattgctgaggtcactacaagatctgcatgaggagatggcctgcatactgaaagagatcctgcaagagtacctggagatctctagcctggtccaggacgaggtggtggcgattcacagggagatggctgccgctgctgctcggatccagccagaagccgagtaccaggggtttctgcggcagtatggatccgcgccagacgtcccaccgtgtgtgaccttcgatgagagtctgctcgaagagggcgagccactggagccaggtgagctccagttaaacgagttaacggtggagtctgtgcagcacactctcacgagcgtgaccgacgagttggccgtagccaccgaaatggtttttcgccgacaggaaatggtaacacagctacagcaggagttgcgcaatgaggaagagaatacgcacccacgtgagagggtgcagctgttggggaagcgtcaagtcctgcaagaagctctgcagggactccaggttgccctgtgtagtcaggcgaaattacaggcccagcaggaactgctgcagacaaagctcgagcatcttggccctggtgagcccccacctgtcttattacttcaggatgatcgccatagcacctcctcatcagaacaggagcgagaaggcggaagaaccccaacactggagatcttaaagagccacatcagcggtatatttaggcccaagttctccaatctttaccggctggagggcgaggggttccccagcatccctctcctcatcgatcatctgctcagcacacagcagcctctgacgaagaagtccggcgtggtcctacaccgagccgtgcccaaagacaagtgggttctcaatcatgaagaccttgtgctcggcgaacaaatcgggagaggcaattttggagaagtcttctccggacggctgagggcagacaacacgctggtggcggtgaagtcctgcagggagaccctccctccggaccttaaagccaaattcctgcaggaagccaggatactgaagcagtactcccatcctaatatcgtgaggctgattggagtctgtacccaaaagcagcctatatatatagtgatggagctggtgcaagggggtgattttctgacatttcttcgtactgaaggggctcgacttcgagttaaaactctactacaaatggtaggtgacgcagctgcaggcatggaatatctggaaagcaagtgttgcattcaccgtgatctcgccgctagaaactgtctggtcactgaaaaaaatgtacttaagatcagcgactttgggatgtccagggaagaggcggatggcgtctacgctgccagcgggggactgagacaggtgcccgttaagtggacagcaccggaagcgctgaattacggaaggtatagcagtgaatcggatgtctggtcatttggtattctcttatgggaaactttctcgctgggcgcaagcccctatcccaacctgtccaatcagcagacacgggagtttgtcgaaaagggcggacgtctcccttgccccgaactgtgtcccgacgccgtgttccgtctcatggaacaatgttgggcctacgagcccggacaaaggccctctttctccaccatctatcaggagctgcagtcaatccgaaaaagacataggtag

SEQ ID NO: 55196 - DNA, 2085 bp, Artificial Sequence
  derived and/or modified sequence
atgggcttttctagtgagctatgcagccctcagggtcacggcgtgctgcagcagatgcaggaagctgaactccggctgctggaaggaatgaggaagtggatggctcagagagtgaaaagtgatagagagtacgctggtctactacaccatatgtctctccaggattctggcggacagtcaagagccatctccccggattccccaatttctcagacccacagccaggacattgagaagctgaaatcccagtaccgagccctcgcgagggacagtgcccaggccaaaaggaaataccaggaggccagcaaagataaggatcgggataaggctaaggataagtacgtgcgatctctgtggaaactgttcgctcatcataataggtacgttctgggagtgagagccgctcagcttcaccaccagcatcaccatcagctgctgctccccggtcttctgagatctctgcaggatctccacgaggagatggcatgcatactgaaggaaatactccaggagtatctggaaatctcgtctctagtccaggatgaggtcgtagctattcaccgcgaaatggccgctgctgccgctcggatccagcctgaggcagagtaccaaggattcctgcggcaatatggatcagctcccgatgtacccccatgcgtgacattcgatgagtctctgttagaggagggtgaacctctggagcccggagaactgcaactgaatgaattaacggtcgagtccgtccaacacacactgacaagcgtgactgatgaactggctgtggccacggaaatggttttccgaagacaagagatggttacccaactgcagcaggaactgcggaatgaggaggagaacacacatcctcgcgagcgcgtgcagctcctgggtaagcggcaggtcctccaggaggcgctccagggcctgcaagtggccctctgtagccaggctaagcttcaagcccagcaggaactgctgcaaactaagctagagcacttgggtcccggagagcccccaccagtactgctcctgcaggacgaccgccattcaacatctagctcggaacaggagagggagggtggaaggactccaaccttggaaatactcaaatcacacattagtgggatctttcgacccaagtttagcaatctgtacagactggagggcgaagggttccctagcatccccctgttaatcgatcacctcttgagtacccagcaacccctcaccaagaaatcaggggttgtgctacatcgagctgtgcccaaggacaaatgggtcttgaatcacgaggatcttgtcctgggtgagcagattggacgtggaaactttggcgaggtgttctcaggacgtctacgcgctgacaacacacttgtggcggtcaaatcatgtagagaaacgctgccccctgatcttaaggcaaagttcctgcaggaggccagaattctgaaacagtattctcacccaaatattgtaagattgataggcgtgtgtacccagaagcaaccgatctacattgttatggaattggtgcaaggaggagattttctgacttttttgcgcacggaaggtgcccgactgcgggtcaagacccttctgcaaatggtgggagatgcagccgctggcatggaatatcttgagtccaaatgctgcattcatcgcgatttggccgctagaaattgtctcgtgacagagaaaaatgtactgaaaatctccgattttggcatgagtcgtgaagaggctgacggtgtatacgcagcatctgggggactccgacaggtgcccgtcaagtggaccgctccagaagccctcaactacgggagatatagctccgagtccgacgtctggagtttcggaattctgctctgggaaaccttctctctgggagctagcccgtaccccaacttatcaaatcagcaaaccagagaattcgtggaaaaggggggacggctgccgtgtcccgagctgtgccctgatgctgtgtttcgcctcatggagcagtgctgggcctacgagcccggacagagacctagtttctccacaatataccaggagcttcagtcaattaggaaaagacatcgatag

SEQ ID NO: 55197 - DNA, 366 bp, Artificial Sequence
  derived and/or modified sequence
atggggttttcctcagagctttgctctccacaggggcacggggtgctccagcagatgcaagaggcggaattgcgtctcttggaaggcatgaggaaatggatggcccagcgcgtaaagtcagatcgggagtacgcaggcctgcttcaccatatgtcgcttcaggacagcggcggacagagccgggctatcagtcccgattctcctatatcacaggtagggctgtatgggacactggtgggcgctggatgcatctgcttactgctgccattgttgggagccctgtggggaagcgggtggaggtccggcagacctatgcttggctcacattgtgctccactgcctgcgtcccctatctgcgccgtatag

SEQ ID NO: 55198 - DNA, 744 bp, Artificial Sequence
  derived and/or modified sequence
atgaccatcctgttcctgaccatggtgatcagctacttcggctgcatgaaggccgcccccatgaaggaggccaacatcagaggccagggcggcctggcctaccccggcgtgagaacccacggcaccctggagagcgtgaacggccccaaggccggcagcagaggcctgaccagcctggccgacaccttcgagcacgtgatcgaggagctgctggacgaggaccagaaggtgagacccaacgaggagaacaacaaggacgccgacctgtacaccagcagagtgatgctgagcagccaggtgcccctggagccccccctgctgttcctgctggaggagtacaagaactacctggacgccgccaacatgagcatgagagtgagaagacacagcgaccccgccagaagaggcgagctgagcgtgtgcgacagcatcagcgagtgggtgaccgccgccgacaagaagaccgccgtggacatgagcggcggcaccgtgaccgtgctggagaaggtgcccgtgagcaagggccagctgaagcagtacttctacgagaccaagtgcaaccccatgggctacaccaaggagggctgcagaggcatcgacaagagacactggaacagccagtgcagaaccacccagagctacgtgagagccctgaccatggacagcaagaagagaatcggctggagattcatcagaatcgacaccagctgcgtgtgcaccctgaccatcaagagaggcagatag

SEQ ID NO: 55199 - DNA, 744 bp, Artificial Sequence
  derived and/or modified sequence
atgacaattctcttccttaccatggtcatttcttatttcggatgcatgaaagcagctccaatgaaagaggcaaacattcgtggccagggagggctggcctaccctggagttagaacccacggcactctggagtctgtgaacggtccgaaagccggcagtaggggtctaacatcactggcagacacattcgaacatgttattgaagaactgctggatgaagatcagaaagtcagaccaaacgaggagaacaacaaggatgccgatctttatacaagccgcgtcatgctatccagccaggttccactggagccacctcttctgttccttctcgaggagtacaaaaactacttggatgcagccaatatgtccatgcgggtgagaagacatagcgaccccgcgcgccgcggagaactttcagtttgcgattctattagtgaatgggtgactgccgcagacaagaaaactgcagtggacatgtccggcgggacagtgacagtgcttgaaaaagttccagtcagcaaaggccagttgaaacagtatttttacgaaactaagtgcaaccctatggggtataccaaggagggctgtaggggaatcgacaaaagacattggaattcccagtgtaggacaacacagtcgtatgtgcgagctctcactatggacagcaaaaaacggatcggctggcgatttatacgcattgacactagttgcgtctgcaccctcactatcaagcgcggcagatag

SEQ ID NO: 55200 - DNA, 744 bp, Artificial Sequence
  derived and/or modified sequence
atgaccattctgtttctaactatggtcattagttacttcggttgtatgaaggcagcaccaatgaaagaggccaatattcgcggtcaggggggactggcctaccctggtgtgagaacacacgggactttggagagcgtaaacgggcctaaagcgggtagtcgtggcttgacgtctctcgccgatacgttcgaacacgttattgaggaactgttggacgaagaccagaaggtccgacctaatgaggagaacaataaagatgcagatctctatacttcccgtgtcatgctatcttcccaggtccctctcgaacctccactgcttttcttgctggaagaatacaaaaactacctggatgccgccaacatgtcaatgcgcgtgcggagacactccgaccctgctagacggggtgaactgtctgtttgcgactcaatatcagagtgggtcaccgctgcagacaaaaagacagccgtagacatgtctgggggtacagtgaccgtcctggagaaggtccctgttagcaaagggcagctgaaacagtatttctacgagaccaaatgtaatccaatgggctacaccaaagagggatgtagagggattgacaagagacactggaactcccagtgccgtacaacacagtcatatgtgcgcgcactgaccatggactccaaaaagcggatcggttggagatttattcggatagacacttcctgcgtttgtacgctaacgatcaagagggggcggtag

SEQ ID NO: 55201 - DNA, 744 bp, Artificial Sequence
  derived and/or modified sequence
atgacgatactcttcctgacgatggtgataagctattttggatgcatgaaggccgctcccatgaaagaggcaaatatccggggtcaaggagggcttgcataccccggcgtgagaactcatggcaccctggagtcggttaacggaccaaaagccggcagtcgcgggcttaccagccttgccgatacctttgagcatgtgattgaagaattgcttgatgaggatcaaaaagtacgccctaacgaggagaataacaaagatgctgacttatatacctccagagtgatgctatcaagccaggtccctctggagccccctctcctgtttctgctcgaagagtataaaaactatttggacgctgccaatatgtccatgcgggtcagaaggcactccgaccccgccagacgcggagaactgtctgtgtgtgactccatctctgagtgggtgactgccgctgacaagaagaccgctgttgatatgtcagggggcaccgtaacagttctggaaaaagttccagtgtcaaaaggccaactcaagcagtacttttacgagacgaaatgtaatcccatgggatatactaaggaggggtgtcgtggaattgacaaacgtcactggaattctcagtgccggaccacgcaatcatatgtcagagccctcaccatggacagcaagaaaagaattggctggcgttttatccggattgataccagctgtgtgtgtaccctcaccataaagcgcgggcgatag

SEQ ID NO: 55202 - DNA, 744 bp, Artificial Sequence
  derived and/or modified sequence
atgactattctgtttctgaccatggtgattagctattttgggtgcatgaaagcggcgcctatgaaggaagctaacattaggggccaagggggcctcgcctaccccggcgttcgcacacacggaacactggaatccgtgaacgggcccaaagctgggtccagagggttgacctctctcgccgacacctttgagcatgtgatagaggagctgctcgatgaagaccagaaggtgagaccaaacgaagaaaataataaagacgctgatctgtatacgagccgggtgatgctgtcttctcaggtgcctcttgaaccacccctgcttttcttactggaagagtacaagaactatctggatgcggccaacatgtctatgcgcgtccgaagacattccgatcccgcccggaggggagagctgtctgtatgtgattcaatcagcgaatgggtgacggcggcagacaagaagacagctgttgatatgtccgggggtacagttaccgtactggagaaggtgcccgtatctaagggccagctgaagcagtatttctacgaaacgaagtgcaacccgatgggctatacaaaagaaggctgtagaggaatcgataagaggcattggaatagtcagtgccgaacaacccaaagctacgttcgcgccttgactatggacagtaagaagcggattggctggcggttcataagaattgacacgagttgtgtgtgtactctcaccatcaagcggggacggtag

SEQ ID NO: 55203 - DNA, 744 bp, Artificial Sequence
  derived and/or modified sequence
atgactatcctgttcttgactatggtcattagttacttcgggtgcatgaaggccgcacccatgaaagaagccaacatccgcggccaaggggggctggcatatcccggtgtgaggactcatggcacgctggagagcgtaaatggtcctaaggcaggctcccgcggcttgacttccctggccgacacttttgagcacgtgatcgaggagctgctggatgaagaccagaaggtcagacccaacgaggagaacaacaaggatgccgatttatatacttcgagggtgatgttatcatcccaggtaccacttgaaccgcccttgctgtttttgttggaggagtataagaattatctcgacgcagctaacatgtccatgcgggtccgtagacattcagaccctgctcggcggggcgaattatccgtttgtgatagtatttccgaatgggttaccgcagccgacaagaaaacagcagtggatatgagcggtggaacagtcactgtcctagaaaaggtccccgtttcaaaggggcagctgaagcagtacttttatgagaccaaatgcaaccctatgggatatacgaaggagggctgccgcgggatcgataagaggcactggaatagccaatgccgcaccacgcagtcttacgtgcgggccttaactatggatagcaagaagaggattggttggcgcttcattcggatcgacacatcttgcgtgtgcactctgactatcaaaagaggccggtag

SEQ ID NO: 55204 - DNA, 744 bp, Artificial Sequence
  derived and/or modified sequence
atgacaatactgtttttgaccatggtcatcagctattttggttgtatgaaagcagcaccaatgaaggaggcaaacattaggggacagggtggactggcgtaccccggcgtccggacacatggaaccctagagagcgttaacggacctaaggctggttctcgaggtctgacaagcctcgcagataccttcgagcatgtgattgaggagctgctggacgaggatcagaaagtgcgccccaacgaggagaacaacaaggatgcggatctgtacacctcccgagtcatgctcagcagtcaggttcctctcgaacctccattgctgttcctgctagaggaatacaagaattacttagatgcagccaacatgtcaatgcgcgtgcggcggcatagcgatccagcccggagaggtgagctgtcagtctgtgactccatcagtgagtgggtgacagccgccgacaagaaaaccgccgtggacatgagcggtggcactgtgaccgtactggaaaaggtaccggttagcaaaggccagctgaaacagtacttttatgaaaccaagtgtaatccgatgggttacactaaggaagggtgtcgcggaatcgacaaacggcactggaattctcagtgcagaacaacccaaagctatgtgcgtgccctgaccatggactctaagaaacggattggatggcgattcatccggatcgatacctcttgcgtatgcaccttgaccataaagagaggcaggtag

SEQ ID NO: 55205 - DNA, 744 bp, Artificial Sequence
  derived and/or modified sequence
atgaccatactgttcctaactatggtaatctcttacttcggatgtatgaaagctgctcccatgaaagaagctaatatacgaggacagggcggcctggcatatcccggggtgcggacccatggcacccttgaatcagtgaatggccccaaggccggatcaagaggcctcacaagcctcgctgacacctttgagcacgtaatcgaagagctgttggatgaggaccagaaggtgagacccaatgaagaaaacaataaggacgcagacctgtatacttcaagagtcatgctgagctcgcaggttccgcttgagcctccattgttgttcctacttgaagagtacaaaaactatctggatgctgccaatatgagcatgcgtgtgcgaagacattccgaccccgcaaggcggggggaattgtctgtctgtgacagcatttcagagtgggtaacagcagcagacaagaaaacggccgtggacatgtccggtgggacagttactgtcctagagaaagtgccagttagcaaaggccagctgaagcaatacttctacgaaacaaaatgtaaccctatgggatatacaaaagaaggttgtcggggaattgataagcggcattggaactcacagtgccgcacgacgcagtcttatgtgcgcgccttaaccatggattctaagaaacggataggttggcgatttattcgtatagacacatcctgcgtgtgcacgctgacgatcaaacgggggcgctag

SEQ ID NO: 55206 - DNA, 744 bp, Artificial Sequence
  derived and/or modified sequence
atgactatactctttttaaccatggtgatcagttacttcgggtgcatgaaggcagctccaatgaaagaggccaacatcagggggcagggagggctggcataccctggagtgaggacacacgggaccttagaaagtgtcaacggccctaaggctggatcacgcggcctcaccagtctggccgatacatttgaacatgtaattgaggagctactggacgaggaccagaaggtgcgccctaacgaggagaataataaggacgccgacctatacactagcagggtaatgctatcatcacaggttccccttgaaccaccccttttgtttctgctggaagaatacaaaaattaccttgatgctgctaacatgtctatgagagtgcgtcgacacagtgacccagcacgcaggggtgagctgtctgtatgtgattcaatcagcgaatgggtgactgcagcagacaaaaaaactgcggtggatatgtccggcgggactgttaccgtgctcgagaaggtgccagtttcgaaaggccagctgaagcagtatttctatgagacaaaatgcaacccgatgggctatacgaaggaaggatgccgtgggatcgacaaacgtcactggaattcacagtgtcggactactcagagctatgtgagagcactcaccatggacagcaagaaacggatcggatggcgctttatccgcatcgacacatcttgtgtctgtacactcacaatcaagcggggaaggtag

SEQ ID NO: 55207 - DNA, 744 bp, Artificial Sequence
  derived and/or modified sequence
atgacgatccttttcttaacaatggtgatctcatatttcgggtgcatgaaggctgcccccatgaaagaagctaatatacgcggccagggaggccttgcctaccccggcgttcgaactcacggaactctcgagtcagtcaatggcccaaaggccgggagccggggcttgacatctctagctgatacatttgagcatgttatagaggaactacttgacgaggaccagaaggttaggcccaacgaggagaacaacaaggatgcggacctgtacactagtcgcgtgatgttgagctcccaggtgccgctggagccgccgttactgtttctgctggaagagtacaagaattacttagacgcagcaaatatgtccatgagggtgagaagacactcagacccggcgagaagaggagagctgtccgtgtgtgactcaatcagcgaatgggtcacggctgcagataaaaagactgcagtcgacatgtcagggggaaccgtgaccgttctggagaaagtgcccgtctcgaaaggacaactcaagcaatacttttatgaaaccaagtgcaacccaatgggttacacaaaggaaggttgccgtggtatcgacaaacgtcattggaacagccaatgtcggaccacccagtcctacgtgagagcactgaccatggactcgaagaagcgaatcggttggaggttcatccgcatcgacacaagctgcgtgtgtacccttacaatcaaaaggggcaggtag

SEQ ID NO: 55208 - DNA, 744 bp, Artificial Sequence
  derived and/or modified sequence
atgacgattttgtttctgaccatggtgatttcctatttcggttgtatgaaagctgcaccgatgaaggaagctaacatccgtggacagggtggattggcctatccgggggtgaggactcatggcacattggagtctgtgaatggcccaaaggccggcagccgcggcttaacatcgctcgccgacacgttcgagcatgtgatcgaggagctgcttgacgaagaccagaaggtgcgtccaaacgaagagaataacaaggacgccgacctgtacacatccagggtcatgctgagttcacaagtccctttggaacccccactcttgtttttgttagaagaatacaagaactatcttgacgccgccaacatgtccatgcgcgtaagaagacattcagatccagcccggaggggggaactgtccgtgtgtgacagcatctcagagtgggtgactgccgccgacaaaaagactgccgtagatatgagtgggggaacagtgactgtgctggaaaaggtcccggtatcaaagggtcagctgaagcagtatttctatgaaactaaatgcaacccgatgggttataccaaggaggggtgcagaggaattgacaaacggcactggaactcccagtgccgtactacccagtcttatgtccgcgccttgactatggacagtaaaaagagaataggctggcgcttcatccgaatagacacctcttgcgtatgtacactgacaataaaacgcgggagatag

SEQ ID NO: 55209 - DNA, 744 bp, Artificial Sequence
  derived and/or modified sequence
atgacaattctcttcctaaccatggttatttcctactttggatgtatgaaggccgcccctatgaaggaggcaaacatacgcggccagggcggacttgcttacccaggggtgcgaacgcacggtaccctagagtcagtaaacggcccgaaagctggcagtaggggcttgacgagcctggccgatacttttgaacacgttatcgaggaactcctggatgaggatcagaaagtgcgccctaacgaagagaacaataaagatgcagatctgtataccagtcgggtcatgctctcttctcaggtaccactggaacccccgctgttattccttctcgaggagtataagaattacttagacgccgctaacatgtccatgcgcgtccgccggcactcagatcccgcgaggcggggtgaactgagtgtatgcgattcaatatccgaatgggtaaccgcggctgataagaagactgctgtcgacatgtccggcggcaccgtaacagttctggaaaaggttcccgtgtccaagggacagctgaaacagtacttttatgaaactaaatgtaaccccatgggatacacgaaggagggctgtcgaggtatagacaagaggcattggaatagccaatgccgtacgacccagagttatgttcgggcccttactatggactccaagaagaggatagggtggaggtttattcgcatagacaccagctgtgtctgtaccctgacaataaagaggggacgatag

SEQ ID NO: 55210 - DNA, 744 bp, Artificial Sequence
  derived and/or modified sequence
atgaccatactgtttcttaccatggtcatcagctactttggatgcatgaaggccgcaccaatgaaggaggcaaatattcggggccagggggggctggcctatccgggcgttaggacgcatgggacccttgagtctgtcaatggccctaaggcgggctctcggggcctgaccagcctcgctgacacgtttgagcacgtgatcgaagaactgttggacgaggaccagaaagtgagaccaaatgaggagaacaacaaagacgccgacctatacacttcacgcgtcatgctttcctcgcaggtacccctggagccgcctttactttttttattagaggaatataagaactatctggatgccgccaacatgtctatgcgcgttcgcagacattccgatccagctcggcgcggagaactgagtgtatgtgacagcatctccgaatgggtgacagcagctgacaaaaaaaccgccgtcgacatgagcggcggcaccgttactgtcctggaaaaagtgccggtatctaaggggcagctaaaacaatacttctatgagaccaagtgtaatccaatgggctataccaaagagggttgtcggggcatcgacaagaggcactggaattctcaatgtcgaaccacacagtcgtatgtgagggctctgacaatggacagcaaaaagcgcatcggctggaggttcatccggatcgacacgtcctgcgtttgtacactaacaattaagcgaggcaggtag

SEQ ID NO: 55211 - DNA, 744 bp, Artificial Sequence
  derived and/or modified sequence
atgactatcttatttctgacgatggttatcagttacttcggctgcatgaaagccgcgccaatgaaggaagccaacatccgaggacagggtgggctggcctaccccggcgtgagaacacatgggaccctagaaagcgtgaacggtccaaaggccggtagccggggtttgaccagccttgcagatacctttgagcatgtcatcgaagagctgctggacgaggatcagaaagtgcgccctaatgaagagaacaacaaagatgcagatctgtatacttctcgagtgatgcttagttctcaagtcccgctagagccacccttgctgtttctactcgaggaatataagaattacttggacgcagcaaacatgagtatgagagtgaggagacattcggaccccgcaagaaggggcgagctgtccgtgtgtgactcgatctctgaatgggtcactgctgcggacaaaaaaaccgcagtggatatgtctgggggcactgtcactgtgctggagaaggtgccagtcagtaaaggacagctgaagcagtacttttacgaaactaagtgcaaccccatggggtataccaaggagggatgcaggggcatcgacaagcgtcattggaattcccaatgtcgcacgactcaaagctacgtgcgcgcgctgactatggactctaaaaaacggattggctggcggtttatccggatcgatacatcgtgcgtgtgtactctgactataaagcgcggacgttag

SEQ ID NO: 55212 - DNA, 744 bp, Artificial Sequence
  derived and/or modified sequence
atgactattctctttcttacaatggtgatctcctacttcgggtgcatgaaagccgccccaatgaaggaagctaatatccggggacagggtgggcttgcctaccccggcgtgcgaactcatggtactttggagtctgtcaatggccctaaagccggctcccgcggactgactagtctcgcagacacttttgagcacgtcatcgaggaactgttggatgaggatcaaaaggttcgacccaacgaggagaataataaggatgctgatctatacacgagtagagtgatgctgtcgtcacaggtccccctggaaccaccactgttattcttgctggaagaatacaaaaactatctagatgccgcaaatatgtctatgcgagtcagacggcactctgaccccgccagaaggggggagctttctgtgtgtgatagcatcagcgagtgggtgacagctgccgacaagaaaacagccgtagacatgtctggcggcactgtgacagtgctggaaaaggtcccagtctcgaaaggccagctcaagcagtatttttacgaaaccaagtgcaatcccatggggtacacgaaagaagggtgtcgtggcatagataagaggcactggaatagccagtgccgaacaacccagtcctacgtgcgcgcacttacgatggatagcaaaaagcggattgggtggagatttattagaatcgatacctcttgtgtttgtacgttgaccatcaagaggggccgctag

SEQ ID NO: 55213 - DNA, 744 bp, Artificial Sequence
  derived and/or modified sequence
atgaccatcctcttcctgaccatggtgatctcctacttcggctgcatgaaggccgcccccatgaaggaggccaacatccggggccagggcggcctggcctacccaggagtgaggacccacggcaccctggagagcgtgaatggccccaaggccggcagccggggcctgaccagcctggccgacacctttgaacatgtgattgaggagctgctggatgaggaccagaaggtgcggcccaatgaggagaacaacaaggatgctgacctgtacaccagccgggtgatgctgagcagccaggtgcccctggagccccccctgctcttcctgctggaggagtacaagaactacctggatgctgccaacatgtccatgagggtgagaagacacagcgaccctgcccggcggggggagctgtctgtgtgtgacagcatcagcgagtgggtgacagctgctgacaagaagacagctgtggacatgtctgggggcaccgtgacagtgctggagaaggtgcctgtgtccaagggccagctgaagcagtacttctatgagaccaagtgcaaccccatgggctacaccaaggagggctgccggggcatcgacaagaggcactggaacagccagtgcaggaccacccagagctatgtgcgggccctgaccatggacagcaagaagagaattggctggaggttcatcagaattgacaccagctgtgtgtgcaccctgaccatcaagagaggaagatag

SEQ ID NO: 55214 - DNA, 744 bp, Artificial Sequence
  derived and/or modified sequence
atgaccatcctgttcctgaccatggtgatcagctacttcggctgcatgaaagctgctcccatgaaagaggccaatatccggggacagggtggtctggcctaccctggagtcaggacgcatggtacactggagtcagtgaatgggccaaaggctggcagccgggggctcaccagcctggccgataccttcgaacatgtaattgaagagttgctggatgaagaccagaaggtacggcctaacgaggagaacaataaggatgctgatctttacacatccagagttatgttaagctctcaggtccctctggagccgccgctgttgtttctgctcgaggagtataaaaactacctcgatgccgctaatatgagcatgagggtgcgacgtcacagcgatccagccaggcgcggggaactgagcgtctgtgacagtatatctgaatgggttacagccgccgataagaaaaccgctgtggatatgagcggtgggaccgtgaccgttcttgaaaaagttccagtaagtaaggggcaactgaaacagtatttttatgaaaccaaatgcaatccaatgggctatacgaaggagggctgccggggcatcgacaaaaggcactggaattctcaatgcaggactacacagagctatgtgcgcgcactgaccatggatagcaagaaacgtatcggatggagattcatacgtatagacactagctgtgtatgcaccttaaccatcaagcgaggcaggtag

SEQ ID NO: 55215 - DNA, 744 bp, Artificial Sequence
  derived and/or modified sequence
atgaccatcctgttcctgaccatggtgatcagctacttcggctgcatgaaagcagcacccatgaaagaggcaaatatccgtggacagggcggacttgcatacccgggtgtacggacacatgggaccttggagagcgtaaacggaccaaaagctggttcgagaggattaacctctctggccgataccttcgagcatgtgatcgaagagcttctggatgaggaccagaaagtgaggcccaatgaggaaaacaacaaagacgccgacctgtatacgagtcgcgtcatgctctcgtctcaggtgccattggagcctcctctcctctttctattggaggagtataaaaattatctggacgctgctaatatgtctatgcgtgtccgacgtcacagtgacccggcgcgtcgcggggaattgtctgtttgtgatagcatttccgaatgggttactgctgccgataagaagacagctgtcgacatgtcaggcgggaccgtgactgttttagaaaaggtgccagtgtccaagggacagctcaaacagtacttctatgagacaaagtgtaaccctatgggctacactaaggaaggatgtaggggcatagataagcggcactggaatagtcagtgtcgtactactcagagttatgtgcgcgccctcacaatggacagcaagaagcggatcggttggaggtttatacgcattgacaccagttgtgtgtgcactctgactattaaaaggggtcggtag

SEQ ID NO: 55216 - DNA, 744 bp, Artificial Sequence
  derived and/or modified sequence
atgaccatcctgttcctgaccatggtgatcagctacttcggctgcatgaaggccgcccctatgaaagaggcaaatatccgaggacaaggcgggctagcctaccccggagtgagaacccatggaacgcttgagtccgtgaatggccccaaggccgggagcagaggccttaccagtttagccgacacctttgaacacgtgattgaggaactcctggacgaagatcagaaagtgaggcccaatgaagagaacaacaaggacgcagacctgtatacctccagggtaatgctctctagccaggtacctctggagcccccgctcttgttcttgcttgaggagtacaaaaactacttggacgcagccaacatgtcgatgcgggttcgcagacactctgatcctgctcggagaggcgagctgtcagtgtgtgactccatatccgagtgggtcacggcagccgataagaaaaccgccgtggacatgagcggggggacagtaaccgtgctggagaaagttccagtgagcaaaggccaacttaaacaatatttctatgagaccaagtgtaaccctatgggctatacaaaagagggctgtcgcggaatcgacaaacgccattggaactcacagtgtcgtacaacccagtcctacgtgcgcgctctaactatggattcaaagaagcgcatcggctggcgatttattcgaatcgatacatcctgcgtgtgtacactgacaattaagagaggtcgatag

SEQ ID NO: 55217 - DNA, 744 bp, Artificial Sequence
  derived and/or modified sequence
atgaccatcctgttcctgaccatggtgatcagctacttcggctgcatgaaggccgccccaatgaaggaagctaatattcgaggtcagggaggccttgcatacccaggggtgcgtactcatggtacactggaatctgtgaatggtccaaaggctggcagccgtgggctgacaagcttagctgacacattcgagcatgttatagaagagctgttggatgaggatcagaaggtcaggcccaatgaagagaataataaagacgccgacctgtacacgtctcgcgtcatgctcagttcccaggtgccattggagcctcctttgctttttctcctcgaggaatacaaaaactacctggatgccgctaatatgagcatgagggtacgccggcactccgatcccgcaaggcggggcgagctgagtgtgtgtgactccatttctgaatgggtcacggctgcagacaagaagaccgctgtggacatgtccggcggcaccgtgaccgtgttagaaaaggtgcctgttagcaagggccagctgaagcagtacttttacgaaacaaagtgcaatccaatggggtatacaaaagaaggctgtcgcgggatagacaaacgccattggaatagccaatgtagaacaactcagtcatacgttcgcgcccttactatggattctaagaaacgaatcggctggcgcttcatacggatcgacacctcatgcgtgtgtacacttactattaaaagaggacggtag

SEQ ID NO: 55218 - DNA, 744 bp, Artificial Sequence
  derived and/or modified sequence
atgaccatcctgttcctgaccatggtgatcagctacttcggctgcatgaaggcggcacccatgaaggaagcaaacattcgtggccagggaggccttgcctacccaggggtcaggacccacggtacactcgaatcagtgaatgggccgaaagcaggttcccgtggccttacatcactagcagataccttcgaacatgttatcgaggagttattggacgaggatcaaaaagttcggcccaatgaggagaataacaaagacgcagatctgtacaccagtagggttatgctctcaagtcaggtccctctagagcccccactgctgttcctgctggaggaatataaaaattacctcgacgccgctaatatgtctatgcgcgtgcgccggcattctgatccagctagacggggcgagctgtccgtctgtgacagcatatctgagtgggtgaccgccgcagataaaaaaactgcagtagacatgtcagggggtactgtaacggtcctggaaaaagttccagtgtcgaaaggacagctgaagcagtatttctacgaaaccaagtgcaaccccatgggttacactaaggaggggtgtagaggaatcgacaagaggcactggaatagccagtgcagaacaacccagagttacgttagagcattaaccatggactctaaaaagagaattgggtggcgtttcatccgcatagacacatcgtgcgtctgcacacttactatcaagcgcggtcggtag

SEQ ID NO: 55219 - DNA, 744 bp, Artificial Sequence
  derived and/or modified sequence
atgaccatcctgttcctgaccatggtgatcagctacttcggctgcatgaaggcggctccaatgaaagaagccaatattaggggacaggggggtctcgcctatcctggggttcgcactcatggtactcttgagtccgtgaatggacctaaggccgggagcagggggcttaccagcctcgctgatacattcgagcacgtgatcgaggaattgctcgatgaggaccagaaggtgcggcctaatgaggaaaataacaaagatgcagacctatatacctccagagtaatgctgtcctctcaagtgcctctcgagccgcctctcctcttcctgctggaagaatacaagaattatctcgatgctgctaacatgagcatgcgagtgaggagacactccgacccagctcgccggggagagctatcagtttgcgattccatctccgagtgggtcactgccgcagacaagaagaccgcagtggacatgagcggcgggaccgtaaccgtgttagaaaaagtgcccgtgagtaaaggccaactcaaacagtacttttacgaaaccaaatgtaaccccatgggatataccaaagaaggatgccgaggcattgacaagcgtcactggaatagccaatgtcgaacgacacagtcgtatgtgcgcgcactgacgatggatagcaagaagcggatcgggtggaggtttattcgcatcgatacttcttgcgtttgcactctgacaattaaacgggggcggtag

SEQ ID NO: 55220 - DNA, 744 bp, Artificial Sequence
  derived and/or modified sequence
atgaccatcctgttcctgaccatggtgatcagctacttcggctgcatgaaggccgcccctatgaaggaagccaacatcagaggacagggcggtctcgcttacccaggcgttagaacacatggaaccctggaaagcgtgaatggccctaaagccggcagccgggggcttacctccttggcagacacctttgagcacgtcatcgaggagctgcttgacgaagaccagaaggtgaggccaaatgaagagaacaataaggatgccgacctgtacacttcacgtgtaatgctctcttcgcaggtccctctggagccccctctcctcttcctactcgaagaatataagaactatttggatgctgcgaacatgagtatgcgagtgcgtaggcacagcgatccagctaggaggggtgagcttagcgtctgtgactctatctcagagtgggtgacagcggctgacaagaagaccgcagtggacatgagcggggggaccgttaccgtgctcgagaaagtgccagtgagtaaagggcagctgaaacaatacttctacgagaccaagtgtaatcctatgggctatacaaaagaagggtgcaggggcattgacaagcggcattggaacagtcaatgtagaacgactcagagctacgtccgggctctgaccatggacagcaaaaaacggatcggatggcggttcatcagaatcgacacttcctgtgtgtgcaccttgacaataaaacgaggtagatag

SEQ ID NO: 55221 - DNA, 744 bp, Artificial Sequence
  derived and/or modified sequence
atgaccatcctgttcctgaccatggtgatcagctacttcggctgcatgaaagccgctcctatgaaagaggccaacatccgagggcagggaggattggcatatccgggagtcagaactcatggcacccttgaatccgtcaacggaccaaaggcaggtagcaggggcctgacctctctagcagatacgtttgaacatgtaatagaggagctattggacgaagatcaaaaggtcagaccaaatgaggaaaacaataaggacgcggatctgtacacgtcgcgggtaatgctttcatcccaagtgcctctggaacctcctctcctcttcctgctggaggaatacaagaactacctggatgcagcaaatatgtcaatgcgagtgcggagacactccgatccagctagacggggagaactctccgtctgcgacagtatctctgagtgggtgaccgccgctgataaaaaaactgcagttgatatgtctggcggcaccgtaaccgtactggaaaaggtccccgtgtctaaggggcaactcaagcaatatttttacgagacaaagtgtaaccctatgggctataccaaggaagggtgcagaggcattgacaaacggcactggaacagccagtgccgcacaactcagtcatacgtgagggccctgacaatggattctaagaagaggatcggctggcggttcatacggatcgacacgtcttgtgtgtgcaccctgaccatcaagcggggcaggtag

SEQ ID NO: 55222 - DNA, 744 bp, Artificial Sequence
  derived and/or modified sequence
atgaccatcctgttcctgaccatggtgatcagctacttcggctgcatgaaggcagccccgatgaaagaggccaatattagaggacaggggggcctcgcttaccccggcgtccgaactcatggcaccttggaatctgttaatggcccaaaggctgggtctcggggtcttacatcgctggcagacacatttgaacacgtgattgaagaactccttgatgaggatcagaaggtgagacccaatgaggagaataacaaagacgcagacctatatacatcccgagtgatgttatccagtcaagtcccgctggaacccccgctgttgtttttactcgaagagtataagaactatcttgatgctgcaaatatgtcgatgcgggtgcgtcgccattccgatccagcccgcaggggcgagctgagcgtctgtgactctatttcagagtgggtcaccgccgcagataagaaaactgcggttgacatgagtgggggaactgtcacggtgcttgaaaaggtccctgtttcgaaaggacagctcaaacaatacttctatgaaactaagtgtaatccgatgggctacaccaaagagggttgcaggggcatcgataagcgccattggaattctcagtgtaggacaactcagtcttacgttagggccctgactatggattccaagaaacgcatcggctggaggttcattagaatcgacacaagctgcgtatgtaccttgacaattaaaaggggacgatag

SEQ ID NO: 55223 - DNA, 744 bp, Artificial Sequence
  derived and/or modified sequence
atgaccatcctgttcctgaccatggtgatcagctacttcggctgcatgaaggcggctcccatgaaggaggcgaacatccgcggccaaggcggtttggcctacccgggtgtgcggacacatggaactctcgaatctgtgaatggccccaaagcaggctcccggggactgactagcctcgcagatacgttcgaacacgtgattgaggaattactcgacgaagaccagaaggtgagaccaaacgaggaaaacaacaaggacgccgatctgtacacttcccgcgtgatgcttagctcgcaggtgcctttagagcccccactgctcttcctattggaggagtataagaactatctggatgctgcaaacatgtccatgcgagtgagacgacattccgatcccgcgagacgaggggagttatctgtgtgtgactccatctctgagtgggttaccgctgctgataagaaaaccgccgtggatatgtccggcgggacagttacagtgcttgaaaaagttcctgtatcaaagggacagctgaaacagtacttctatgagaccaagtgtaacccaatgggctataccaaagaggggtgccgaggtatcgataaacgtcactggaactcacagtgccgcactacccagagttacgtgcgtgcattgacaatggattctaaaaaacggatcgggtggcggtttattcgcatagatacaagctgtgtttgcacgctgaccataaaacgagggagatag

SEQ ID NO: 55224 - DNA, 744 bp, Artificial Sequence
  derived and/or modified sequence
atgaccatcctgttcctgaccatggtgatcagctacttcggctgcatgaaggctgcacctatgaaagaagccaacatccggggccaaggcggactcgcctacccaggagtgagaacccatggcactctggaatctgtcaacggcccaaaagctggctcgcgaggtctgactagtctggccgacactttcgaacatgtgatagaagagctactcgacgaggaccaaaaagtgcgcccgaatgaggagaataacaaggacgctgacttatacactagtcgcgtgatgctgagctcccaggtacctcttgaaccccctctcctcttcctcttggaggaatacaaaaattaccttgatgcggccaatatgtcgatgcgggtaaggagacacagtgatcccgctcgccgaggagaactatctgtttgtgactccattagcgagtgggtaacggcggccgataagaaaacggctgtagacatgtccggcggaacagtcacggtgttagaaaaggtacccgtcagtaagggccagctgaagcagtatttttatgagacaaaatgtaacccaatgggttacaccaaggagggctgtagggggattgataaacggcactggaatagccaatgccggactactcagtcctacgtaagggccctaacaatggactccaagaagagaatcgggtggcgatttattcgaattgatacgtcgtgtgtgtgcacactgactataaagcgcggcaggtag

SEQ ID NO: 55225 - DNA, 744 bp, Artificial Sequence
  derived and/or modified sequence
atgaccatcctgttcctgaccatggtgatcagctacttcggctgcatgaaggctgcccctatgaaagaagcgaacataaggggccagggcggcctcgcatatccaggagtgagaacccacggcaccctggagtctgtcaacggcccaaaagcgggcagtaggggtctgacctccctggccgatacattcgaacacgtgatagaggagctgcttgatgaagaccagaaggtgaggccaaatgaggagaacaataaagacgccgacctgtataccagtagggttatgctctccagccaggtgccgctagagcccccactgctttttctactggaggagtataaaaactatctggacgctgccaacatgtcgatgagggtgaggcgacacagcgaccctgcccggaggggggagctctccgtgtgcgatagcatatccgagtgggtcacagccgccgataagaagactgcggtggacatgagcggaggaactgttacagtgctcgagaaagttcctgtctctaaaggccaactgaaacagtatttctacgaaacgaagtgtaaccccatgggctacaccaaggaggggtgcagaggaatcgataagaggcattggaattcccaatgccggaccacccaatcatatgtcagagcccttacaatggactctaaaaaacggattggatggcgcttcatccggattgatacaagctgtgtgtgtacactgactatcaagaggggcaggtag

SEQ ID NO: 55226 - DNA, 744 bp, Artificial Sequence
  derived and/or modified sequence
atgaccatcctgttcctgaccatggtgatcagctacttcggctgcatgaaagcggcgcccatgaaagaggccaatattagaggccagggtggtctggcgtatccgggcgtgcgtactcatggtacactggagtctgtgaatggcccgaaggccggctctaggggtctgacatcactggctgataccttcgaacatgttatcgaggagctcttggacgaggatcagaaagttcggcccaatgaagaaaataacaaagacgccgatctgtacacttctcgagtgatgctgtcgagccaggtaccactggaaccccccctgctgttcttgctagaggaatacaaaaactacctggacgcagctaacatgtcaatgcgggttagacgtcactccgacccagcccggcgtggagagttgtctgtttgtgatagcatttcagagtgggttaccgccgcagataagaagactgccgtcgacatgtcaggagggaccgtgacagtgcttgagaaggtgccggttagcaagggccaactaaagcaatacttctatgaaacgaagtgcaacccaatgggctacacaaaagaggggtgtcggggaatagataaaaggcattggaacagccaatgcaggactacacaatcttacgtgcgagcactaaccatggatagcaagaagagaatcgggtggaggttcatccgcatcgatacttcatgcgtgtgtacactcacaatcaagcgcgggcgctag

SEQ ID NO: 55227 - DNA, 744 bp, Artificial Sequence
  derived and/or modified sequence
atgaccatcctgttcctgaccatggtgatcagctacttcggctgcatgaaagccgctcccatgaaagaagctaacatacgcggacagggagggctggcatacccaggtgtccgaacccacggaacacttgaatcagttaatggccccaaggcggggtcccgcggtcttacgagtctggctgataccttcgagcatgtgatcgaggagttgttggacgaggaccaaaaagtgagacccaatgaagagaacaataaagacgctgacctgtacacctctcgagtgatgctatctagccaggtgcccctggagccgccgctcttattcttacttgaagaatataaaaactatctcgatgccgcaaatatgtcaatgcgggtgaggcggcactctgacccagcccggaggggcgaactgtccgtttgcgattcgatctctgagtgggtgaccgcagcagacaaaaaaacagccgtcgacatgtccggcgggaccgtgaccgtcctagagaaagtgcccgtttcaaaggggcagttaaagcagtacttctacgagacaaaatgcaacccaatggggtatacaaaagaaggatgcagggggatcgacaagcgccactggaatagccagtgccggacaacgcaatcttacgtccgtgcactcacaatggattctaaaaagcgtatcggctggcggttcatacggattgatacctcatgcgtttgcacactaaccatcaagagggggagatag

SEQ ID NO: 55228 - DNA, 744 bp, Artificial Sequence
  derived and/or modified sequence
atgactattctgtttttgactatggtgatatcatattttggctgcatgaaggccgcaccaatgaaggaagcaaatattaggggccaagggggactagcttatccaggagtgagaacccatggaacactggaatctgtgaatggaccgaaagctggatccagagggctgacatcactcgccgacacttttgagcacgtgatcgaagagttgctggacgaagaccagaaagtccggcctaacgaagaaaacaataaagacgctgacctgtacacttcccgtgttatgcttagcagtcaagtgcccttggaaccgcctttgctttttttgttggaagagtataaaaattatcttgacgccgctaatatgtccatgcgggtccgcagacacagcgacccggcacgtaggggcgaattaagcgtgtgcgattcaattagtgagtgggtgacggctgccgataaaaagaccgctgttgacatgtcaggaggcaccgtcactgtactagaaaaagtccccgtctcaaaggggcaacttaagcaatatttctatgagaccaagtgcaatccaatgggctacaccaaggaggggtgtagaggcattgataaaaggcattggaatagtcagtgtcggacaacacaatcttacgtgcgggctttaactatggacagtaagaaaagaatcggttggagatttattagaatcgacaccagctgcgtgtgcacactcactattaagcgcggtaggtag

SEQ ID NO: 55229 - DNA, 744 bp, Artificial Sequence
  derived and/or modified sequence
atgactatcctctttttaacaatggtgatttcctactttgggtgtatgaaggccgcaccaatgaaagaggctaatatcagagggcaaggaggcctggcctaccccggagtgcgaactcatggcaccttagaatctgtgaacgggcctaaggccggttccagaggcttgacatccctggcagacacatttgagcatgtgattgaggaacttctggatgaagaccaaaaagttcgaccaaacgaggagaacaacaaggacgctgatctctacacttctcgagtgatgctgtcctcacaggtccctctggagcctccgctcctgtttctgcttgaggaatataagaattatctggacgccgcaaacatgtccatgcgtgtcagacgacatagcgatcctgcacgacgtggggaactctcagtctgcgacagtattagtgagtgggtgactgctgctgacaaaaagacggctgtggatatgagtggaggaacagtcacggtgctcgagaaagtgcctgttagtaagggacagttaaaacaatacttttacgaaaccaagtgcaaccctatggggtatacaaaagaagggtgtagaggaatcgataaacgccactggaacagccaatgccgtactactcagtcttatgttcgggcactaaccatggactcaaagaaaagaataggctggcggtttattaggatagacacaagttgcgtgtgtaccctcaccatcaaaagaggcaggtag

SEQ ID NO: 55230 - DNA, 744 bp, Artificial Sequence
  derived and/or modified sequence
atgacgatattattcctcactatggtgattagttacttcggttgcatgaaggcagctcctatgaaagaggcaaatattaggggtcaaggcggattggcctacccaggggtccggacccatggaaccctggagtccgtgaacggcccaaaggctggctcaaggggactgacgtccctggctgacacgttcgaacacgtaatagaggaactgctggatgaggatcagaaggtacggccaaatgaggagaataataaggacgccgacctgtacacttcccgggtgatgttgtcttctcaagtgcctctggagccaccgctgttgtttctgctggaggagtacaagaattacctggatgcagcaaacatgtccatgcgggtgcggaggcactcagatcccgctcgcaggggtgagttgtccgtatgcgattcaattagtgagtgggtgaccgctgccgacaagaagactgctgtggacatgagcgggggtacggtgactgtgctggagaaggtgccagtgagcaagggacagctcaaacagtacttctatgagacgaaatgcaatccaatgggatataccaaggagggctgtcgcggtatagacaagcggcattggaacagccagtgccggaccacacagtcgtacgtcagggctctgaccatggacagtaaaaagcgtattggatggaggttcattaggattgacacatcatgtgtgtgcaccttaaccatcaagcgcggaagatag

SEQ ID NO: 55231 - DNA, 744 bp, Artificial Sequence
  derived and/or modified sequence
atgactattcttttcctgacgatggtcatatcttattttgggtgtatgaaggccgctccaatgaaggaagccaacatccggggtcaggggggtctggcataccctggtgtcagaacccatggtactctagagtcagtgaacgggcctaaagcagggtctcgcggactcacttcccttgccgacacgttcgaacacgtcattgaggagctcctagacgaggaccagaaagtccgcccaaacgaggaaaacaacaaggacgcggatctgtatacctcccgggtaatgctatcgagccaggttccactagagccgcctttactcttcctgctcgaagagtacaagaattatctcgacgccgcaaacatgtccatgcgcgtgcggagacattcagaccctgctaggcgcggagagctgagtgtctgcgacagcatctccgaatgggttaccgcagctgacaagaagactgccgttgacatgagtggcggaactgtaaccgttctggagaaagtcccagtgtccaaaggacaactaaagcagtacttctatgaaaccaagtgtaatccaatgggctacaccaaggagggatgtagaggcattgataaacgacactggaactcccagtgtagaacaactcagtcatacgtgcgcgctctgacaatggacagcaaaaagcggatcggatggagattcattcggatcgacacctcatgcgtgtgcactcttaccatcaaaagggggcgatag

SEQ ID NO: 55232 - DNA, 744 bp, Artificial Sequence
  derived and/or modified sequence
atgacgatactgtttttgacgatggtgatcagttacttcggctgcatgaaggccgcaccaatgaaagaggctaacattcgcggtcagggaggactcgcatatccaggagtgaggactcacggaaccctcgaatctgtgaacggccctaaggctgggtcccgcggactgactagcctggccgacacctttgagcacgtgatcgaggaactcctggacgaggatcagaaagtgaggccgaatgaagaaaacaacaaggatgccgatctttacacatcccgggtcatgctctcgtcccaggtccctttagaacccccactacttttcctccttgaggagtacaaaaattaccttgacgcagctaacatgtcaatgagagtgagaagacacagcgatccggctagaaggggggagctttcagtctgcgactccataagcgagtgggtaactgcagctgacaaaaagaccgccgtggatatgtcaggaggcacggtgactgttctcgaaaaggtcccggtgagtaagggtcagctcaagcaatacttttacgagaccaaatgcaatcccatgggatatactaaggaaggatgccgtgggattgataaaagacattggaattcccagtgtaggacaactcagagctacgtccgggctctgaccatggacagcaagaaaagaattgggtggcggttcattaggattgacacttcgtgtgtctgcacgctgaccattaagcgaggacgctag

SEQ ID NO: 55233 - DNA, 744 bp, Artificial Sequence
  derived and/or modified sequence
atgaccatcctcttcctgacaatggttatttcttactttggttgcatgaaggctgctcccatgaaggaggccaacatcagggggcaagggggactggcataccccggagtaagaacacacggcacactggaatccgtcaacgggccaaaagccggttcacgaggactcacatcactggcggacactttcgagcacgtcatagaagaactactagacgaggaccaaaaggtaaggcctaacgaggaaaacaacaaagatgccgatctgtacacttcccgcgtgatgttgtcttctcaggtccccctggagccaccactgttgtttttgctggaagagtacaaaaactatttggacgccgcaaatatgagcatgcgcgtgagaaggcactcagatccagcgaggaggggcgagcttagcgtctgcgacagcattagcgagtgggtaaccgccgctgataagaagaccgcagtggacatgtcaggaggaaccgttaccgtacttgagaaagtgccagtaagtaagggacaattaaaacagtacttctacgagaccaagtgtaaccctatgggatataccaaggaaggctgtagaggcatcgataagaggcattggaatagtcaatgtagaaccacccagtcatatgtgcgtgcactgactatggactccaagaaacggatcggctggcgattcattcgcatagacacgtcctgtgtttgtaccctgaccatcaagaggggcaggtag

SEQ ID NO: 55234 - DNA, 744 bp, Artificial Sequence
  derived and/or modified sequence
atgacgatcctgtttttgaccatggtcatctcctatttcggatgcatgaaggcagctccaatgaaagaggcaaacattcggggtcagggtgggttagcttaccccggagtgaggacacacggaactcttgaaagtgttaacggcccaaaagccggatcacggggactcacttcactggcagacactttcgaacacgtgatcgaggaactgttagatgaagaccaaaaggtgcggcctaatgaagaaaacaataaggatgctgatctgtacacctccagggtgatgctatccagccaggtccccctggaacctcctctgctttttttgcttgaggagtacaaaaactacctcgacgccgctaacatgagtatgcgagtccgcaggcacagcgaccccgctcggagaggagaactgtctgtgtgcgactcaatatccgaatgggtcacagccgcagataagaagacagcagtggatatgtccggaggcaccgtgacagtgctcgagaaagtcccagttagtaaggggcaactcaaacagtacttctatgaaactaaatgcaatcccatggggtatacgaaggaaggctgtaggggcatcgacaaacgacattggaactcccagtgtcggaccactcaaagctatgtgcgcgctctgaccatggacagcaagaaaaggatcggttggaggttcattaggatagatacctcctgcgtatgtaccctgacaattaagcggggaaggtag

SEQ ID NO: 55235 - DNA, 744 bp, Artificial Sequence
  derived and/or modified sequence
atgactatcctctttctaacaatggtgattagctatttcggctgtatgaaagcagcgccaatgaaggaagccaatatcagagggcagggaggccttgcttatcctggagtgagaacgcatggaacactggagtctgtcaacggcccaaaagccggatcaagggggcttacctctctggcggacacctttgaacacgtgatcgaagaactgttagacgaggaccagaaagtccgccctaacgaagagaataacaaagacgcagatctgtacacaagtagagtcatgctttcatcacaggttccgctggagccccctttgctcttcctccttgaggagtataaaaactacctcgatgctgccaatatgtcaatgcgagtccggagacatagcgatccagctagacgaggggaactctcagtctgcgattccatttctgagtgggtcacagcagccgacaagaagacggccgtagatatgtcagggggaactgtgactgtacttgaaaaagtcccagtgagtaaggggcaacttaagcagtacttctacgaaacgaaatgtaatcccatgggctataccaaagaagggtgccggggtattgataaaaggcactggaattctcagtgtaggactacccaatcatatgtccgcgcactaaccatggatagtaagaagcgtatcggctggcgtttcatccggatagacacatcttgtgtatgtactctcaccattaagagaggtcggtag

SEQ ID NO: 55236 - DNA, 744 bp, Artificial Sequence
  derived and/or modified sequence
atgaccattttgtttctcacgatggttattagctacttcggatgcatgaaagccgctccgatgaaggaagccaatattcgcggtcaaggaggtctcgcttatcccggagttagaacgcacggcaccctggaaagcgtgaacggacctaaggccggatcacgagggctgacttctctcgcggatacattcgagcacgtaatcgaggaactactggacgaggaccagaaggtgcgacctaacgaagagaataataaggatgcagatctgtataccagtagagtcatgctttcatcccaggtgcctttggagcctccattactgttcttattggaggaatacaagaactacttggatgcagcaaacatgtctatgagagtgagaagacactccgaccctgccaggcgaggggagctgtccgtctgcgattccatttctgaatgggtgactgccgctgacaaaaagaccgctgtggatatgtctggaggaaccgtgactgtgctggaaaaagtgccagtatccaagggacagcttaaacagtatttttacgagacaaaatgtaatcctatggggtatacgaaagaggggtgtcggggaatagacaagaggcattggaactcccagtgccggactactcagtcttatgttagagctctcacaatggactcaaagaagcggattggatggcgctttatcaggattgacacctcttgcgtttgcactttaactattaagaggggaagatag

SEQ ID NO: 55237 - DNA, 744 bp, Artificial Sequence
  derived and/or modified sequence
atgaccattctgtttcttaccatggtcatctcctactttgggtgtatgaaggccgcacccatgaaagaagctaacataaggggccaagggggtcttgcatacccaggggtgcgtacacacggtacccttgagtctgtcaacggacctaaagctggcagcagggggctgactagccttgccgatacgtttgagcacgtgatcgaagagttactggacgaggaccagaaagtgaggcccaacgaggagaataacaaggacgcggatctgtacacctctagggtgatgctctctagccaggtgcccctcgagcctccactgctgttcctgctggaggagtataagaattacttagacgccgctaacatgagtatgagggtccgccgacactccgaccccgcacggcgaggggaactctcagtctgcgacagtatcagcgagtgggttactgctgctgacaaaaagacagccgtcgatatgagcggtggcactgtgactgtgctggaaaaggtacccgtaagcaagggccaactgaagcagtacttctacgagactaagtgcaatcccatgggctacactaaagagggctgtagaggcatcgacaaacggcactggaacagccagtgcagaactacacagtcctatgtgagagcactaacaatggattctaaaaagcggatcggttggaggttcataagaatcgacacatcctgcgtgtgtacactcaccattaaacggggacgttag

SEQ ID NO: 55238 - DNA, 744 bp, Artificial Sequence
  derived and/or modified sequence
atgactatactgtttctgacaatggttattagttatttcggctgcatgaaagctgcaccaatgaaggaggccaacatccggggacaaggaggactcgcctaccctggcgtgcgcacacatggcaccctcgagtctgtgaatggcccaaaagccggtagtcgcggacttacctctttggctgatacatttgagcatgtcattgaggaattgttagacgaggaccagaaagttcgcccaaatgaagagaataacaaggatgccgacttgtacacatctcgcgttatgctttcctcgcaggtgccactggagcccccactactgtttttactggaagaatacaagaattacttggacgcggctaatatgtctatgcgcgtacgacggcactcagaccccgctcgcaggggtgaactttcggtgtgcgatagcatttccgaatgggtgacggcggcagacaagaagactgcagtggacatgtctggagggactgtaactgtgctcgaaaaggtgcctgtgtccaagggccaactgaagcagtatttttacgaaactaagtgtaatcctatgggatatacaaaggagggatgcagaggtattgataagagacactggaacagccagtgtaggaccacccagagttacgtgcgggcactgacgatggatagcaagaagaggatcggatggcgcttcattcggatcgatacaagctgtgtgtgcacattaaccattaagcgcggtcgttag

SEQ ID NO: 55239 - DNA, 744 bp, Artificial Sequence
  derived and/or modified sequence
atgaccattctctttctgactatggttatcagctatttcgggtgtatgaaggccgcacctatgaaggaggcgaacattcgtgggcaaggtgggctcgcatacccaggtgtccgcactcacggtaccctggagagcgtgaatggaccaaaggctgggagtagggggctgacatccctggctgacacattcgagcatgtcatcgaggagctcctggacgaagatcagaaggttaggcccaacgaggaaaataataaggatgctgatttgtatacctctcgggttatgttatcttcccaggtgccactggagcccccactgttgtttctgctggaggagtataagaactacctcgacgctgcgaacatgagtatgcgggttcgacgacactccgatccagcacggagaggcgagctgtccgtgtgtgattccatctcagagtgggtcacagccgctgataagaaaaccgccgtcgacatgtctgggggaactgtgacagttctggaaaaagtgcccgtcagcaagggacagctgaagcagtatttctacgaaacgaagtgtaacccaatggggtacaccaaagagggctgcagaggcattgacaagaggcattggaattcacagtgtaggaccacccaatcctacgtcagagctctcaccatggactctaaaaaaagaatcggctggcgtttcatccgcattgacaccagctgtgtgtgtactttaactatcaaacgcggacgttag

SEQ ID NO: 55240 - DNA, 744 bp, Artificial Sequence
  derived and/or modified sequence
atgacaattctcttcctgaccatggtgattagctactttggctgtatgaaggcagccccaatgaaggaggcaaatattcggggacagggaggtctcgcctatccaggcgttcgtacccacggcacattggagtccgtaaatggtcccaaagctggttcacgcggacttacttcactcgccgacactttcgaacacgtcatcgaagaactgctcgacgaggaccagaaagttaggcctaacgaggagaacaataaagatgcggatctttacacctcaagagtgatgttgtcaagccaggttcccctagaacctccgctgctgttcctgctcgaggagtataaaaactacttggacgcggctaacatgagcatgagagtgcggaggcactcagaccccgctagacgcggtgagttaagtgtctgtgactcaattagtgaatgggtaacagccgcagacaagaagactgctgttgatatgtctggaggcaccgtaacagttctcgaaaaagtccctgtctccaaggggcaacttaaacagtatttctacgagacgaagtgtaaccccatggggtatacgaaagagggctgcagagggatcgacaagcgccactggaatagtcagtgcaggactacacagtcctacgttagagctctcacgatggattctaaaaagagaatcggctggaggttcatccgcatcgatacctcatgcgtctgcacgctcactattaagaggggccgttag

SEQ ID NO: 55241 - DNA, 744 bp, Artificial Sequence
  derived and/or modified sequence
atgacaatcctttttctcaccatggtgatctcgtactttgggtgcatgaaggccgcaccaatgaaggaggctaatataagaggacaagggggattggcgtacccgggtgtcagaacacatggcactctcgaatcagtgaatgggcctaaggcgggttcaagggggctgacctctctggcagacacctttgagcatgtgatcgaggagttgctcgatgaagatcagaaggtcaggcccaacgaagagaataataaggacgccgacctatacaccagccgcgtgatgttgagttctcaggtacccctggaaccacctctgctcttcctgctcgaggaatataagaactaccttgacgctgccaacatgtccatgagggtgcgacgccacagcgatccggcaagacgcggagagctatccgtctgtgacagcatatcagagtgggtgacagccgcagataaaaagacagccgtggacatgtcaggagggacggtcacagttctggaaaaagttcctgtgtctaagggccagctcaagcagtacttctacgaaaccaagtgtaatccaatggggtatactaaggagggttgtaggggcatagataaacgccactggaatagtcagtgccgaacaacccagagttacgtgcgagcactcactatggactccaaaaaacggatcggttggcgcttcatccggatcgatacctcttgcgtctgtaccttaacaattaaacgtggacggtag

SEQ ID NO: 55242 - DNA, 4030 bp, Artificial Sequence
  derived and/or modified sequence
acccactttcccattcaccgcggagagggctgctctcgctgccgctccccccggcgaactagcatgaaatctccctgcctctgccgagatcaaatggagcttctcgctgatggggtgcgagtattacctccgccatgcaatttccactatcaataatttaacttctttgctgcagaacagaaggagtacataccgggcaccaaagactcgcgccccctcccccctttaattaagcgaagggaacgtgaaaaaataatagagtgtgggagttttggggccgaagtctttcccggagcagctgccttgatggttactttgacaagtagtgactgaaaagttccaccaggtgagaagagtgatgaccatccttttccttactatggttatttcatactttggttgcatgaaggctgcccccatgaaagaagcaaacatccgaggacaaggtggcttggcctacccaggtgtgcggacccatgggactctggagagcgtgaatgggcccaaggcaggttcaagaggcttgacatcattggctgacactttcgaacacgtgatagaagagctgttggatgaggaccagaaagttcggcccaatgaagaaaacaataaggacgcagacttgtacacgtccagggtgatgctcagtagtcaagtgcctttggagcctcctcttctctttctgctggaggaatacaaaaattacctagatgctgcaaacatgtccatgagggtccggcgccactctgaccctgcccgccgaggggagctgagcgtgtgtgacagtattagtgagtgggtaacggcagcagacaaaaagactgcagtggacatgtcgggcgggacggtcacagtccttgaaaaggtccctgtatcaaaaggccaactgaagcaatacttctacgagaccaagtgcaatcccatgggttacacaaaagaaggctgcaggggcatagacaaaaggcattggaactcccagtgccgaactacccagtcgtacgtgcgggcccttaccatggatagcaaaaagagaattggctggcgattcataaggatagacacttcttgtgtatgtacattgaccattaaaaggggaagatagtggatttatgttgtatagattagattatattgagacaaaaattatctatttgtatatatacataacagggtaaattattcagttaagaaaaaaataattttatgaactgcatgtataaatgaagtttatacagtacagtggttctacaatctatttattggacatgtccatgaccagaagggaaacagtcatttgcgcacaacttaaaaagtctgcattacattccttgataatgttgtggtttgttgccgttgccaagaactgaaaacataaaaagttaaaaaaaataataaattgcatgctgctttaattgtgaattgataataaactgtcctctttcagaaaacagaaaaaaaacacacacacacacaacaaaaatttgaaccaaaacattccgtttacattttagacagtaagtatcttcgttcttgttagtactatatctgttttactgcttttaacttctgatagcgttggaattaaaacaatgtcaaggtgctgttgtcattgctttactggcttaggggatgggggatggggggtatatttttgtttgttttgtgtttttttttcgtttgtttgttttgttttttagttcccacagggagtagagatggggaaagaattcctacaatatatattctggctgataaaagatacatttgtatgttgtgaagatgtttgcaatatcgatcagatgactagaaagtgaataaaaattaaggcaactgaacaaaaaaatgctcacactccacatcccgtgatgcacctcccaggccccgctcattctttgggcgttggtcagagtaagctgcttttgacggaaggacctatgtttgctcagaacacattctttccccccctccccctctggtctcctctttgttttgttttaaggaagaaaaatcagttgcgcgttctgaaatattttaccactgctgtgaacaagtgaacacattgtgtcacatcatgacactcgtataagcatggagaacagtgatttttttttagaacagaaaacaacaaaaaataaccccaaaatgaagattattttttatgaggagtgaacatttgggtaaatcatggctaagcttaaaaaaaactcatggtgaggcttaacaatgtcttgtaagcaaaaggtagagccctgtatcaacccagaaacacctagatcagaacaggaatccacattgccagtgacatgagactgaacagccaaatggaggctatgtggagttggcattgcatttaccggcagtgcgggaggaatttctgagtggccatcccaaggtctaggtggaggtggggcatggtatttgagacattccaaaacgaaggcctctgaaggacccttcagaggtggctctggaatgacatgtgtcaagctgcttggacctcgtgctttaagtgcctacattatctaactgtgctcaagaggttctcgactggaggaccacactcaagccgacttatgcccaccatcccacctctggataattttgcataaaattggattagcctggagcaggttgggagccaaatgtggcatttgtgatcatgagattgatgcaatgagatagaagatgtttgctacctgaacacttattgctttgaaactagacttgaggaaaccagggtttatcttttgagaacttttggtaagggaaaagggaacaggaaaagaaaccccaaactcaggccgaatgatcaaggggacccataggaaatcttgtccagagacaagacttcgggaaggtgtctggacattcagaacaccaagacttgaaggtgccttgctcaatggaagaggccaggacagagctgacaaaattttgctccccagtgaaggccacagcaaccttctgcccatcctgtctgttcatggagagggtccctgcctcacctctgccattttgggttaggagaagtcaagttgggagcctgaaatagtggttcttggaaaaatggatccccagtgaaaactagagctctaagcccattcagcccatttcacacctgaaaatgttagtgatcaccacttggaccagcatccttaagtatcagaaagccccaagcaattgctgcatcttagtagggtgagggataagcaaaagaggatgttcaccataacccaggaatgaagataccatcagcaaagaatttcaatttgttcagtctttcatttagagctagtctttcacagtaccatctgaatacctctttgaaagaaggaagactttacgtagtgtagatttgttttgtgttgtttgaaaatattatctttgtaattatttttaatatgtaaggaatgcttggaatatctgctgtatgtcaactttatgcagcttccttttgagggacaaatttaaaacaaacaaccccccatcacaaacttaaaggattgcaagggccagatctgttaagtggtttcataggagacacatccagcaattgtgtggtcagtggctcttttacccaataagatacatcacagtcacatgcttgatggtttatgttgacctaagatttattttgttaaaatctctctctgttgtgttcgttcttgttctgttttgttttgttttttaaagtcttgctgtggtctctttgtggcagaagtgtttcatgcatggcagcaggcctgttgcttttttatggcgattcccattgaaaatgtaagtaaatgtctgtggccttgttctctctatggtaaagatattattcaccatgtaaaacaaaaaacaatatttattgtattttagtatatttatataattatgttattgaaaaaaattggcattaaaacttaaccgcatcagaagcctattgtaaatacaagttctatttaagtgtactaattaacatataatatatgttttaaatatagaatttttaatgtttttaaatatattttcaaagtacataaaa

SEQ ID NO: 55243 - DNA, 4071 bp, Artificial Sequence
  derived and/or modified sequence
gtgtgtaatccgggcgataggagtccattcagcaccttggacagagccaacggatttgtccgaggtggcggtacccccaggtagtcttcttggccccgctgtaaagccaaccctgtgtcgcccttaaaaagcgtcttttctgaggttcggctcacactgagatcggggctggagagagagtcagattttggagcggagcgtttggaaagcgagccccagtttggtcccctcattgagctcgctgaagttggcttcctagcggtgtaggctggaatagactcttggcaagctccgggttggtatactgggttaactttgggaaatgcaagtgtttatctccaggatctagccaccggggtggtgtaagccgcaaagaagttccaccaggtgagaagagtgatgaccatccttttccttactatggttatttcatactttggttgcatgaaggctgcccccatgaaagaagcaaacatccgaggacaaggtggcttggcctacccaggtgtgcggacccatgggactctggagagcgtgaatgggcccaaggcaggttcaagaggcttgacatcattggctgacactttcgaacacgtgatagaagagctgttggatgaggaccagaaagttcggcccaatgaagaaaacaataaggacgcagacttgtacacgtccagggtgatgctcagtagtcaagtgcctttggagcctcctcttctctttctgctggaggaatacaaaaattacctagatgctgcaaacatgtccatgagggtccggcgccactctgaccctgcccgccgaggggagctgagcgtgtgtgacagtattagtgagtgggtaacggcagcagacaaaaagactgcagtggacatgtcgggcgggacggtcacagtccttgaaaaggtccctgtatcaaaaggccaactgaagcaatacttctacgagaccaagtgcaatcccatgggttacacaaaagaaggctgcaggggcatagacaaaaggcattggaactcccagtgccgaactacccagtcgtacgtgcgggcccttaccatggatagcaaaaagagaattggctggcgattcataaggatagacacttcttgtgtatgtacattgaccattaaaaggggaagatagtggatttatgttgtatagattagattatattgagacaaaaattatctatttgtatatatacataacagggtaaattattcagttaagaaaaaaataattttatgaactgcatgtataaatgaagtttatacagtacagtggttctacaatctatttattggacatgtccatgaccagaagggaaacagtcatttgcgcacaacttaaaaagtctgcattacattccttgataatgttgtggtttgttgccgttgccaagaactgaaaacataaaaagttaaaaaaaataataaattgcatgctgctttaattgtgaattgataataaactgtcctctttcagaaaacagaaaaaaaacacacacacacacaacaaaaatttgaaccaaaacattccgtttacattttagacagtaagtatcttcgttcttgttagtactatatctgttttactgcttttaacttctgatagcgttggaattaaaacaatgtcaaggtgctgttgtcattgctttactggcttaggggatgggggatggggggtatatttttgtttgttttgtgtttttttttcgtttgtttgttttgttttttagttcccacagggagtagagatggggaaagaattcctacaatatatattctggctgataaaagatacatttgtatgttgtgaagatgtttgcaatatcgatcagatgactagaaagtgaataaaaattaaggcaactgaacaaaaaaatgctcacactccacatcccgtgatgcacctcccaggccccgctcattctttgggcgttggtcagagtaagctgcttttgacggaaggacctatgtttgctcagaacacattctttccccccctccccctctggtctcctctttgttttgttttaaggaagaaaaatcagttgcgcgttctgaaatattttaccactgctgtgaacaagtgaacacattgtgtcacatcatgacactcgtataagcatggagaacagtgatttttttttagaacagaaaacaacaaaaaataaccccaaaatgaagattattttttatgaggagtgaacatttgggtaaatcatggctaagcttaaaaaaaactcatggtgaggcttaacaatgtcttgtaagcaaaaggtagagccctgtatcaacccagaaacacctagatcagaacaggaatccacattgccagtgacatgagactgaacagccaaatggaggctatgtggagttggcattgcatttaccggcagtgcgggaggaatttctgagtggccatcccaaggtctaggtggaggtggggcatggtatttgagacattccaaaacgaaggcctctgaaggacccttcagaggtggctctggaatgacatgtgtcaagctgcttggacctcgtgctttaagtgcctacattatctaactgtgctcaagaggttctcgactggaggaccacactcaagccgacttatgcccaccatcccacctctggataattttgcataaaattggattagcctggagcaggttgggagccaaatgtggcatttgtgatcatgagattgatgcaatgagatagaagatgtttgctacctgaacacttattgctttgaaactagacttgaggaaaccagggtttatcttttgagaacttttggtaagggaaaagggaacaggaaaagaaaccccaaactcaggccgaatgatcaaggggacccataggaaatcttgtccagagacaagacttcgggaaggtgtctggacattcagaacaccaagacttgaaggtgccttgctcaatggaagaggccaggacagagctgacaaaattttgctccccagtgaaggccacagcaaccttctgcccatcctgtctgttcatggagagggtccctgcctcacctctgccattttgggttaggagaagtcaagttgggagcctgaaatagtggttcttggaaaaatggatccccagtgaaaactagagctctaagcccattcagcccatttcacacctgaaaatgttagtgatcaccacttggaccagcatccttaagtatcagaaagccccaagcaattgctgcatcttagtagggtgagggataagcaaaagaggatgttcaccataacccaggaatgaagataccatcagcaaagaatttcaatttgttcagtctttcatttagagctagtctttcacagtaccatctgaatacctctttgaaagaaggaagactttacgtagtgtagatttgttttgtgttgtttgaaaatattatctttgtaattatttttaatatgtaaggaatgcttggaatatctgctgtatgtcaactttatgcagcttccttttgagggacaaatttaaaacaaacaaccccccatcacaaacttaaaggattgcaagggccagatctgttaagtggtttcataggagacacatccagcaattgtgtggtcagtggctcttttacccaataagatacatcacagtcacatgcttgatggtttatgttgacctaagatttattttgttaaaatctctctctgttgtgttcgttcttgttctgttttgttttgttttttaaagtcttgctgtggtctctttgtggcagaagtgtttcatgcatggcagcaggcctgttgcttttttatggcgattcccattgaaaatgtaagtaaatgtctgtggccttgttctctctatggtaaagatattattcaccatgtaaaacaaaaaacaatatttattgtattttagtatatttatataattatgttattgaaaaaaattggcattaaaacttaaccgcatcagaagcctattgtaaatacaagttctatttaagtgtactaattaacatataatatatgttttaaatatagaatttttaatgtttttaaatatattttcaaagtacataaaa

SEQ ID NO: 55244 - DNA, 3776 bp, Artificial Sequence
  derived and/or modified sequence
gtaaaccaatagcccccatgctctgtgcgatttcattgtgtgctcgcgttcgcaagctccgtagtgcaggaaggtgcgggaagttccaccaggtgagaagagtgatgaccatccttttccttactatggttatttcatactttggttgcatgaaggctgcccccatgaaagaagcaaacatccgaggacaaggtggcttggcctacccaggtgtgcggacccatgggactctggagagcgtgaatgggcccaaggcaggttcaagaggcttgacatcattggctgacactttcgaacacgtgatagaagagctgttggatgaggaccagaaagttcggcccaatgaagaaaacaataaggacgcagacttgtacacgtccagggtgatgctcagtagtcaagtgcctttggagcctcctcttctctttctgctggaggaatacaaaaattacctagatgctgcaaacatgtccatgagggtccggcgccactctgaccctgcccgccgaggggagctgagcgtgtgtgacagtattagtgagtgggtaacggcagcagacaaaaagactgcagtggacatgtcgggcgggacggtcacagtccttgaaaaggtccctgtatcaaaaggccaactgaagcaatacttctacgagaccaagtgcaatcccatgggttacacaaaagaaggctgcaggggcatagacaaaaggcattggaactcccagtgccgaactacccagtcgtacgtgcgggcccttaccatggatagcaaaaagagaattggctggcgattcataaggatagacacttcttgtgtatgtacattgaccattaaaaggggaagatagtggatttatgttgtatagattagattatattgagacaaaaattatctatttgtatatatacataacagggtaaattattcagttaagaaaaaaataattttatgaactgcatgtataaatgaagtttatacagtacagtggttctacaatctatttattggacatgtccatgaccagaagggaaacagtcatttgcgcacaacttaaaaagtctgcattacattccttgataatgttgtggtttgttgccgttgccaagaactgaaaacataaaaagttaaaaaaaataataaattgcatgctgctttaattgtgaattgataataaactgtcctctttcagaaaacagaaaaaaaacacacacacacacaacaaaaatttgaaccaaaacattccgtttacattttagacagtaagtatcttcgttcttgttagtactatatctgttttactgcttttaacttctgatagcgttggaattaaaacaatgtcaaggtgctgttgtcattgctttactggcttaggggatgggggatggggggtatatttttgtttgttttgtgtttttttttcgtttgtttgttttgttttttagttcccacagggagtagagatggggaaagaattcctacaatatatattctggctgataaaagatacatttgtatgttgtgaagatgtttgcaatatcgatcagatgactagaaagtgaataaaaattaaggcaactgaacaaaaaaatgctcacactccacatcccgtgatgcacctcccaggccccgctcattctttgggcgttggtcagagtaagctgcttttgacggaaggacctatgtttgctcagaacacattctttccccccctccccctctggtctcctctttgttttgttttaaggaagaaaaatcagttgcgcgttctgaaatattttaccactgctgtgaacaagtgaacacattgtgtcacatcatgacactcgtataagcatggagaacagtgatttttttttagaacagaaaacaacaaaaaataaccccaaaatgaagattattttttatgaggagtgaacatttgggtaaatcatggctaagcttaaaaaaaactcatggtgaggcttaacaatgtcttgtaagcaaaaggtagagccctgtatcaacccagaaacacctagatcagaacaggaatccacattgccagtgacatgagactgaacagccaaatggaggctatgtggagttggcattgcatttaccggcagtgcgggaggaatttctgagtggccatcccaaggtctaggtggaggtggggcatggtatttgagacattccaaaacgaaggcctctgaaggacccttcagaggtggctctggaatgacatgtgtcaagctgcttggacctcgtgctttaagtgcctacattatctaactgtgctcaagaggttctcgactggaggaccacactcaagccgacttatgcccaccatcccacctctggataattttgcataaaattggattagcctggagcaggttgggagccaaatgtggcatttgtgatcatgagattgatgcaatgagatagaagatgtttgctacctgaacacttattgctttgaaactagacttgaggaaaccagggtttatcttttgagaacttttggtaagggaaaagggaacaggaaaagaaaccccaaactcaggccgaatgatcaaggggacccataggaaatcttgtccagagacaagacttcgggaaggtgtctggacattcagaacaccaagacttgaaggtgccttgctcaatggaagaggccaggacagagctgacaaaattttgctccccagtgaaggccacagcaaccttctgcccatcctgtctgttcatggagagggtccctgcctcacctctgccattttgggttaggagaagtcaagttgggagcctgaaatagtggttcttggaaaaatggatccccagtgaaaactagagctctaagcccattcagcccatttcacacctgaaaatgttagtgatcaccacttggaccagcatccttaagtatcagaaagccccaagcaattgctgcatcttagtagggtgagggataagcaaaagaggatgttcaccataacccaggaatgaagataccatcagcaaagaatttcaatttgttcagtctttcatttagagctagtctttcacagtaccatctgaatacctctttgaaagaaggaagactttacgtagtgtagatttgttttgtgttgtttgaaaatattatctttgtaattatttttaatatgtaaggaatgcttggaatatctgctgtatgtcaactttatgcagcttccttttgagggacaaatttaaaacaaacaaccccccatcacaaacttaaaggattgcaagggccagatctgttaagtggtttcataggagacacatccagcaattgtgtggtcagtggctcttttacccaataagatacatcacagtcacatgcttgatggtttatgttgacctaagatttattttgttaaaatctctctctgttgtgttcgttcttgttctgttttgttttgttttttaaagtcttgctgtggtctctttgtggcagaagtgtttcatgcatggcagcaggcctgttgcttttttatggcgattcccattgaaaatgtaagtaaatgtctgtggccttgttctctctatggtaaagatattattcaccatgtaaaacaaaaaacaatatttattgtattttagtatatttatataattatgttattgaaaaaaattggcattaaaacttaaccgcatcagaagcctattgtaaatacaagttctatttaagtgtactaattaacatataatatatgttttaaatatagaatttttaatgtttttaaatatattttcaaagtacataaaa

SEQ ID NO: 55245 - protein, 329 aa, Artificial Sequence
  derived and/or modified sequence
MCGATSFLHECTRLILVTTQNAEFLQKGLQVHTCFGVYPHASVWHDCASQKKGCAVYLHVSVEFNKLIPENGFIKFHQVRRVMTILFLTMVISYFGCMKAAPMKEANIRGQGGLAYPGVRTHGTLESVNGPKAGSRGLTSLADTFEHVIEELLDEDQKVRPNEENNKDADLYTSRVMLSSQVPLEPPLLFLLEEYKNYLDAANMSMRVRRHSDPARRGELSVCDSISEWVTAADKKTAVDMSGGTVTVLEKVPVSKGQLKQYFYETKCNPMGYTKEGCRGIDKRHWNSQCRTTQSYVRALTMDSKKRIGWRFIRIDTSCVCTLTIKRGR

SEQ ID NO: 55246 - protein, 77 aa, Artificial Sequence
  derived and/or modified sequence
MCGATSFLHECTRLILVTTQNAEFLQKGLQVHTCFGVYPHASVWHDCASQKKGCAVYLHVSVEFNKLIPENGFIKGW

SEQ ID NO: 55247 - DNA, 990 bp, Artificial Sequence
  derived and/or modified sequence
atgtgcggcgccaccagcttcctgcacgagtgcaccagactgatcctggtgaccacccagaacgccgagttcctgcagaagggcctgcaggtgcacacctgcttcggcgtgtacccccacgccagcgtgtggcacgactgcgccagccagaagaagggctgcgccgtgtacctgcacgtgagcgtggagttcaacaagctgatccccgagaacggcttcatcaagttccaccaggtgagaagagtgatgaccatcctgttcctgaccatggtgatcagctacttcggctgcatgaaggccgcccccatgaaggaggccaacatcagaggccagggcggcctggcctaccccggcgtgagaacccacggcaccctggagagcgtgaacggccccaaggccggcagcagaggcctgaccagcctggccgacaccttcgagcacgtgatcgaggagctgctggacgaggaccagaaggtgagacccaacgaggagaacaacaaggacgccgacctgtacaccagcagagtgatgctgagcagccaggtgcccctggagccccccctgctgttcctgctggaggagtacaagaactacctggacgccgccaacatgagcatgagagtgagaagacacagcgaccccgccagaagaggcgagctgagcgtgtgcgacagcatcagcgagtgggtgaccgccgccgacaagaagaccgccgtggacatgagcggcggcaccgtgaccgtgctggagaaggtgcccgtgagcaagggccagctgaagcagtacttctacgagaccaagtgcaaccccatgggctacaccaaggagggctgcagaggcatcgacaagagacactggaacagccagtgcagaaccacccagagctacgtgagagccctgaccatggacagcaagaagagaatcggctggagattcatcagaatcgacaccagctgcgtgtgcaccctgaccatcaagagaggcagatag

SEQ ID NO: 55248 - DNA, 234 bp, Artificial Sequence
  derived and/or modified sequence
atgtgcggcgccaccagcttcctgcacgagtgcaccagactgatcctggtgaccacccagaacgccgagttcctgcagaagggcctgcaggtgcacacctgcttcggcgtgtacccccacgccagcgtgtggcacgactgcgccagccagaagaagggctgcgccgtgtacctgcacgtgagcgtggagttcaacaagctgatccccgagaacggcttcatcaagggctggtag

SEQ ID NO: 55249 - DNA, 4176 bp, Artificial Sequence
  derived and/or modified sequence
gtaaaccaatagcccccatgctctgtgcgatttcattgtgtgctcgcgttcgcaagctccgtagtgcaggaaggtgcgggaagttaagtaattaaaagaaattatagagtgggatgcaaaaataacccgaaggacaactggatgtgtggagccaccagttttctccatgagtgcacaaggttaatccttgttactactcagaatgctgagtttctacagaaagggttgcaggtccacacatgttttggcgtctacccacacgcttctgtatggcatgactgtgcatcccagaagaagggctgtgctgtgtacctccacgtttcagtggaatttaacaaactgatccctgaaaatggtttcataaagggatggtaataaagtctcttagtggttgaaaatgttatttcttacaaaagtggagaacatttgcttttcaataccagagttttcagccatttctgcattctgacctattgactggagttccaccaggtgagaagagtgatgaccatccttttccttactatggttatttcatactttggttgcatgaaggctgcccccatgaaagaagcaaacatccgaggacaaggtggcttggcctacccaggtgtgcggacccatgggactctggagagcgtgaatgggcccaaggcaggttcaagaggcttgacatcattggctgacactttcgaacacgtgatagaagagctgttggatgaggaccagaaagttcggcccaatgaagaaaacaataaggacgcagacttgtacacgtccagggtgatgctcagtagtcaagtgcctttggagcctcctcttctctttctgctggaggaatacaaaaattacctagatgctgcaaacatgtccatgagggtccggcgccactctgaccctgcccgccgaggggagctgagcgtgtgtgacagtattagtgagtgggtaacggcagcagacaaaaagactgcagtggacatgtcgggcgggacggtcacagtccttgaaaaggtccctgtatcaaaaggccaactgaagcaatacttctacgagaccaagtgcaatcccatgggttacacaaaagaaggctgcaggggcatagacaaaaggcattggaactcccagtgccgaactacccagtcgtacgtgcgggcccttaccatggatagcaaaaagagaattggctggcgattcataaggatagacacttcttgtgtatgtacattgaccattaaaaggggaagatagtggatttatgttgtatagattagattatattgagacaaaaattatctatttgtatatatacataacagggtaaattattcagttaagaaaaaaataattttatgaactgcatgtataaatgaagtttatacagtacagtggttctacaatctatttattggacatgtccatgaccagaagggaaacagtcatttgcgcacaacttaaaaagtctgcattacattccttgataatgttgtggtttgttgccgttgccaagaactgaaaacataaaaagttaaaaaaaataataaattgcatgctgctttaattgtgaattgataataaactgtcctctttcagaaaacagaaaaaaaacacacacacacacaacaaaaatttgaaccaaaacattccgtttacattttagacagtaagtatcttcgttcttgttagtactatatctgttttactgcttttaacttctgatagcgttggaattaaaacaatgtcaaggtgctgttgtcattgctttactggcttaggggatgggggatggggggtatatttttgtttgttttgtgtttttttttcgtttgtttgttttgttttttagttcccacagggagtagagatggggaaagaattcctacaatatatattctggctgataaaagatacatttgtatgttgtgaagatgtttgcaatatcgatcagatgactagaaagtgaataaaaattaaggcaactgaacaaaaaaatgctcacactccacatcccgtgatgcacctcccaggccccgctcattctttgggcgttggtcagagtaagctgcttttgacggaaggacctatgtttgctcagaacacattctttccccccctccccctctggtctcctctttgttttgttttaaggaagaaaaatcagttgcgcgttctgaaatattttaccactgctgtgaacaagtgaacacattgtgtcacatcatgacactcgtataagcatggagaacagtgatttttttttagaacagaaaacaacaaaaaataaccccaaaatgaagattattttttatgaggagtgaacatttgggtaaatcatggctaagcttaaaaaaaactcatggtgaggcttaacaatgtcttgtaagcaaaaggtagagccctgtatcaacccagaaacacctagatcagaacaggaatccacattgccagtgacatgagactgaacagccaaatggaggctatgtggagttggcattgcatttaccggcagtgcgggaggaatttctgagtggccatcccaaggtctaggtggaggtggggcatggtatttgagacattccaaaacgaaggcctctgaaggacccttcagaggtggctctggaatgacatgtgtcaagctgcttggacctcgtgctttaagtgcctacattatctaactgtgctcaagaggttctcgactggaggaccacactcaagccgacttatgcccaccatcccacctctggataattttgcataaaattggattagcctggagcaggttgggagccaaatgtggcatttgtgatcatgagattgatgcaatgagatagaagatgtttgctacctgaacacttattgctttgaaactagacttgaggaaaccagggtttatcttttgagaacttttggtaagggaaaagggaacaggaaaagaaaccccaaactcaggccgaatgatcaaggggacccataggaaatcttgtccagagacaagacttcgggaaggtgtctggacattcagaacaccaagacttgaaggtgccttgctcaatggaagaggccaggacagagctgacaaaattttgctccccagtgaaggccacagcaaccttctgcccatcctgtctgttcatggagagggtccctgcctcacctctgccattttgggttaggagaagtcaagttgggagcctgaaatagtggttcttggaaaaatggatccccagtgaaaactagagctctaagcccattcagcccatttcacacctgaaaatgttagtgatcaccacttggaccagcatccttaagtatcagaaagccccaagcaattgctgcatcttagtagggtgagggataagcaaaagaggatgttcaccataacccaggaatgaagataccatcagcaaagaatttcaatttgttcagtctttcatttagagctagtctttcacagtaccatctgaatacctctttgaaagaaggaagactttacgtagtgtagatttgttttgtgttgtttgaaaatattatctttgtaattatttttaatatgtaaggaatgcttggaatatctgctgtatgtcaactttatgcagcttccttttgagggacaaatttaaaacaaacaaccccccatcacaaacttaaaggattgcaagggccagatctgttaagtggtttcataggagacacatccagcaattgtgtggtcagtggctcttttacccaataagatacatcacagtcacatgcttgatggtttatgttgacctaagatttattttgttaaaatctctctctgttgtgttcgttcttgttctgttttgttttgttttttaaagtcttgctgtggtctctttgtggcagaagtgtttcatgcatggcagcaggcctgttgcttttttatggcgattcccattgaaaatgtaagtaaatgtctgtggccttgttctctctatggtaaagatattattcaccatgtaaaacaaaaaacaatatttattgtattttagtatatttatataattatgttattgaaaaaaattggcattaaaacttaaccgcatcagaagcctattgtaaatacaagttctatttaagtgtactaattaacatataatatatgttttaaatatagaatttttaatgtttttaaatatattttcaaagtacataaaa

SEQ ID NO: 55250 - DNA, 4059 bp, Artificial Sequence
  derived and/or modified sequence
gtaaaccaatagcccccatgctctgtgcgatttcattgtgtgctcgcgttcgcaagctccgtagtgcaggaaggtgcgggaagttaagtaattaaaagaaattatagagtgggatgcaaaaataacccgaaggacaactggatgtgtggagccaccagttttctccatgagtgcacaaggttaatccttgttactactcagaatgctgagtttctacagaaagggttgcaggtccacacatgttttggcgtctacccacacgcttctgtatggcatgactgtgcatcccagaagaagggctgtgctgtgtacctccacgtttcagtggaatttaacaaactgatccctgaaaatggtttcataaagttccaccaggtgagaagagtgatgaccatccttttccttactatggttatttcatactttggttgcatgaaggctgcccccatgaaagaagcaaacatccgaggacaaggtggcttggcctacccaggtgtgcggacccatgggactctggagagcgtgaatgggcccaaggcaggttcaagaggcttgacatcattggctgacactttcgaacacgtgatagaagagctgttggatgaggaccagaaagttcggcccaatgaagaaaacaataaggacgcagacttgtacacgtccagggtgatgctcagtagtcaagtgcctttggagcctcctcttctctttctgctggaggaatacaaaaattacctagatgctgcaaacatgtccatgagggtccggcgccactctgaccctgcccgccgaggggagctgagcgtgtgtgacagtattagtgagtgggtaacggcagcagacaaaaagactgcagtggacatgtcgggcgggacggtcacagtccttgaaaaggtccctgtatcaaaaggccaactgaagcaatacttctacgagaccaagtgcaatcccatgggttacacaaaagaaggctgcaggggcatagacaaaaggcattggaactcccagtgccgaactacccagtcgtacgtgcgggcccttaccatggatagcaaaaagagaattggctggcgattcataaggatagacacttcttgtgtatgtacattgaccattaaaaggggaagatagtggatttatgttgtatagattagattatattgagacaaaaattatctatttgtatatatacataacagggtaaattattcagttaagaaaaaaataattttatgaactgcatgtataaatgaagtttatacagtacagtggttctacaatctatttattggacatgtccatgaccagaagggaaacagtcatttgcgcacaacttaaaaagtctgcattacattccttgataatgttgtggtttgttgccgttgccaagaactgaaaacataaaaagttaaaaaaaataataaattgcatgctgctttaattgtgaattgataataaactgtcctctttcagaaaacagaaaaaaaacacacacacacacaacaaaaatttgaaccaaaacattccgtttacattttagacagtaagtatcttcgttcttgttagtactatatctgttttactgcttttaacttctgatagcgttggaattaaaacaatgtcaaggtgctgttgtcattgctttactggcttaggggatgggggatggggggtatatttttgtttgttttgtgtttttttttcgtttgtttgttttgttttttagttcccacagggagtagagatggggaaagaattcctacaatatatattctggctgataaaagatacatttgtatgttgtgaagatgtttgcaatatcgatcagatgactagaaagtgaataaaaattaaggcaactgaacaaaaaaatgctcacactccacatcccgtgatgcacctcccaggccccgctcattctttgggcgttggtcagagtaagctgcttttgacggaaggacctatgtttgctcagaacacattctttccccccctccccctctggtctcctctttgttttgttttaaggaagaaaaatcagttgcgcgttctgaaatattttaccactgctgtgaacaagtgaacacattgtgtcacatcatgacactcgtataagcatggagaacagtgatttttttttagaacagaaaacaacaaaaaataaccccaaaatgaagattattttttatgaggagtgaacatttgggtaaatcatggctaagcttaaaaaaaactcatggtgaggcttaacaatgtcttgtaagcaaaaggtagagccctgtatcaacccagaaacacctagatcagaacaggaatccacattgccagtgacatgagactgaacagccaaatggaggctatgtggagttggcattgcatttaccggcagtgcgggaggaatttctgagtggccatcccaaggtctaggtggaggtggggcatggtatttgagacattccaaaacgaaggcctctgaaggacccttcagaggtggctctggaatgacatgtgtcaagctgcttggacctcgtgctttaagtgcctacattatctaactgtgctcaagaggttctcgactggaggaccacactcaagccgacttatgcccaccatcccacctctggataattttgcataaaattggattagcctggagcaggttgggagccaaatgtggcatttgtgatcatgagattgatgcaatgagatagaagatgtttgctacctgaacacttattgctttgaaactagacttgaggaaaccagggtttatcttttgagaacttttggtaagggaaaagggaacaggaaaagaaaccccaaactcaggccgaatgatcaaggggacccataggaaatcttgtccagagacaagacttcgggaaggtgtctggacattcagaacaccaagacttgaaggtgccttgctcaatggaagaggccaggacagagctgacaaaattttgctccccagtgaaggccacagcaaccttctgcccatcctgtctgttcatggagagggtccctgcctcacctctgccattttgggttaggagaagtcaagttgggagcctgaaatagtggttcttggaaaaatggatccccagtgaaaactagagctctaagcccattcagcccatttcacacctgaaaatgttagtgatcaccacttggaccagcatccttaagtatcagaaagccccaagcaattgctgcatcttagtagggtgagggataagcaaaagaggatgttcaccataacccaggaatgaagataccatcagcaaagaatttcaatttgttcagtctttcatttagagctagtctttcacagtaccatctgaatacctctttgaaagaaggaagactttacgtagtgtagatttgttttgtgttgtttgaaaatattatctttgtaattatttttaatatgtaaggaatgcttggaatatctgctgtatgtcaactttatgcagcttccttttgagggacaaatttaaaacaaacaaccccccatcacaaacttaaaggattgcaagggccagatctgttaagtggtttcataggagacacatccagcaattgtgtggtcagtggctcttttacccaataagatacatcacagtcacatgcttgatggtttatgttgacctaagatttattttgttaaaatctctctctgttgtgttcgttcttgttctgttttgttttgttttttaaagtcttgctgtggtctctttgtggcagaagtgtttcatgcatggcagcaggcctgttgcttttttatggcgattcccattgaaaatgtaagtaaatgtctgtggccttgttctctctatggtaaagatattattcaccatgtaaaacaaaaaacaatatttattgtattttagtatatttatataattatgttattgaaaaaaattggcattaaaacttaaccgcatcagaagcctattgtaaatacaagttctatttaagtgtactaattaacatataatatatgttttaaatatagaatttttaatgtttttaaatatattttcaaagtacataaaa

SEQ ID NO: 55251 - DNA, 990 bp, Artificial Sequence
  derived and/or modified sequence
atgtgcggggccactagcttcttgcatgaatgtaccaggttaattctcgtgacgacgcagaatgctgagttcttgcagaagggtctccaagtccacacttgctttggggtgtacccacacgccagtgtgtggcatgattgcgcctctcagaaaaaggggtgcgccgtatatctacacgttagcgtggaattcaacaagctgatccctgaaaatggctttattaaatttcatcaagtccggcgagtgatgaccatcctctttttaacaatggttattagctattttgggtgcatgaaagctgccccaatgaaggaggccaacatccggggtcagggcggtctggcatacccaggtgtgagaacccacggtactcttgagtcagtgaacggccctaaggctggatcccgcggtctgactagcttagctgatacattcgagcatgtcatcgaagaattattagacgaggaccagaaagtcagaccaaatgaagaaaacaataaagatgcagatctgtatactagtcgcgtcatgttgagctctcaggttcccctcgagcctccgctcttattcctgttggaggagtataagaactacttagatgctgctaatatgagcatgcgggtgagaagacacagtgatccggctcgaaggggcgaactctcagtgtgtgattctattagcgagtgggttactgctgctgacaagaaaactgccgtggatatgtccggaggcactgtaaccgtgctagagaaggtgcctgtctcaaagggacagcttaagcaatacttctatgaaaccaagtgtaatcccatgggatacacgaaggagggctgcaggggtatagataaacgccattggaactctcagtgtaggaccacccagtcttacgttcgcgcgcttaccatggatagtaagaagaggataggctggaggttcattcgaatagacactagctgcgtctgtactctgaccattaagaggggccgctag

SEQ ID NO: 55252 - DNA, 234 bp, Artificial Sequence
  derived and/or modified sequence
atgtgcggcgctacctccttcctacatgaatgtacgcgcctgatcctggtaaccactcagaacgcggaatttcttcaaaagggcctgcaggtgcatacctgttttggagtttatcctcatgcaagcgtttggcacgactgtgcttcacagaagaaagggtgcgcggtatacctccatgtttcagttgagttcaacaagttaatccctgagaacggttttatcaagggctggtag

SEQ ID NO: 55253 - DNA, 990 bp, Artificial Sequence
  derived and/or modified sequence
atgtgtggggccaccagcttcctgcacgagtgcaccaggctcatcctggtgaccacccagaatgctgagttcctgcagaagggcctgcaggtgcacacctgctttggagtgtacccccacgcctctgtgtggcatgactgtgccagccagaagaagggctgtgctgtgtacctgcacgtgtctgtggagttcaacaagctgatcccagaaaatggcttcatcaagttccaccaggtgcggcgggtgatgaccatcctcttcctgaccatggtgatctcctacttcggctgcatgaaggccgcccccatgaaggaggccaacatccggggccagggcggcctggcctacccaggagtgaggacccacggcaccctggagagcgtgaatggccccaaggccggcagccggggcctgaccagcctggccgacacctttgaacatgtgattgaggagctgctggatgaggaccagaaggtgcggcccaatgaggagaacaacaaggatgctgacctgtacaccagccgggtgatgctgagcagccaggtgcccctggagccccccctgctcttcctgctggaggagtacaagaactacctggatgctgccaacatgtccatgagggtgagaagacacagcgaccctgcccggcggggggagctgtctgtgtgtgacagcatcagcgagtgggtgacagctgctgacaagaagacagctgtggacatgtctgggggcaccgtgacagtgctggagaaggtgcctgtgtccaagggccagctgaagcagtacttctatgagaccaagtgcaaccccatgggctacaccaaggagggctgccggggcatcgacaagaggcactggaacagccagtgcaggaccacccagagctatgtgcgggccctgaccatggacagcaagaagagaattggctggaggttcatcagaattgacaccagctgtgtgtgcaccctgaccatcaagagaggaagatag

SEQ ID NO: 55254 - DNA, 234 bp, Artificial Sequence
  derived and/or modified sequence
atgtgtggggccaccagcttcctgcacgagtgcaccaggctcatcctggtgaccacccagaatgctgagttcctgcagaagggcctgcaggtgcacacctgctttggagtgtacccccacgcctctgtgtggcatgactgtgccagccagaagaagggctgtgctgtgtacctgcacgtgtctgtggagttcaacaagctgatcccagaaaatggcttcatcaagggctggtag

SEQ ID NO: 55255 - DNA, 990 bp, Artificial Sequence
  derived and/or modified sequence
atgtgcggcgccaccagcttcctgcacgagtgcacccggctgatccttgttaccacccagaacgcagagtttctacagaaggggctgcaggtgcatacgtgttttggagtttatcctcatgcttccgtgtggcacgattgcgcctctcaaaaaaaggggtgcgcagtttatctccacgtgagcgtggagttcaataagctgatacccgagaatggattcatcaaatttcatcaagtccggcgagtgatgaccatactgttcctgacaatggttataagctatttcggatgcatgaaggcagctccaatgaaagaagcgaacatcagagggcagggcgggctggcttatccaggagtgcggactcacggcaccctggaatcagtaaacggtccgaaagctgggagccggggcctgacatctctcgcagacacttttgagcacgtgatcgaggagctcctggacgaagaccagaaggtcagaccgaatgaggagaacaacaaggatgccgacctgtacacaagccgagtgatgttaagctctcaggtcccattggaaccccctctcctgttcctgttagaagaatataagaactatttggacgctgccaatatgagtatgcgcgtacgacggcattcggaccctgcaaggcgaggcgagttaagtgtctgcgatagtatcagcgaatgggttaccgcagcagataaaaagacagctgtggatatgtccggcggtacggtgacagtgctggagaaagtgcccgtgtccaaaggccagctgaaacaatatttctacgagaccaaatgtaatccaatgggctacactaaagaaggttgcagaggcatcgataagaggcattggaatagtcagtgcagaactactcagagctatgtgagagctcttacgatggactctaagaaacggataggctggagattcatccgaattgatacgagctgcgtatgtaccctgactataaaaagaggaaggtag

SEQ ID NO: 55256 - DNA, 234 bp, Artificial Sequence
  derived and/or modified sequence
atgtgcggcgccaccagcttcctgcacgagtgcacccggctgatccttgtcacgactcaaaacgcggaatttctgcagaaaggcctccaggtccacacatgtttcggagtataccctcacgcgagcgtttggcatgattgcgcatcacagaagaaagggtgcgcagtttacctgcacgttagcgttgagttcaacaaactgattcctgagaatggattcattaaaggttggtag

SEQ ID NO: 55257 - DNA, 990 bp, Artificial Sequence
  derived and/or modified sequence
atgtgcggagctacgagctttctccatgagtgcacacgactgatcctagtcaccacccaaaatgcagaattccttcagaaagggctgcaggttcacacatgcttcggagtgtacccacatgcctccgtgtggcatgattgcgcgtcccaaaagaagggctgtgccgtctacctgcatgtttcggtggagttcaacaagctcataccagaaaatgggttcatcaagtttcaccaggtgaggagggtcatgacaattcttttcttgacaatggtgatctcgtacttcgggtgcatgaaggctgctccaatgaaagaggcaaatatccggggtcaagggggacttgcctaccccggagtgcgcacccatggtacacttgaaagtgttaatggccctaaagccggaagcagggggttgacctcgctagccgacacgttcgagcatgtgatagaggaacttctggacgaggatcagaaagtgcgtcccaacgaagaaaataataaagacgccgatctgtatacttctcgcgtgatgctgtcttcccaggtccccctggaacccccactgctgtttctgctcgaagagtataaaaactacctcgacgccgcaaatatgtcaatgcgggtgcgacggcactcagatcccgcaaggagaggcgaactgtccgtgtgcgatagtatctcagaatgggtaacagccgctgataagaagaccgccgtagacatgtccggcggtaccgtcaccgtgctcgagaaagtccctgtcagtaaaggtcagcttaaacaatacttttacgagacaaagtgcaatcctatggggtacacgaaggagggatgccgcggaattgacaaacggcactggaacagccagtgtcggacaacccaaagttacgttcgtgctcttaccatggacagcaagaaaagaataggttggagatttatccgaatcgacactagctgtgtgtgtacactcaccattaagcgcggtcgatag

SEQ ID NO: 55258 - DNA, 234 bp, Artificial Sequence
  derived and/or modified sequence
atgtgtggcgctacctcctttctgcatgagtgcacccggctcatactggtgacaacccagaacgccgaattcctgcaaaaggggttacaggttcacacgtgctttggcgtgtacccacacgcttccgtgtggcatgactgtgcatcacagaaaaagggttgcgcggtttaccttcacgtgtcggttgagttcaataagctcattcctgaaaatggcttcatcaagggctggtag

SEQ ID NO: 55259 - protein, 415 aa, Artificial Sequence
  derived and/or modified sequence
MEDLCVANTLFALNLFKHLAKASPTQNLFLSPWSISSTMAMVYMGSRGSTEDQMAKVLQFNEVGANAVTPMTPENFTSCGFMQQIQKGSYPDAILQAQAADKIHSSFRSLSSAINASTGNYLLESVNKLFGEKSASFREEYIRLCQKYYSSEPQAVDFLECAEEARKKINSWVKTQTKGKIPNLLPEGSVDGDTRMVLVNAVYFKGKWKTPFEKKLNGLYPFRVNSAQRTPVQMMYLREKLNIGYIEDLKAQILELPYAGDVSMFLLLPDEIADVSTGLELLESEITYDKLNKWTSKDKMAEDEVEVYIPQFKLEEHYELRSILRSMGMEDAFNKGRANFSGMSERNDLFLSEVFHQAMVDVNEEGTEAAAGTGGVMTGRTGHGGPQFVADHPFLFLIMHKITNCILFFGRFSSP

SEQ ID NO: 55260 - protein, 113 aa, Artificial Sequence
  derived and/or modified sequence
MEDLCVANTLFALNLFKHLAKASPTQNLFLSPWSISSTMAMVYMGSRGSTEDQMAKVLQFNEVGANAVTPMTPENFTSCGFMQQIQKGSYPDAILQAQAADKIHSSFRSLSSA

SEQ ID NO: 55261 - protein, 161 aa, Artificial Sequence
  derived and/or modified sequence
MEDLCVANTLFALNLFKHLAKASPTQNLFLSPWSISSTMAMVYMGSRGSTEDQMAKVLQFNEVGANAVTPMTPENFTSCGFMQQIQKGSYPDAILQAQAADKIHSSFRSLSSAINASTGNYLLESVNKLFGEKSASFREEYIRLCQKYYSSEPQAVDFLEC

SEQ ID NO: 55262 - protein, 132 aa, Artificial Sequence
  derived and/or modified sequence
MEDLCVANTLFALNLFKHLAKASPTQNLFLSPWSISSTMAMVYMGSRGSTEDQMAKVLQFNEVGANAVTPMTPENFTSCGFMQQIQKGSYPDAILQAQAADKIHSSFRSLSSAINASTGNYLLESVNKLFGE

SEQ ID NO: 55263 - DNA, 1248 bp, Artificial Sequence
  derived and/or modified sequence
atggaggacctgtgcgtggccaacaccctgttcgccctgaacctgttcaagcacctggccaaggccagccccacccagaacctgttcctgagcccctggagcatcagcagcaccatggccatggtgtacatgggcagcagaggcagcaccgaggaccagatggccaaggtgctgcagttcaacgaggtgggcgccaacgccgtgacccccatgacccccgagaacttcaccagctgcggcttcatgcagcagatccagaagggcagctaccccgacgccatcctgcaggcccaggccgccgacaagatccacagcagcttcagaagcctgagcagcgccatcaacgccagcaccggcaactacctgctggagagcgtgaacaagctgttcggcgagaagagcgccagcttcagagaggagtacatcagactgtgccagaagtactacagcagcgagccccaggccgtggacttcctggagtgcgccgaggaggccagaaagaagatcaacagctgggtgaagacccagaccaagggcaagatccccaacctgctgcccgagggcagcgtggacggcgacaccagaatggtgctggtgaacgccgtgtacttcaagggcaagtggaagacccccttcgagaagaagctgaacggcctgtaccccttcagagtgaacagcgcccagagaacccccgtgcagatgatgtacctgagagagaagctgaacatcggctacatcgaggacctgaaggcccagatcctggagctgccctacgccggcgacgtgagcatgttcctgctgctgcccgacgagatcgccgacgtgagcaccggcctggagctgctggagagcgagatcacctacgacaagctgaacaagtggaccagcaaggacaagatggccgaggacgaggtggaggtgtacatcccccagttcaagctggaggagcactacgagctgagaagcatcctgagaagcatgggcatggaggacgccttcaacaagggcagagccaacttcagcggcatgagcgagagaaacgacctgttcctgagcgaggtgttccaccaggccatggtggacgtgaacgaggagggcaccgaggccgccgccggcaccggcggcgtgatgaccggcagaaccggccacggcggcccccagttcgtggccgaccaccccttcctgttcctgatcatgcacaagatcaccaactgcatcctgttcttcggcagattcagcagcccctag

SEQ ID NO: 55264 - DNA, 342 bp, Artificial Sequence
  derived and/or modified sequence
atggaggacctgtgcgtggccaacaccctgttcgccctgaacctgttcaagcacctggccaaggccagccccacccagaacctgttcctgagcccctggagcatcagcagcaccatggccatggtgtacatgggcagcagaggcagcaccgaggaccagatggccaaggtgctgcagttcaacgaggtgggcgccaacgccgtgacccccatgacccccgagaacttcaccagctgcggcttcatgcagcagatccagaagggcagctaccccgacgccatcctgcaggcccaggccgccgacaagatccacagcagcttcagaagcctgagcagcgcctag

SEQ ID NO: 55265 - DNA, 486 bp, Artificial Sequence
  derived and/or modified sequence
atggaggacctgtgcgtggccaacaccctgttcgccctgaacctgttcaagcacctggccaaggccagccccacccagaacctgttcctgagcccctggagcatcagcagcaccatggccatggtgtacatgggcagcagaggcagcaccgaggaccagatggccaaggtgctgcagttcaacgaggtgggcgccaacgccgtgacccccatgacccccgagaacttcaccagctgcggcttcatgcagcagatccagaagggcagctaccccgacgccatcctgcaggcccaggccgccgacaagatccacagcagcttcagaagcctgagcagcgccatcaacgccagcaccggcaactacctgctggagagcgtgaacaagctgttcggcgagaagagcgccagcttcagagaggagtacatcagactgtgccagaagtactacagcagcgagccccaggccgtggacttcctggagtgctag

SEQ ID NO: 55266 - DNA, 399 bp, Artificial Sequence
  derived and/or modified sequence
atggaggacctgtgcgtggccaacaccctgttcgccctgaacctgttcaagcacctggccaaggccagccccacccagaacctgttcctgagcccctggagcatcagcagcaccatggccatggtgtacatgggcagcagaggcagcaccgaggaccagatggccaaggtgctgcagttcaacgaggtgggcgccaacgccgtgacccccatgacccccgagaacttcaccagctgcggcttcatgcagcagatccagaagggcagctaccccgacgccatcctgcaggcccaggccgccgacaagatccacagcagcttcagaagcctgagcagcgccatcaacgccagcaccggcaactacctgctggagagcgtgaacaagctgttcggcgagtag

SEQ ID NO: 55267 - DNA, 1248 bp, Artificial Sequence
  derived and/or modified sequence
atggaggatctctgtgttgctaataccctgtttgcattgaacctgtttaaacacctggctaaagcttctccaactcaaaatctctttctgagcccctggagcatcagcagtaccatggccatggtgtatatggggagtcgtgggtcgactgaggatcagatggccaaggtcctgcagttcaacgaggtgggagcaaacgcagttacacctatgacccccgaaaactttactagctgcgggttcatgcaacagattcagaaggggagctacccagacgcaatcttgcaggctcaggccgccgacaagattcacagcagttttcggtccttgtcttcagctatcaacgcctcaacgggcaactatttgcttgagtcagtaaacaagttgtttggcgagaaatccgccagctttcgggaagagtatattaggctgtgccagaaatactactcttccgaaccacaggccgtagatttcctggaatgcgcagaggaggcgcgcaaaaagataaatagctgggtcaagacccagactaaaggtaaaatccctaatttgctgcccgaaggatctgtcgacggggatacacgtatggtcctggttaacgctgtgtacttcaaaggaaagtggaagacccctttcgagaaaaagctgaatggcctgtatccattccgggtcaactccgctcaaaggacacccgtgcagatgatgtatctgagggaaaagctgaatatagggtacatagaggacctgaaagctcagattttagagcttccatacgctggcgacgtgtcaatgttcctgctcctacctgacgagatagccgacgtatcaacaggcttggaactgctcgagtcagaaatcacctacgacaaactcaataagtggacgagtaaggacaaaatggccgaagatgaggttgaagtgtacatccctcagttcaagctggaggaacactacgagctaagaagtatcttgaggagtatgggaatggaagacgcgtttaataaaggcagggccaacttcagcgggatgtctgagaggaacgacctttttttatcagaagtctttcatcaggccatggtggatgttaacgaggaagggaccgaagcggcagccggcaccggcggcgtaatgactgggcgtacagggcacggagggccacaattcgttgccgaccacccatttctgtttctcattatgcataagattactaattgtatcttgtttttcggccgtttcagctccccttag

SEQ ID NO: 55268 - DNA, 342 bp, Artificial Sequence
  derived and/or modified sequence
atggaggacctgtgcgtggccaataccttgtttgccctaaatctgtttaagcatctagctaaggcctccccaacccagaatctttttctaagtccttggtccatctcctcaacgatggccatggtgtacatggggtctagaggtagtactgaggatcagatggccaaagtcttgcagttcaacgaagtaggggcaaatgcggtcacccctatgacccccgagaactttacctcctgtggattcatgcaacagatccagaagggcagttatcctgacgcaattctgcaggcacaggccgctgataagatacactccagtttcagatccttaagctcagcttag

SEQ ID NO: 55269 - DNA, 486 bp, Artificial Sequence
  derived and/or modified sequence
atggaggatctttgtgtggccaatacactcttcgccttgaacctcttcaaacatctggcgaaggcctcccctacccaaaacctcttcctgtcaccatggtctatcagctctacgatggcaatggtttacatgggctcccgcggaagcactgaggaccagatggccaaggtattacaatttaacgaggtgggggccaatgccgtgactcctatgacacctgagaacttcaccagctgtggctttatgcagcagatccagaaaggtagctaccctgacgccatcctgcaggctcaggcagctgacaagattcactcctctttccggagtttgtcttccgcgattaatgcctctactggtaattacctccttgagagtgtgaacaaacttttcggcgaaaaaagtgcctcttttcgcgaggagtatatccggctgtgccagaagtactactcttcggagcctcaggccgtcgactttctggagtgctag

SEQ ID NO: 55270 - DNA, 399 bp, Artificial Sequence
  derived and/or modified sequence
atggaggacctgtgtgttgcgaacacactctttgctctgaatttgtttaaacacctagctaaggctagccctacacaaaatttatttttaagcccatggtctatctctagcactatggcaatggtgtacatgggttcccgcggcagcaccgaagatcagatggctaaagttttgcaattcaacgaggtcggggccaatgccgtgacacccatgacccctgagaatttcacaagttgcggcttcatgcagcagattcaaaaaggtagctaccccgacgccatattacaggcccaagccgcagacaaaatccattccagcttcagaagtttaagcagcgccatcaatgctagcactggcaattacctgctcgagagtgtgaataagctgttcggcgagtag

SEQ ID NO: 55271 - DNA, 1248 bp, Artificial Sequence
  derived and/or modified sequence
atggaagatctgtgtgttgctaatacgctcttcgcacttaacctgttcaaacacctggccaaggcctccccaacccaaaatctgttcctgtctccgtggtctattagttccacaatggccatggtctatatgggaagtcgcggttccaccgaggatcagatggctaaggtgctgcagtttaacgaagtcggggcaaatgccgttactccaatgaccccagagaatttcacatcctgtggttttatgcaacaaattcagaagggatcatatcccgatgccattcttcaggcccaggctgctgacaagatccacagcagctttcggtctctgtcttccgccatcaacgcatctaccgggaattacctactggaatcggtcaataaattgttcggggaaaaatctgccagtttcagagaggaatatattagactatgtcagaagtattacagtagcgagcctcaagctgtagacttcctcgagtgtgccgaggaggcacgtaagaagatcaactcatgggtgaagacacagactaaagggaagattcccaacttgctcccggagggatccgttgatggagacactcgcatggttctcgttaatgctgtgtactttaaaggtaagtggaagacccctttcgagaagaagttgaatggcctgtatccgtttagagtgaattccgcgcagcgcacacccgtgcaaatgatgtacttacgggagaaacttaacatcggttatatcgaggatctgaaggctcagatccttgaattgccctatgccggcgatgtctccatgtttctgctgttacctgacgagattgcagacgtcagcaccggactcgaacttctggagtcggaaattacatacgataaactgaacaagtggaccagcaaggataaaatggccgaagacgaggtcgaggtgtatatcccccagtttaagctggaggagcactatgaacttagaagcattctcaggagcatgggcatggaggacgcctttaataagggaagagccaacttctccggcatgtcagagcgaaacgatctgtttctctcagaagtgttccatcaggccatggtggatgtcaatgaggagggaaccgaggccgccgccggcaccggaggagtcatgaccggacgaaccggacatgggggacctcagtttgtggccgaccacccatttctgttcctcattatgcataagataactaattgcatcctgttttttggaagattcagttcaccctag

SEQ ID NO: 55272 - DNA, 1248 bp, Artificial Sequence
  derived and/or modified sequence
atggaggacctgtgtgtggccaacaccctgtttgccctgaacctcttcaagcacctggccaaggccagccccacccagaacctcttcctgagcccctggagcatcagcagcaccatggccatggtgtacatgggcagccggggcagcacagaggaccagatggccaaggtgctgcagttcaatgaggtgggcgccaatgctgtgacccccatgaccccagagaacttcaccagctgtggcttcatgcagcagatccagaagggcagctacccagatgccatcctgcaggcccaggccgctgacaagatccacagcagcttccgcagcctgagcagcgccatcaatgccagcacaggcaactacctgctggagagcgtgaacaagctgtttggagagaagagcgccagcttccgggaggagtacatccggctgtgccagaagtactacagcagcgagccccaggccgtggacttcctggagtgtgccgaggaggccaggaagaagatcaacagctgggtgaagacccagaccaagggcaagatccccaacctgctgcctgagggctctgtggatggagacaccaggatggtgctggtgaatgctgtgtacttcaagggcaagtggaagaccccatttgagaagaagctgaatggcctgtaccccttccgggtgaacagcgcccagaggacccctgtgcagatgatgtacctgcgggagaagctgaacatcggctacatcgaggacctgaaggcccagatcctggagctgccctatgctggagatgtgtccatgttcctgctgctgcctgatgaaattgctgatgtgtccacaggcctggagctgctggagagcgagatcacctatgacaagctgaacaagtggaccagcaaggacaagatggccgaggatgaggtggaggtgtacatcccccagttcaagctggaggagcactatgagctgcggagcatcctgcgctccatgggcatggaggatgccttcaacaagggccgggccaacttcagcggcatgtctgaaagaaatgacctcttcctgtctgaggtgttccaccaggccatggtggatgtgaatgaggagggcacagaagctgctgctggcactggaggagtgatgacaggccgcactggacatggaggcccccagtttgtggccgaccaccccttcctgttcctgatcatgcacaagatcaccaactgcatcctcttcttcggccgcttcagcagcccctag

SEQ ID NO: 55273 - DNA, 342 bp, Artificial Sequence
  derived and/or modified sequence
atggaggacctgtgtgtggccaacaccctgtttgccctgaacctcttcaagcacctggccaaggccagccccacccagaacctcttcctgagcccctggagcatcagcagcaccatggccatggtgtacatgggcagccggggcagcacagaggaccagatggccaaggtgctgcagttcaatgaggtgggcgccaatgctgtgacccccatgaccccagagaacttcaccagctgtggcttcatgcagcagatccagaagggcagctacccagatgccatcctgcaggcccaggccgctgacaagatccacagcagcttccgcagcctgagcagcgcctag

SEQ ID NO: 55274 - DNA, 486 bp, Artificial Sequence
  derived and/or modified sequence
atggaggacctgtgtgtggccaacaccctgtttgccctgaacctcttcaagcacctggccaaggccagccccacccagaacctcttcctgagcccctggagcatcagcagcaccatggccatggtgtacatgggcagccggggcagcacagaggaccagatggccaaggtgctgcagttcaatgaggtgggcgccaatgctgtgacccccatgaccccagagaacttcaccagctgtggcttcatgcagcagatccagaagggcagctacccagatgccatcctgcaggcccaggccgctgacaagatccacagcagcttccgcagcctgagcagcgccatcaatgccagcacaggcaactacctgctggagagcgtgaacaagctgtttggagagaagagcgccagcttccgggaggagtacatccggctgtgccagaagtactacagcagcgagccccaggccgtggacttcctggagtgctag

SEQ ID NO: 55275 - DNA, 399 bp, Artificial Sequence
  derived and/or modified sequence
atggaggacctgtgtgtggccaacaccctgtttgccctgaacctcttcaagcacctggccaaggccagccccacccagaacctcttcctgagcccctggagcatcagcagcaccatggccatggtgtacatgggcagccggggcagcacagaggaccagatggccaaggtgctgcagttcaatgaggtgggcgccaatgctgtgacccccatgaccccagagaacttcaccagctgtggcttcatgcagcagatccagaagggcagctacccagatgccatcctgcaggcccaggccgctgacaagatccacagcagcttccgcagcctgagcagcgccatcaatgccagcacaggcaactacctgctggagagcgtgaacaagctgtttggagagtag

SEQ ID NO: 55276 - DNA, 1248 bp, Artificial Sequence
  derived and/or modified sequence
atggaggacctgtgcgtggccaacaccctgttcgccctgaacctgttcaaacaccttgcaaaggccagccccacccaaaacctgtttctgtctccatggtccattagctccactatggcaatggtctatatgggcagtaggggcagtaccgaggaccagatggctaaagtgctgcaatttaacgaggtgggtgctaacgccgtcacccccatgactcccgaaaactttacaagttgcggctttatgcagcagatccagaaagggtcataccctgacgctatcctccaggcacaagctgcagacaagattcactcatcatttagaagtctttcaagcgccatcaatgcatccaccggcaattacttactggaaagcgttaacaagttgtttggggaaaagtccgcatcgttccgcgaagaatacatccggctatgccagaagtactactcgtccgaacctcaggctgtggacttcctcgaatgtgccgaggaagcccgaaagaagatcaattcatgggttaagacacagaccaaggggaagatccccaacctcctccccgagggctccgtggacggtgatacaaggatggtcctggttaacgcggtgtattttaagggaaagtggaagaccccttttgagaagaagctcaacggcctctacccctttcgagttaactcggctcagaggacccccgtgcagatgatgtatttacgggaaaagctcaacatcggctatatagaggatctgaaagcacagatcttggagctgccttacgccggcgacgtaagcatgttcctgctactcccggacgaaatagccgacgtgagcaccggccttgaactcctggaatccgaaattacctacgataaactcaataaatggacatccaaggataaaatggccgaagatgaagtggaggtctacattccgcagttcaaactggaggagcattatgagctccgaagtattttgcggtccatgggtatggaggacgccttcaacaaaggtcgggccaactttagcggaatgtctgagagaaacgatctatttctgtctgaggtcttccaccaggctatggtcgacgtgaatgaagaaggcacagaggccgccgcgggtaccggaggagtgatgaccggcagaacgggccacggcggacctcagttcgtcgccgatcatccattcctgttccttatcatgcataagatcactaattgcatcctattctttggaaggttctcatcaccttag

SEQ ID NO: 55277 - DNA, 342 bp, Artificial Sequence
  derived and/or modified sequence
atggaggacctgtgcgtggccaacaccctgttcgccctgaacctgtttaaacaccttgctaaagcctcacccacacagaacctgttcttatccccatggagcatctccagtacaatggcaatggtctatatgggatcaagaggcagtactgaggatcagatggccaaggtcctgcaatttaatgaagtaggggcgaatgcagtgacccctatgactcctgaaaactttacgagttgtgggtttatgcagcagatccaaaaggggtcctaccccgatgcgatccttcaagcgcaggctgccgacaagatccatagctctttccggtccctgtcctctgcctag

SEQ ID NO: 55278 - DNA, 486 bp, Artificial Sequence
  derived and/or modified sequence
atggaggacctgtgcgtggccaacaccctgttcgccctgaacctgttcaagcacctggccaaggcctcccctacacaaaatctcttcctgagcccttggtctatctccagtactatggcaatggtgtacatgggttctcggggctccactgaagatcagatggccaaagtgcttcaatttaacgaagtcggcgccaatgccgtgacccccatgacgccagagaacttcacctcctgcggattcatgcagcaaattcagaaaggctcgtatcccgacgctattctccaggcgcaagctgcagataaaatccactcctccttcaggtctctctcttcagccattaacgcatccactgggaactacctgctagagagcgtcaataaactttttggcgagaaatctgcaagcttcagggaggaatacatacgtctgtgtcagaaatactattcctccgagcctcaggccgtggactttcttgaatgttag

SEQ ID NO: 55279 - DNA, 399 bp, Artificial Sequence
  derived and/or modified sequence
atggaggacctgtgcgtggccaacaccctgttcgccctgaacctgttcaagcaccttgcgaaggccagccccacacagaatttgtttctgtctccctggtctataagttcaactatggctatggtgtacatgggctctcgcggatcaaccgaggatcagatggccaaggtgctgcagttcaacgaggtaggggcgaatgcagtcaccccaatgacccccgaaaatttcacatcctgcggattcatgcagcagattcagaagggctcttacccggatgccatcttacaagctcaggccgctgacaagatccattcctctttcaggagcctctctagtgcgatcaacgcatccactggaaactaccttctggaaagcgtgaacaaacttttcggtgaatag

SEQ ID NO: 55280 - DNA, 1248 bp, Artificial Sequence
  derived and/or modified sequence
atggaggacctgtgcgtggccaacaccctgttcgccctgaacctgttcaagcatcttgccaaagcatctccgacacagaatctatttttatcaccgtggtcaatctcttccacaatggccatggtgtatatgggtagtcggggcagcacagaggaccagatggctaaggtgcttcagttcaatgaggtgggggccaacgccgttactcccatgacacccgagaatttcaccagctgtgggtttatgcagcaaattcagaagggaagctatccagatgcgatcttgcaggcacaggcagcggacaaaattcattcatcatttcggtccctgagctccgcaatcaacgcttccacaggaaattacttattggagtcagtcaacaagctgttcggggaaaagtctgcgtcattcagagaggaatacattcgactctgccaaaagtattattcttctgaacctcaggctgttgactttctggagtgtgctgaggaggcgcggaagaagattaactcttgggttaagacgcagaccaaggggaaaatcccaaatctgttacctgaaggatctgtggatggggacacacgaatggtgttagtcaatgcagtctatttcaaaggtaaatggaaaaccccttttgagaagaaactcaatggcctgtacccatttcgcgtgaattcagctcaaagaacacctgtgcagatgatgtacctgagggaaaagctgaacattggttacatcgaggatctcaaagctcaaatcctcgaactaccttatgctggagatgtttctatgtttttgcttctgcctgacgaaatcgccgacgtttctacaggattggagctactagaatctgagatcacctatgataagcttaacaaatggacgtcaaaagataagatggcagaggacgaggttgaagtatacattccccagttcaagctggaagaacactatgagctaaggtcaattttgcgatctatgggtatggaagatgcctttaataaaggcagagccaacttttccggtatgagtgagaggaatgatctttttctctcggaagttttccatcaggccatggttgacgtaaatgaggaggggactgaagcggccgcaggaactggcggggtgatgacgggcaggacaggccacggggggccccagttcgtggctgatcatccctttttgtttctgatcatgcataaaattactaactgtatcctcttcttcggtcggtttagtagcccatag

SEQ ID NO: 55281 - DNA, 1248 bp, Artificial Sequence
  derived and/or modified sequence
atggaggacctttgcgtggccaatacgctgtttgccttaaatctctttaaacaccttgcaaaggccagcccaacacaaaatttgttcttgtccccatggagcatctcctccactatggccatggtgtatatgggctctcggggatccaccgaggatcagatggctaaggttttgcagtttaacgaggtaggcgcaaatgcagtaactccgatgacccctgagaattttaccagctgtgggtttatgcaacagatccagaagggcagctacccggacgctatattgcaggcacaggcggctgataagattcattccagcttccgctccttatccagtgccatcaatgcatcaacaggaaattacttactcgaatcagtgaataaactgtttggcgaaaagtccgcctctttccgcgaggagtacatcagactgtgccagaaatattattccagcgaaccacaggccgtggacttccttgagtgtgccgaggaagcccgtaagaagatcaactcatgggtcaagactcagactaagggaaagatccctaacttgctcccagaaggctctgttgatggagatacaagaatggtcctggtgaacgcggtgtatttcaaggggaaatggaaaacacccttcgaaaagaaattgaacggcctctaccctttccgggtgaatagcgcccaaagaacgcccgtccagatgatgtacctgagagaaaagttaaatataggctatatcgaggatcttaaggcccagatcctcgaactcccatacgccggagacgtgtcgatgtttctgttgttacccgatgagatcgctgatgtaagcactgggctagaactcttagaatccgagataacatacgataaacttaataaatggacaagtaaggacaagatggccgaagatgaagtggaggtctacatccctcagttcaagctcgaggagcattatgagctccggtcaattctgcggtctatggggatggaagacgccttcaataagggcagagccaacttctctggcatgtccgaaagaaacgacctcttcctttccgaggtctttcatcaggcaatggtagacgtcaacgaggaaggaacagaggctgcagcaggaaccggaggagtgatgactggtcgcaccggtcacggagggccacaattcgtggctgaccacccgtttctgttcttgataatgcataagataaccaattgtatcctcttctttgggagattttcatctccctag

SEQ ID NO: 55282 - DNA, 342 bp, Artificial Sequence
  derived and/or modified sequence
atggaggacctctgcgttgcgaacaccttattcgctctgaatctctttaagcaccttgccaaagcttcacctactcagaatttgttcctctccccttggtctatctcttcaacgatggcaatggtgtacatggggtcacgcggatctacagaggatcaaatggcgaaagtacttcagttcaatgaggtgggagcaaacgccgtgacgccaatgacacccgagaacttcactagttgtggtttcatgcaacagattcaaaaggggtcataccccgacgccattctgcaggctcaggccgcagataaaatccacagtagttttaggagcctgtctagcgcctag

SEQ ID NO: 55283 - DNA, 486 bp, Artificial Sequence
  derived and/or modified sequence
atggaagacctgtgtgtcgcgaataccctcttcgccttaaatctgtttaagcaccttgccaaagcatctcccacacagaatttgtttttatccccctggagcatcagcagcactatggctatggtctatatggggtcccgagggagcacagaggaccagatggctaaggttctgcagtttaatgaggtgggcgcaaatgcagtgacgcctatgacacctgagaacttcacctcctgcgggttcatgcagcagattcagaagggcagctatcccgacgcaatcctgcaggcccaggcagccgacaagatccactctagttttcgcagcttatcctccgccataaacgcgagcactggaaactatcttctggagagtgttaataaactgtttggcgagaagtccgccagtttcagggaggaatacattcggttgtgtcagaagtattattctagcgagccacaagctgtggattttcttgaatgttag

SEQ ID NO: 55284 - DNA, 399 bp, Artificial Sequence
  derived and/or modified sequence
atggaggacttgtgtgtagccaacacgcttttcgccctcaacctgtttaagcacctggccaaagcatctcccacccagaatctgttcctttctccttggtcaatatcatctactatggccatggtttacatgggatcgcgtgggtccactgaagatcagatggcgaaggtactacagtttaacgaagtcggcgctaatgcggttactccaatgactccagaaaatttcacctcctgcgggtttatgcagcagatccagaaggggagttaccctgacgccattctgcaagcccaggccgcagacaaaatacatagttccttccgcagtctcagcagcgccattaatgcctcgaccggcaattacctgttggaatctgtgaacaagttattcggtgagtag

SEQ ID NO: 55285 - DNA, 1248 bp, Artificial Sequence
  derived and/or modified sequence
atggaggacctttgtgtagccaacacattgttcgctctgaatctgtttaagcacctcgccaaggcttctccgacacaaaatctcttcttatctccttggagtatctcctctaccatggccatggtttatatgggtagcaggggctccacggaggatcagatggcaaaggtgctgcaatttaatgaagtaggcgcaaatgcggtgaccccaatgacccccgaaaacttcacctcctgcggtttcatgcagcagattcaaaaggggtcataccccgatgccattctgcaagcacaggccgctgataaaatacactccagtttcaggtcgttatcgagcgcaattaacgcctcaacaggcaactatctccttgagtctgtcaataaattgtttggcgagaaaagtgccagcttcagagaggagtatatccggctatgtcaaaagtactacagttcagagcctcaggctgtagatttcctggagtgcgcagaagaggccaggaaaaaaattaactcctgggtaaaaacacaaactaagggaaaaattccgaacctcctgcctgagggatcagtcgacggtgatacccgaatggtgcttgtgaatgccgtgtactttaaagggaagtggaaaaccccattcgagaagaagctgaacggtctctaccctttccgcgttaacagcgcacagaggacccccgtgcagatgatgtatctgcgggaaaaactgaatatcggctatatagaagacctcaaagcgcagattctcgaactgccatacgcaggggatgtatcaatgttccttttactgccagacgaaatcgccgacgtatcgacaggactggaattactcgagtctgagatcacgtacgacaagctaaacaagtggacatctaaggataaaatggcagaagacgaggttgaagtgtatatccctcaatttaagttggaggaacactacgaactgcgcagcatcttgcgctcgatgggcatggaagatgcattcaacaaggggagagccaacttcagtggtatgtcggagcgcaatgatcttttcctgtctgaggtcttccatcaagctatggtcgatgtgaatgaagagggcactgaggctgccgctgggacgggaggagttatgacaggacggacaggccacggcggtcctcagttcgtggcagatcacccttttctatttctgatcatgcataaaatcacgaattgtattctcttctttggccgatttagctctccctag

SEQ ID NO: 55286 - DNA, 1913 bp, Artificial Sequence
  derived and/or modified sequence
gaactgtaacaactctcagaggagcattgcccgtcagacagcaactcagagaataaccagagaacaaccagattgaaacaatggaggatctttgtgtggcaaacacactctttgccctcaatttattcaagcatctggcaaaagcaagccccacccagaacctcttcctctccccatggagcatctcgtccaccatggccatggtctacatgggctccaggggcagcaccgaagaccagatggccaaggtgcttcagtttaatgaagtgggagccaatgcagttacccccatgactccagagaactttaccagctgtgggttcatgcagcagatccagaagggtagttatcctgatgcgattttgcaggcacaagctgcagataaaatccattcatccttccgctctctcagctctgcaatcaatgcatccacagggaattatttactggaaagtgtcaataagctgtttggtgagaagtctgcgagcttccgggaagaatatattcgactctgtcagaaatattactcctcagaaccccaggcagtagacttcctagaatgtgcagaagaagctagaaaaaagattaattcctgggtcaagactcaaaccaaaggcaaaatcccaaacttgttacctgaaggttctgtagatggggataccaggatggtcctggtgaatgctgtctacttcaaaggaaagtggaaaactccatttgagaagaaactaaatgggctttatcctttccgtgtaaactcggctcagcgcacacctgtacagatgatgtacttgcgtgaaaagctaaacattggatacatagaagacctaaaggctcagattctagaactcccatatgctggagatgttagcatgttcttgttgcttccagatgaaattgccgatgtgtccactggcttggagctgctggaaagtgaaataacctatgacaaactcaacaagtggaccagcaaagacaaaatggctgaagatgaagttgaggtatacataccccagttcaaattagaagagcattatgaactcagatccattctgagaagcatgggcatggaggacgccttcaacaagggacgggccaatttctcagggatgtcggagaggaatgacctgtttctttctgaagtgttccaccaagccatggtggatgtgaatgaggagggcactgaagcagccgctggcacaggaggtgttatgacagggagaactggacatggaggcccacagtttgtggcagatcatccttttctttttcttattatgcataagataaccaactgcattttatttttcggcagattttcctcaccctaaaactaagcgtgctgcttctgcaaaagatttttgtagatgagctgtgtgcctcagaattgctatttcaaattgccaaaaatttagagatgttttctacatatttctgctcttctgaacaacttctgctacccactaaataaaaacacagaaataattagacaattgtctattataacatgacaaccctattaatcatttggtcttctaaaatgggatcatgcccatttagattttccttactatcagtttatttttataacattaacttttactttgttatttattattttatataatggtgagtttttaaattattgctcactgcctatttaatgtagctaataaagttatagaagcagatgatctgttaatttcctatctaataaatgcctttaattgttctcataatgaagaataagtaggtatccctccatgcccttctgtaataaatatctggaaaaaacattaaacaataggcaaatatatgttatgtgcatttctagaaatacataacacatatatatgtctgtatcttatattcaattgcaagtatataataaataaacctgcttccaaacaacaata

SEQ ID NO: 55287 - DNA, 717 bp, Artificial Sequence
  derived and/or modified sequence
gttgtgcccgctttcctactcagtgcaattgttccaggtttgcaggtcccaggttccaagactttgcggtcttcttttgttcacttggaaccgatatcttttggaggtgcatttcttgcactacaacttgcttaagctcttacacttcatagtgaagctatgcaccaccgagtgaagcgatgtggaacattggaaagagtgggcttccttagacagacctgggcttgaatccctgctccactacctaccagctgtgtgaccttatacaagttacttaatgtttctgagcatcaggatataatctataaaatagggagaatcacctctacctcatacagattctgcaaagattaaacgaggagaggagattgaaacaatggaggatctttgtgtggcaaacacactctttgccctcaatttattcaagcatctggcaaaagcaagccccacccagaacctcttcctctccccatggagcatctcgtccaccatggccatggtctacatgggctccaggggcagcaccgaagaccagatggccaaggtgcttcagtttaatgaagtgggagccaatgcagttacccccatgactccagagaactttaccagctgtgggttcatgcagcagatccagaagggtagttatcctgatgcgattttgcaggcacaagctgcagataaaatccattcatccttccgctctctcagctctgcaat

SEQ ID NO: 55288 - DNA, 762 bp, Artificial Sequence
  derived and/or modified sequence
gagaacaaccagcatttcttgcactacaacttgcttaagctcttacacttcatagtgaagctatgcaccaccgagtgaagcgatgtggaacattggaaagagtgggcttccttagacagacctgggcttgaatccctgctccactacctaccagctgtgtgaccttatacaagttacttaatgtttctgagcatcaggatataatctataaaatagggagaatcacctctacctcatacagattctgcaaagattaaacgaggagaggagattgaaacaatggaggatctttgtgtggcaaacacactctttgccctcaatttattcaagcatctggcaaaagcaagccccacccagaacctcttcctctccccatggagcatctcgtccaccatggccatggtctacatgggctccaggggcagcaccgaagaccagatggccaaggtgcttcagtttaatgaagtgggagccaatgcagttacccccatgactccagagaactttaccagctgtgggttcatgcagcagatccagaagggtagttatcctgatgcgattttgcaggcacaagctgcagataaaatccattcatccttccgctctctcagctctgcaatcaatgcatccacagggaattatttactggaaagtgtcaataagctgtttggtgagaagtctgcgagcttccgggaagaatatattcgactctgtcagaaatattactcctcagaaccccaggcagtagacttcctagaatgt

SEQ ID NO: 55289 - DNA, 751 bp, Artificial Sequence
  derived and/or modified sequence
ttgcctgcagagcctgaggtcagggaaggtctcagatggttcataccttggtgtatacatgagtttcataggcctgggattaaggattatccctgcaatcttgcctggcattgactttctacctggtggggtggcagaagaagggggtcttctagtcctcccagtaatgaacaccccagtataggaagtcttttttagtaaggctgtggtatgtgtggtgcatatagggaaggggttctgggataggggctgggtgaaactccaaaccttcaaacaatgagtcaaagtcactttagaagcaggaaagcagaaagaagattgaccgtcttaccagatgcaacaagattgaaacaatggaggatctttgtgtggcaaacacactctttgccctcaatttattcaagcatctggcaaaagcaagccccacccagaacctcttcctctccccatggagcatctcgtccaccatggccatggtctacatgggctccaggggcagcaccgaagaccagatggccaaggtgcttcagtttaatgaagtgggagccaatgcagttacccccatgactccagagaactttaccagctgtgggttcatgcagcagatccagaagggtagttatcctgatgcgattttgcaggcacaagctgcagataaaatccattcatccttccgctctctcagctctgcaatcaatgcatccacagggaattatttactggaaagtgtcaataagctgtttggtgagaa

SEQ ID NO: 55290 - DNA, 2155 bp, Artificial Sequence
  derived and/or modified sequence
gtaacaactctcagaggagcattgcccgtcagacagcaactcagagaataaccagagaacaaccagcatttcttgcactacaacttgcttaagctcttacacttcatagtgaagctatgcaccaccgagtgaagcgatgtggaacattggaaagagtgggcttccttagacagacctgggcttgaatccctgctccactacctaccagctgtgtgaccttatacaagttacttaatgtttctgagcatcaggatataatctataaaatagggagaatcacctctacctcatacagattctgcaaagattaaacgaggagaggagattgaaacaatggaggatctttgtgtggcaaacacactctttgccctcaatttattcaagcatctggcaaaagcaagccccacccagaacctcttcctctccccatggagcatctcgtccaccatggccatggtctacatgggctccaggggcagcaccgaagaccagatggccaaggtgcttcagtttaatgaagtgggagccaatgcagttacccccatgactccagagaactttaccagctgtgggttcatgcagcagatccagaagggtagttatcctgatgcgattttgcaggcacaagctgcagataaaatccattcatccttccgctctctcagctctgcaatcaatgcatccacagggaattatttactggaaagtgtcaataagctgtttggtgagaagtctgcgagcttccgggaagaatatattcgactctgtcagaaatattactcctcagaaccccaggcagtagacttcctagaatgtgcagaagaagctagaaaaaagattaattcctgggtcaagactcaaaccaaaggcaaaatcccaaacttgttacctgaaggttctgtagatggggataccaggatggtcctggtgaatgctgtctacttcaaaggaaagtggaaaactccatttgagaagaaactaaatgggctttatcctttccgtgtaaactcggctcagcgcacacctgtacagatgatgtacttgcgtgaaaagctaaacattggatacatagaagacctaaaggctcagattctagaactcccatatgctggagatgttagcatgttcttgttgcttccagatgaaattgccgatgtgtccactggcttggagctgctggaaagtgaaataacctatgacaaactcaacaagtggaccagcaaagacaaaatggctgaagatgaagttgaggtatacataccccagttcaaattagaagagcattatgaactcagatccattctgagaagcatgggcatggaggacgccttcaacaagggacgggccaatttctcagggatgtcggagaggaatgacctgtttctttctgaagtgttccaccaagccatggtggatgtgaatgaggagggcactgaagcagccgctggcacaggaggtgttatgacagggagaactggacatggaggcccacagtttgtggcagatcatccttttctttttcttattatgcataagataaccaactgcattttatttttcggcagattttcctcaccctaaaactaagcgtgctgcttctgcaaaagatttttgtagatgagctgtgtgcctcagaattgctatttcaaattgccaaaaatttagagatgttttctacatatttctgctcttctgaacaacttctgctacccactaaataaaaacacagaaataattagacaattgtctattataacatgacaaccctattaatcatttggtcttctaaaatgggatcatgcccatttagattttccttactatcagtttatttttataacattaacttttactttgttatttattattttatataatggtgagtttttaaattattgctcactgcctatttaatgtagctaataaagttatagaagcagatgatctgttaatttcctatctaataaatgcctttaattgttctcataatgaagaataagtaggtatccctccatgcccttctgtaataaatatctggaaaaaacattaaacaataggcaaatatatgttatgtgcatttctagaaatacataacacatatatatgtctgtatcttatattcaattgcaagtatataataaataaacctgcttcc

SEQ ID NO: 55291 - protein, 748 aa, Artificial Sequence
  derived and/or modified sequence
MNYQEAAIYLQEGENNDKFFTHPKDAKALAAYLFAHNHLFYLMELATALLLLLLSLCEAPAVPALRLGIYVHATLELFALMVVVFELCMKLRWLGLHTFIRHKRTMVKTSVLVVQFVEAIVVLVRQMSHVRVTRALRCIFLVDCRYCGGVRRNLRQIFQSLPPFMDILLLLLFFMIIFAILGFYLFSPNPSDPYFSTLENSIVSLFVLLTTANFPDVMMPSYSRNPWSCVFFIVYLSIELYFIMNLLLAVVFDTFNDIEKRKFKSLLLHKRTAIQHAYRLLISQRRPAGISYRQFEGLMRFYKPRMSARERYLTFKALNQNNTPLLSLKDFYDIYEVAALKWKAKKNREHWFDELPRTALLIFKGINILVKSKAFQYFMYLVVAVNGVWILVETFMLKGGNFFSKHVPWSYLVFLTIYGVELFLKVAGLGPVEYLSSGWNLFDFSVTVFAFLGLLALALNMEPFYFIVVLRPLQLLRLFKLKERYRNVLDTMFELLPRMASLGLTLLIFYYSFAIVGMEFFCGIVFPNCCNTSTVADAYRWRNHTVGNRTVVEEGYYYLNNFDNILNSFVTLFELTVVNNWYIIMEGVTSQTSHWSRLYFMTFYIVTMVVMTIIVAFILEAFVFRMNYSRKNQDSEVDGGITLEKEISKEELVAVLELYREARGASSDVTRLLETLSQMERYQQHSMVFLGRRSRTKSDLSLKMYQEEIQEWYEEHAREQEQQRQLSSSAAPAAQQPPGSRQRSQTVT

SEQ ID NO: 55292 - protein, 888 aa, Artificial Sequence
  derived and/or modified sequence
MESCYIAQAGLELLGSSSSPTLTSQSAEITEDASNGGVSEQHPWPSGFERELKPETISSPGYHILRATGEENMAVSLDDDVPLILTLDEGGSAPLAPSNGLGQEELPSKNGGSYAIHDSQAPSLSSGGESSPSSPAHNWEMNYQEAAIYLQEGENNDKFFTHPKDAKALAAYLFAHNHLFYLMELATALLLLLLSLCEAPAVPALRLGIYVHATLELFALMVVVFELCMKLRWLGLHTFIRHKRTMVKTSVLVVQFVEAIVVLVRQMSHVRVTRALRCIFLVDCRYCGGVRRNLRQIFQSLPPFMDILLLLLFFMIIFAILGFYLFSPNPSDPYFSTLENSIVSLFVLLTTANFPDVMMPSYSRNPWSCVFFIVYLSIELYFIMNLLLAVVFDTFNDIEKRKFKSLLLHKRTAIQHAYRLLISQRRPAGISYRQFEGLMRFYKPRMSARERYLTFKALNQNNTPLLSLKDFYDIYEVAALKWKAKKNREHWFDELPRTALLIFKGINILVKSKAFQYFMYLVVAVNGVWILVETFMLKGGNFFSKHVPWSYLVFLTIYGVELFLKVAGLGPVEYLSSGWNLFDFSVTVFAFLGLLALALNMEPFYFIVVLRPLQLLRLFKLKERYRNVLDTMFELLPRMASLGLTLLIFYYSFAIVGMEFFCGIVFPNCCNTSTVADAYRWRNHTVGNRTVVEEGYYYLNNFDNILNSFVTLFELTVVNNWYIIMEGVTSQTSHWSRLYFMTFYIVTMVVMTIIVAFILEAFVFRMNYSRKNQDSEVDGGITLEKEISKEELVAVLELYREARGASSDVTRLLETLSQMERYQQHSMVFLGRRSRTKSDLSLKMYQEEIQEWYEEHAREQEQQRQLSSSAAPAAQQPPGSRQRSQTVT

SEQ ID NO: 55293 - DNA, 2667 bp, Artificial Sequence
  derived and/or modified sequence
atggagagctgctacatcgcccaggccggcctggagctgctgggcagcagcagcagccccaccctgaccagccagagcgccgagatcaccgaggacgccagcaacggcggcgtgagcgagcagcacccctggcccagcggcttcgagagagagctgaagcccgagaccatcagcagccccggctaccacatcctgagagccaccggcgaggagaacatggccgtgagcctggacgacgacgtgcccctgatcctgaccctggacgagggcggcagcgcccccctggcccccagcaacggcctgggccaggaggagctgcccagcaagaacggcggcagctacgccatccacgacagccaggcccccagcctgagcagcggcggcgagagcagccccagcagccccgcccacaactgggagatgaactaccaggaggccgccatctacctgcaggagggcgagaacaacgacaagttcttcacccaccccaaggacgccaaggccctggccgcctacctgttcgcccacaaccacctgttctacctgatggagctggccaccgccctgctgctgctgctgctgagcctgtgcgaggcccccgccgtgcccgccctgagactgggcatctacgtgcacgccaccctggagctgttcgccctgatggtggtggtgttcgagctgtgcatgaagctgagatggctgggcctgcacaccttcatcagacacaagagaaccatggtgaagaccagcgtgctggtggtgcagttcgtggaggccatcgtggtgctggtgagacagatgagccacgtgagagtgaccagagccctgagatgcatcttcctggtggactgcagatactgcggcggcgtgagaagaaacctgagacagatcttccagagcctgccccccttcatggacatcctgctgctgctgctgttcttcatgatcatcttcgccatcctgggcttctacctgttcagccccaaccccagcgacccctacttcagcaccctggagaacagcatcgtgagcctgttcgtgctgctgaccaccgccaacttccccgacgtgatgatgcccagctacagcagaaacccctggagctgcgtgttcttcatcgtgtacctgagcatcgagctgtacttcatcatgaacctgctgctggccgtggtgttcgacaccttcaacgacatcgagaagagaaagttcaagagcctgctgctgcacaagagaaccgccatccagcacgcctacagactgctgatcagccagagaagacccgccggcatcagctacagacagttcgagggcctgatgagattctacaagcccagaatgagcgccagagagagatacctgaccttcaaggccctgaaccagaacaacacccccctgctgagcctgaaggacttctacgacatctacgaggtggccgccctgaagtggaaggccaagaagaacagagagcactggttcgacgagctgcccagaaccgccctgctgatcttcaagggcatcaacatcctggtgaagagcaaggccttccagtacttcatgtacctggtggtggccgtgaacggcgtgtggatcctggtggagaccttcatgctgaagggcggcaacttcttcagcaagcacgtgccctggagctacctggtgttcctgaccatctacggcgtggagctgttcctgaaggtggccggcctgggccccgtggagtacctgagcagcggctggaacctgttcgacttcagcgtgaccgtgttcgccttcctgggcctgctggccctggccctgaacatggagcccttctacttcatcgtggtgctgagacccctgcagctgctgagactgttcaagctgaaggagagatacagaaacgtgctggacaccatgttcgagctgctgcccagaatggccagcctgggcctgaccctgctgatcttctactacagcttcgccatcgtgggcatggagttcttctgcggcatcgtgttccccaactgctgcaacaccagcaccgtggccgacgcctacagatggagaaaccacaccgtgggcaacagaaccgtggtggaggagggctactactacctgaacaacttcgacaacatcctgaacagcttcgtgaccctgttcgagctgaccgtggtgaacaactggtacatcatcatggagggcgtgaccagccagaccagccactggagcagactgtacttcatgaccttctacatcgtgaccatggtggtgatgaccatcatcgtggccttcatcctggaggccttcgtgttcagaatgaactacagcagaaagaaccaggacagcgaggtggacggcggcatcaccctggagaaggagatcagcaaggaggagctggtggccgtgctggagctgtacagagaggccagaggcgccagcagcgacgtgaccagactgctggagaccctgagccagatggagagataccagcagcacagcatggtgttcctgggcagaagaagcagaaccaagagcgacctgagcctgaagatgtaccaggaggagatccaggagtggtacgaggagcacgccagagagcaggagcagcagagacagctgagcagcagcgccgcccccgccgcccagcagccccccggcagcagacagagaagccagaccgtgacctag

SEQ ID NO: 55294 - DNA, 2667 bp, Artificial Sequence
  derived and/or modified sequence
atggagtcctgctacatcgcgcaggccggcctggagctgcttgggtcatccagcagtcccacattaactagccagagcgccgaaatcacagaggacgcatccaacggaggcgtcagcgagcagcatccatggccttcaggcttcgaaagggagcttaaacctgagacaattagttctcctggatatcatatactgcgggccaccggtgaagagaacatggctgtcagcctggatgatgatgttcctctgattctgactttagatgagggtgggtctgctccactggctccatccaatgggctaggccaggaagaattgccctctaaaaatggcggcagttacgctatccacgactcccaggctccatcactatcttcaggaggggagtctagtccgagttcccctgcacacaattgggaaatgaactatcaagaagcggccatttatcttcaagagggcgagaataacgacaagttctttacccaccccaaagatgctaaagctctggccgcctacctgttcgcgcacaaccatctgttctaccttatggaactcgctaccgcactgctgttgttgttgctcagcctctgtgaggcacccgcagttcccgccctcagactgggtatatacgtgcacgcgacactagagctgtttgctcttatggttgtcgtgtttgagctctgcatgaaactgagatggctgggactgcacacgtttattcgtcacaagcggacaatggttaagacctctgtcctggttgtgcagttcgtcgaggccatcgttgtgctggttagacaaatgagtcacgtccgggtgactagagccctccgatgcattttcttggtcgattgccggtattgcggcggtgttaggagaaatctgcgtcagatctttcagtccttgccaccgttcatggacattttactcctcctcctcttctttatgataatctttgccatactaggcttctacttgttcagccctaatccctccgacccatatttctctactttagaaaattcaatcgtcagcctgtttgtgttactcaccaccgcaaacttcccagacgttatgatgccttcctactctagaaacccctggtcatgtgtctttttcattgtatacctgtctatagagctgtattttattatgaacctgctgctggctgtggtgttcgacacattcaacgatattgagaaacgcaagtttaaatccctcctccttcacaaacgaaccgccattcaacatgcttatcggctactcataagccagaggaggcctgcaggtataagttatcgccaattcgagggcctaatgcgcttctacaaaccacgcatgtccgcaagggaaagatacttgaccttcaaggccctcaatcagaataacaccccattactctccctgaaggatttctacgatatttacgaggtcgcagccctcaagtggaaggcaaagaagaaccgggagcactggttcgacgagcttcctcggacagccttgctgatatttaaagggatcaacatactggtgaagtctaaggccttccagtacttcatgtacttagtggttgctgtgaatggggtctggatccttgtcgagacctttatgctcaaaggcggaaatttcttttccaagcacgtgccttggtcctacctggttttcctaacaatttacggagttgaattatttttaaaagtggcaggtctgggccctgtcgaatatttgtccagtgggtggaatttatttgatttctcagtcaccgtttttgccttcttgggactgttggccctggctctgaatatggagccgttttatttcatcgtggtcctgcgtcctctgcagttactgcgcctgttcaaacttaaggagaggtacaggaacgtgctggatactatgttcgagctcctgcccagaatggcaagcctgggcctcactctgttaattttctactactcctttgcaatcgtcggtatggagttcttttgtggcattgtttttccgaactgttgcaatacaagtaccgtggctgacgcttacagatggcggaaccacaccgtgggaaatcgcacagtcgtggaggaaggatattactacctaaataatttcgataatattctgaacagtttcgtgacactgttcgagctgactgtggtcaacaactggtacatcatcatggagggggtgacatcccagacgagccactggtcgcggttgtattttatgaccttttacattgtgacgatggtggtgatgactatcatcgtagcttttatccttgaggcatttgtgttccgcatgaattatagcagaaaaaaccaggactctgaagttgatggcggtataactctggagaaagaaatttcaaaggaggagcttgtggccgttctggagctctatcgtgaggctagaggtgcctccagcgatgtgactaggctgctggagactctatctcaaatggagagatatcagcagcactcaatggtgtttctggggcgacgctcccgcaccaagagcgacctgagcctcaaaatgtaccaggaggagatacaggaatggtatgaagaacatgcgagggagcaggagcagcaaagacagttgtcctcaagcgccgctccagcagctcaacagcctcccgggtcacgccagcgtagccagacagtaacctag

SEQ ID NO: 55295 - DNA, 2667 bp, Artificial Sequence
  derived and/or modified sequence
atggagtcttgctatattgctcaagctggactggaactcctgggatctagctcaagtcctacattgacctcccagtcagcagaaataaccgaggacgcctccaacggaggagtgtctgaacaacacccatggccgtccgggttcgagcgagaattgaagccagagactatcagcagcccggggtaccacatcctgagggccactggagaggagaatatggccgtttctctagacgatgatgtcccactgatcctgacactcgacgaagggggttctgcccctctggccccatctaatggcctaggccaagaggagctacccagcaagaacggcggctcctacgcgattcacgatagccaggcaccaagtttatcttcgggtggcgaaagttctccttcatcacctgcgcacaattgggaaatgaattatcaagaagccgctatatacctgcaggagggggagaataacgacaagtttttcacacatcctaaagacgccaaagcgcttgccgcgtatctgtttgcgcataatcatctattttacctgatggagctcgcaaccgctctgctgctgctcctgttaagtctctgcgaagcgcctgctgttccagcgctgcgcctcggcatatatgttcatgccactctcgaactcttcgccttgatggtggtggtcttcgagctctgcatgaaacttaggtggctcggactccataccttcatccgccacaagagaaccatggtgaagacgtcagttctcgtggtgcagttcgtggaagcaattgttgtgctggtgcgtcaaatgtcacatgtgagagtgacccgggcactgcgttgcatcttcctggtggactgcaggtattgcggcggagtcaggagaaatctgcggcaaatcttccagtcactgcctccattcatggacatccttctgctccttctcttcttcatgataatctttgccatactagggttttatctattttctcctaacccttccgatccatacttttctactctggagaactcaatcgtgagcttattcgtgcttctgacaaccgcaaacttccccgacgtcatgatgcccagctacagtaggaacccttggtcttgcgtattctttatcgtgtatctcagtatcgagttatattttatcatgaacttgctgctcgctgtggtctttgataccttcaacgacattgaaaagcggaagtttaaatcactgttgcttcataagagaactgccatccagcacgcctaccggcttttgataagccaacggcgccctgccggaatctcctatcgtcagtttgagggacttatgagattctacaagccacggatgtctgccagggagcgctatcttactttcaaggctctgaatcagaacaacaccccccttctctccttaaaagacttctacgatatttatgaggtcgcagcactgaagtggaaggccaagaaaaacagggaacattggttcgatgagctgcccagaaccgctttgcttatcttcaaagggataaatatcttagtcaagtccaaagccttccagtattttatgtatctggttgtcgccgtcaatggggtatggatcttagttgagacatttatgttgaagggaggcaactttttcagcaaacatgttccttggtcttacctcgtcttcctcaccatctacggggttgagctgtttctgaaagtcgcgggcctgggcccagtcgaatacttaagcagcgggtggaatctgttcgatttctctgtgaccgtgttcgccttcctggggctgcttgcactcgcattaaatatggagccattttacttcatcgtggtactccgcccactccaactgcttaggctgtttaagctgaaagagaggtataggaacgtcttggacacgatgtttgagttactgccacggatggctagtctaggcctaacgcttttgatcttttactactctttcgccatcgttggcatggagtttttctgtggaatagtatttcctaattgctgcaacacaagcaccgtggccgatgcttatcgatggagaaaccatacggtcggcaatcgtaccgtcgtggaggaggggtattattatttaaataactttgataacatcctgaactcatttgtgaccttattcgaactcacagtggtgaacaactggtatatcataatggaaggcgtgaccagccagacgagccattggtcccggctgtactttatgaccttttacatcgtgacgatggtggtgatgaccataatcgtcgctttcatactggaagccttcgtgtttaggatgaattactcgcgcaagaaccaggattccgaggtggatggaggcatcaccctcgaaaaggaaatctcaaaagaagagctggtggcggttctggagttgtaccgggaagcccgcggagcctcaagcgatgtaacacgtctgctggagacactgtctcagatggaacgctaccagcaacactctatggtcttcctgggacgtcggtcccgcacaaaatcggacctgagtctgaagatgtatcaggaggaaatccaggaatggtatgaagaacacgctagggagcaggagcagcagcgtcaattgtcaagttccgcggcaccggccgcacagcagcctcccgggagcagacagaggtcccaaaccgtcacttag

SEQ ID NO: 55296 - DNA, 2667 bp, Artificial Sequence
  derived and/or modified sequence
atggagagctgctacatcgcccaggccggcctggagctgctgggcagcagcagcagccccaccctgaccagccagagcgctgagatcacagaagatgccagcaatggaggagtgtctgagcagcacccctggcccagcggctttgagcgggagctgaagccagagaccatcagcagccctggctaccacatcctgcgggccaccggggaggagaacatggctgtgtccctggatgatgatgtgcccctcatcctgaccctggatgagggcggcagcgcccccctggcccccagcaatggcctgggccaggaggagctgcccagcaagaatggaggcagctatgccatccatgacagccaggcccccagcctgagcagcggcggggagagcagccccagcagccctgcccacaactgggagatgaactaccaggaggccgccatctacctgcaggagggggagaacaatgacaagttcttcacccaccccaaggatgccaaggccctggccgcctacctgtttgcccacaaccacctgttctacctgatggagctggccacagccctgctgctgctgctgctgagcctgtgtgaggccccagctgtgcctgccctgcggctgggcatctacgtgcacgccaccctggagctgtttgccctgatggtggtggtgtttgagctgtgcatgaagctgcgctggctgggcctgcacaccttcatccgccacaagaggaccatggtgaagacctctgtgctggtggtgcagtttgtggaggccatcgtggtgctggtgcggcagatgagccacgtgcgggtgacccgggccctgcgctgcatcttcctggtggactgccgctactgcggcggcgtgagaagaaacctgcggcagatcttccagagcctgccccccttcatggacatcctgctgctgctgctcttcttcatgatcatctttgccatcctgggcttctacctgttcagccccaaccccagcgacccctacttcagcaccctggagaacagcatcgtgtccctgtttgtgctgctgaccacagccaacttcccagatgtgatgatgcccagctacagcaggaacccctggagctgtgtgttcttcatcgtgtacctgagcattgagctgtacttcatcatgaacctgctgctggccgtggtgtttgacaccttcaatgacatcgagaagaggaagttcaagagcctgctgctgcacaagaggacagccatccagcacgcctaccgcctgctgatcagccagaggaggcctgctggcatctcctaccggcagtttgagggcctgatgaggttctacaagcccaggatgtctgcccgggagcgctacctgaccttcaaggccctgaaccagaacaacacccccctgctgagcctgaaggacttctatgacatctatgaggtggccgccctgaagtggaaggccaagaagaaccgggagcactggtttgatgagctgcccaggacagccctgctgatcttcaagggcatcaacatcctggtgaagagcaaggccttccagtacttcatgtacctggtggtggccgtgaatggagtgtggatcctggtggagaccttcatgctgaagggcggcaacttcttcagcaagcacgtgccctggagctacctggtgttcctgaccatctacggcgtggagctgttcctgaaggtggccggcctgggccctgtggagtacctgagcagcggctggaacctgtttgacttctctgtgacagtgtttgccttcctgggcctgctggccctggccctgaacatggagcccttctacttcatcgtggtgctgcggcccctgcagctgctgcggctcttcaagctgaaggagcgctacagaaatgtgctggacaccatgtttgagctgctgcccaggatggccagcctgggcctgaccctgctgatcttctactacagctttgccatcgtgggcatggagttcttctgtggcatcgtgttccccaactgctgcaacaccagcacagtggctgatgcctaccgctggaggaaccacacagtgggcaacagaacagtggtggaggagggctactactacctgaacaactttgacaacatcctgaacagctttgtgaccctgtttgagctgactgtggtgaacaactggtacatcatcatggagggcgtgaccagccagaccagccactggagccggctgtacttcatgaccttctacatcgtgaccatggtggtgatgaccatcatcgtggccttcatcctggaggcctttgtgttcaggatgaactacagcaggaagaaccaggacagcgaggtggatggcggcatcaccctggagaaggagatcagcaaggaggagctggtggccgtgctggagctgtaccgggaggcccggggggccagcagtgatgtgacccggctgctggagaccctgagccagatggagcgctaccagcagcacagcatggtgttcctgggccgccgcagcaggaccaagagtgacctgagcctgaagatgtaccaggaggagatccaggagtggtatgaggagcacgcccgggagcaggagcagcagaggcagctgagcagcagcgctgccccagctgcccagcagcccccaggcagccggcagaggagccagacagtgacctag

SEQ ID NO: 55297 - DNA, 2667 bp, Artificial Sequence
  derived and/or modified sequence
atggagagctgctacatcgcccaggccggcctggagctgctgggctctagtagtagcccaactctgactagccagtcagccgaaattacagaggacgcttcaaatggcggggtaagtgaacagcacccttggcccagcggcttcgaacgagagctgaaaccagaaaccatctcatcacccgggtatcacatattgagggcaaccggggaggaaaatatggctgtcagtctggacgatgacgtccctttgatccttaccctggatgagggcgggagcgcgccattagctccgagcaacggtctagggcaggaggagttgccgtcaaagaatgggggatcctacgctattcacgacagccaagcgccctcgttgtcctctggtggcgaatcctccccatcaagccccgcccacaattgggagatgaactaccaggaagcagcgatctacctgcaggaaggcgaaaacaacgacaaattctttacccaccccaaagacgcaaaggccctcgcagcctacctgtttgcccataatcacttgttttacctcatggagctcgctacggccctgctgctccttctactatctttatgtgaagcccccgccgtgcctgcattgagactaggaatctatgtacatgcaacactggaattattcgctctgatggtcgtggttttcgagctttgcatgaaactccggtggctgggacttcacacatttattaggcacaagaggaccatggttaagacgtcagttttagtagtacagttcgtggaggcgatcgttgtcctcgtcaggcagatgtcacacgtaagggttacaagagcccttcggtgtatcttcttggtcgattgtaggtactgcggaggcgtgaggaggaacctgagacagatcttccagtctcttccccctttcatggacatcctgcttttgctactcttttttatgattattttcgcgatcctcggattctaccttttttcccccaatccaagtgatccttattttagcacactggagaatagcatcgtctctctctttgtgctcctgaccaccgcaaattttccagatgttatgatgccctcctatagcagaaatccatggtcctgtgtgttctttatagtgtacctatctatagagctgtactttatcatgaacctactcctcgcagttgttttcgatacgtttaatgatatcgaaaagagaaagttcaaatcactccttctccacaaaagaactgctatccagcacgcatatcgactcctgatttctcagcgtcggcccgctgggatctcatatcgacagttcgaaggtctgatgcgcttttataaaccgcggatgagcgcccgcgagcgatatctgacatttaaggctctcaaccagaataatacccccctcctgtccctgaaagacttctacgatatatacgaggtggccgccctcaagtggaaagcgaagaaaaaccgggaacactggtttgatgaacttccccggacggccctcctgatttttaaaggcattaacatacttgtaaaatctaaggccttccaatacttcatgtatttagtagtggccgtgaatggcgtctggattctagttgaaactttcatgctgaagggcggcaatttcttcagcaagcacgtgccatggtcataccttgtgtttttgacaatttatggtgtggagctctttcttaaggtggccggtctcggtcctgtagagtatttgagttctggctggaacctttttgacttttcagtcacagtgttcgccttcctgggcttgttagccctggcactgaacatggagcccttctacttcatcgtggtcctgcgccccctgcagctgctgcggctcttcaaacttaaggagaggtatcgcaatgtgttggacactatgttcgagcttctacctaggatggcctctctggggctgaccctgctgattttttactattcgttcgccatagttggtatggaatttttctgcggcatagtttttcctaattgctgtaatactagtacggtggcggatgcatatagatggaggaaccatacagtaggcaatagaaccgtggtggaagagggctattactatctgaataactttgataatattctgaacagcttcgtcacgctcttcgagttgactgtggtgaataattggtacatcatcatggaaggagtgacatctcagacatctcattggtctcgactgtacttcatgaccttctatattgtgacgatggtggtgatgacaatcattgttgccttcatcctggaggccttcgtgtttaggatgaactatagccgaaaaaatcaggattcagaggtggacggaggtatcactcttgagaaggaaatctcaaaggaagagctggtcgccgtgctggaactgtaccgcgaagcccgaggcgcgtctagcgatgtaacaagactccttgagacactctctcaaatggaacgctaccaacagcacagtatggtgtttttagggcgccgctcaagaacaaagtctgatctgtccttgaagatgtaccaggaagaaatacaagagtggtacgaggagcatgcaagagaacaggagcagcagagacagctgtccagtagtgccgcacctgctgctcagcaacctcctgggagtaggcagcggagtcaaacagtgacctag

SEQ ID NO: 55298 - DNA, 2667 bp, Artificial Sequence
  derived and/or modified sequence
atggagagctgctacatcgcccaggccggcctggagctgctgggcagtagctcatcacctacgcttaccagccagtccgccgaaattacggaggacgcatctaatggaggtgtgagcgagcagcacccatggccgtcgggcttcgagagggagctgaagcccgaaactatctcctctccgggttatcatatcctgcgtgctactggcgaggagaacatggccgtgtccttggacgacgacgttcctcttatactcacactcgatgaaggcggatccgccccacttgctccaagcaacggcttggggcaggaggagctgccatctaaaaacggaggatcgtatgccatacatgatagccaggcaccaagcctgagttccggcggcgagtcgagcccttcaagcccagcacacaactgggagatgaactaccaggaggccgcaatctatttacaggagggagagaacaacgataagttctttactcacccgaaagacgccaaggccttagccgcctatctctttgcacacaaccacctgttttatctgatggagctcgcgaccgcactgctgcttctgctcctcagtctgtgcgaagcacctgcagtgcctgctctgcggctagggatatacgtgcatgccacactggagctgtttgcgcttatggttgtcgtttttgagctgtgtatgaagttgcgctggctggggcttcacacctttattaggcataagcggacaatggtgaaaacctccgtattggttgtgcagttcgtagaagccattgtagtcctcgtgagacaaatgtcccatgtgcgcgttacgcgcgcattgagatgtatcttcttggtggactgtcgctattgcggaggagtccggcggaacctgcggcagatctttcagagcctgccgccattcatggacatcttactgctgctcctatttttcatgataatatttgcaatactgggcttctatctcttcagccctaaccccagcgacccatacttttccaccctggaaaattccattgtgtcactattcgttctgttgactacggcaaatttccccgacgtgatgatgccatcatatagcagaaatccctggtcttgcgtcttctttattgtgtaccttagtatcgaattatattttattatgaaccttcttctggccgtcgtattcgacacttttaatgatatcgagaaaagaaagtttaagtcactgctgcttcacaagaggacggcgatacagcacgcataccgattattgatcagccaacgtcggccggccgggataagctacagacagttcgaggggctgatgagattctacaaacctaggatgtcagccagggagcggtacctcacctttaaggcactgaatcaaaataacacccctctattgtcccttaaagacttctacgatatctatgaggttgccgcactgaagtggaaggcaaagaagaatcgggagcactggttcgatgagcttcctcgtactgccttattgatcttcaaaggaattaatattctcgtcaaaagcaaagcgttccagtactttatgtacctcgtcgtggcagtgaacggagtctggattctggtcgagacattcatgctcaagggcggcaacttcttctccaagcatgtgccctggtcctatctggtctttctgacaatctatggtgtagaactatttctgaaagtggccggcctcggcccagtggagtatctgagtagcgggtggaatcttttcgatttctcggtcaccgtgtttgcctttctaggcctgcttgcactcgccctcaatatggagccgttttactttatcgtcgtgctacggcctcttcagttgcttcgtctatttaaactgaaggagaggtataggaatgtccttgacacaatgtttgaactccttccacggatggccagcttaggtcttaccctcctgattttctactattccttcgcgatagtaggaatggagtttttctgtgggatagtatttcctaactgctgcaacacttctaccgtcgccgatgcctaccggtggaggaaccacaccgtgggcaaccggacagttgttgaagagggctattattacctaaataattttgacaacatcctgaattcgtttgtgactcttttcgagctcacagtggtcaacaactggtatattatcatggagggggttaccagtcagacgtcgcactggagtcgtctgtattttatgacgttctacatcgtgactatggtagtgatgactataattgtggcattcatcctggaggctttcgtttttcggatgaactacagtcggaagaaccaggattccgaggtcgatggcggaattaccctggagaaggaaattagcaaagaggagctggtggctgtgctggagctgtacagggaagcaaggggtgcatcatctgacgtcacaaggttgctggagacactgtcccagatggagcgatatcaacagcattccatggtgtttctgggacgtaggagtagaaccaagtcagatctgtcccttaaaatgtatcaggaggaaattcaggagtggtacgaggagcacgcaagagaacaggagcaacagcgccagttgagtagtagcgctgctcccgccgcacagcaaccaccaggtagtaggcagcggtcacagacagtgacgtag

SEQ ID NO: 55299 - DNA, 2667 bp, Artificial Sequence
  derived and/or modified sequence
atggagtcatgctacattgcccaggcaggcctggaattgttgggatctagttcctcaccaacacttacttcccagtcagcagaaatcacagaagacgcctcaaatgggggtgtcagtgagcagcatccatggcccagtggctttgagcgcgagctgaaacccgaaaccatcagctcaccaggctatcacatcctccgggctacaggagaggaaaacatggccgtctctttggacgacgacgtgccgcttatactaaccctcgatgagggcggtagcgcacccctagccccaagcaacgggctgggacaagaggaactcccttccaaaaacgggggtagctatgcaattcacgacagccaggcacccagtctgagctccggcggtgagtctagcccttcctccccagcacacaactgggagatgaattaccaagaagccgctatctacctgcaggaaggcgagaacaacgataaattcttcactcatcccaaagatgcgaaagccctcgcagcctacctttttgcacacaaccacctgttttatcttatggagctagctaccgccctgttgctcctgcttctatccttatgcgaagcacctgcagtcccagctctcaggctgggaatctacgtacatgcgactctggaactgtttgcactgatggtagtcgtatttgagctgtgtatgaagctgcggtggcttggccttcacactttcatccggcataaaagaaccatggtcaagacgtctgtgctggtggtacagtttgttgaagcgatcgtcgtgctggttcgccaaatgagccacgttagagtcacccgcgctctgcggtgcatattcctggtggattgtcgctattgcgggggtgtgagaaggaacctgcgacagatatttcagtctttgcccccttttatggatattctcttgttattactgttctttatgataatcttcgctattctcggtttctacttattttctcctaaccctagcgacccgtacttctctaccctagagaactccatagtgtctctattcgtcctcttaaccaccgccaattttccagatgtgatgatgccttcatactctcgcaatccatggagttgcgtgtttttcattgtctatctctccatcgagctctacttcattatgaatctcttgctcgccgtggtgttcgatacttttaatgatatcgaaaaacgaaaatttaagtccctgctgctccataagcgaactgccatccaacacgcttatagactcctgatatctcaacggaggccagctgggataagttacaggcagtttgagggattgatgcgattctataaacctaggatgtcagccagggaaaggtatctgacattcaaggctctgaaccagaataacaccccactgctgtcactaaaggatttctatgacatctacgaggtggctgccctgaagtggaaagctaagaagaatcgcgagcattggttcgatgagctgccccgaaccgccttgctgatctttaagggcataaatatccttgtaaagagcaaagcctttcagtatttcatgtacttggtggtagccgtcaatggcgtatggatcctcgtcgaaaccttcatgctgaaaggcggaaacttcttttcgaaacatgtgccatggtcgtatctcgtgttcttgaccatctacggcgtcgaactcttcctgaaagtcgcgggattaggccctgtcgagtacctctcctcgggttggaacctttttgatttctccgtgaccgttttcgcattccttgggctgctcgccctggcactcaatatggagcctttttattttatcgttgttctgcggccactacaactcctgagactgtttaagctgaaggagcggtacaggaacgttctcgacactatgttcgagcttctgcctaggatggcgtcacttggactgaccttgctgatcttctattattctttcgccatagtgggtatggaatttttttgtggcattgtcttcccgaattgctgtaacacaagcaccgtagctgacgcctacagatggcgcaatcacaccgtgggcaacagaacagtggtcgaggagggctactattacttaaataattttgacaacattctaaattcatttgttacattattcgagctgaccgtcgtcaataactggtatattatcatggagggcgttacgagtcagacaagccactggagccgactgtatttcatgactttctacatcgtgactatggtggttatgacgatcattgttgcattcatcctggaagcattcgtattcagaatgaactactctcgtaaaaaccaagattcagaagtggatggcggtattacattggagaaggagatttctaaggaagagcttgtggccgtcttggaactctaccgcgaagcgaggggagccagcagcgatgtgactagactgttggaaaccctgagtcagatggaaaggtaccagcagcattcgatggtttttctaggaagacggtcccgaaccaaatcagatctgtctctgaaaatgtatcaagaggaaattcaggaatggtacgaagaacacgctcgggaacaggagcaacagcgccaactgtcttccagcgccgcacctgctgcccagcagcccccaggctcccggcagcgatctcagacggtgacttag

SEQ ID NO: 55300 - DNA, 2667 bp, Artificial Sequence
  derived and/or modified sequence
atggagagttgttatatcgctcaagccggtttggagctcttgggctctagcagttcaccaacactgacaagtcagagcgctgaaattacagaagatgcgtcaaatggaggagtgtctgagcagcatccctggccttctggattcgagagggagttgaagccagaaaccatttccagtcctggataccacatcctcagggccactggcgaggagaatatggcggtatccctggacgatgatgtcccccttatcctcacgctggatgaaggaggctcggctccactggccccaagtaacggtctgggacaggaggaacttccttccaaaaacgggggaagctatgccattcacgactcccaggcaccaagcctgagcagtgggggagagagctctccgtcttcccctgcccataactgggaaatgaactaccaggaggccgctatctacctgcaggaaggcgaaaacaatgataagttttttacacaccctaaagatgcgaaagcgctggccgcttatctattcgcccataaccacctcttctacctgatggaattggccacggccttattgctcctcctcctgagcctgtgcgaggcgccagccgtacccgctctccgcctgggaatttacgtgcatgcaacattggagctctttgccttgatggtggtagtgtttgaattgtgcatgaaactgcgctggctgggcctccacacattcatccgacacaagaggactatggtgaagacttccgtgttggtcgttcagtttgtcgaggccattgtggtgctggtcagacaaatgtcacacgtaagagttactcgagccctcaggtgcatctttctggtcgactgtcgctactgtggcggtgtccggaggaatcttagacaaatatttcagtctttgccacccttcatggacattctgttactgttgctgttctttatgattatttttgcgatactgggcttctacctcttttcacccaatccctctgacccatatttctccactctcgaaaactcaattgtcagtctttttgtgcttctaactacagccaatttccctgatgtcatgatgccaagctactcaagaaacccttggtcctgtgttttcttcattgtatatctttccatcgagctttactttataatgaaccttctgcttgcagtggtttttgacacattcaacgatattgagaaacgcaaatttaagtccctgttgctgcacaaacggaccgctatccagcatgcataccggcttctgatttcacagcgcaggccggcagggatatcttatcggcagttcgaaggcctgatgcgcttttataagcccagaatgagtgccagagagcgctacctcactttcaaagccttgaatcagaacaacacacccctgttgagcctcaaagatttctacgatatctacgaagtagccgctctcaagtggaaagccaagaagaacagggaacactggtttgacgaactcccaagaacggcactcctcatattcaaaggtattaacatcctggttaagtccaaggcttttcagtattttatgtatctggtggtggccgtgaacggggtgtggatcctggttgaaacgtttatgcttaaagggggtaatttcttttctaagcatgtgccttggtcctacttagtcttcctgactatctacggggttgagctcttcttgaaagtagccggacttgggccagttgagtatctttcttcgggttggaatctatttgacttttcggtcactgttttcgcctttctcggacttcttgccctggctctcaatatggaacctttttattttatagtggtgctgaggcccttacagctgttgcgcttatttaaactcaaggagcggtatcggaatgtgttggatacaatgttcgagctcttgcccagaatggcaagcctcggcctgacactgctgatattttattatagcttcgcgatcgtcggcatggaatttttctgtggaattgtgttccccaattgctgcaatacttcgacggttgccgatgcctaccgctggagaaatcataccgttggtaataggaccgtggtggaagaaggctattattaccttaacaactttgataatatcctaaactctttcgttacactgtttgaattgaccgtagttaataattggtatataattatggaaggtgtgacgagccaaacctcccattggtcccggctctactttatgaccttctacattgtcactatggtagttatgacaattattgtggcctttattctggaagccttcgttttccgcatgaattactcacgtaaaaaccaggattctgaggtggatggcggaatcacactagaaaaggaaatcagtaaggaagagctggtcgccgtgcttgaactctacagagaggctcgcggagcatctagcgacgtgaccaggcttcttgagaccctgagccagatggagagataccagcagcactccatggtctttctggggaggaggtcccggacaaagagtgatctcagtttaaaaatgtaccaggaggagatacaggagtggtacgaggaacacgccagagaacaggagcaacagcgacaactgtctagctccgcagcaccagctgcccaacagcccccaggatcccggcaaaggagccaaactgtgacctag

SEQ ID NO: 55301 - DNA, 5274 bp, Artificial Sequence
  derived and/or modified sequence
gagaggacggtaggcggtggataggagagctggcgcagctgccctggtggcagtggctgaagtggcggcggcttcggcggctgcggcggctgcaacagcttcgggctcggggttttggcggcggcgccggcgggctaggctgcgcggtgcggaccccggcgcgcggtccgggttgctggggcggcgcgtaagatgcctctaatggaggagtttctgagcagcacccctggcccagtggctttgaaagggagctcaaaccagagactatttcaagccctggatatcatatcctgagggccacaggagaagagaacatggctgtgagtttggatgacgacgtgccgctcatcctgaccttggatgagggtggcagtgccccactggctccctccaacggcctgggccaagaagagctacctagcaaaaatggcggcagctatgccatccacgactcccaggcccccagtctcagctctgggggtgagagttccccctccagccccgcacacaactgggagatgaattaccaagaggcagcaatctacctccaggaaggcgagaacaacgacaagttcttcacccaccccaaggatgccaaggcgctggcggcctacctctttgcacacaatcacctcttctacctgatggagctggccacggccctgctgctgctgctgctctccctgtgcgaggcccccgccgtccccgcactccggcttggcatctatgtccacgccaccctggagctgtttgccctgatggtggtagtgtttgaactctgcatgaagttacgctggctgggcctccacaccttcatccggcacaagcggaccatggtcaagacctcggtgctggtggtgcagtttgtcgaggccatcgtggtgttggtacggcagatgtcccatgtgcgggtgacccgagcactgcgctgcattttcctggtggactgtcggtattgcggtggcgtccggcgcaacctgcggcagatcttccagtccctgccgcccttcatggacatcctcctgctgctgctgttcttcatgatcatctttgccatcctcggtttctacttgttctcccctaacccttcagacccctacttcagcaccctggagaacagcatcgtcagtctgtttgtccttctgaccacagccaatttcccagatgtgatgatgccctcctactcccggaacccctggtcctgcgtcttcttcatcgtgtacctctccatcgagctgtatttcatcatgaacctgcttctggctgtggtgttcgacaccttcaatgacattgagaaacgcaagttcaagtctttgctactgcacaagcgaaccgctatccagcatgcctaccgcctgctcatcagccagaggaggcctgccggcatctcctacaggcagtttgaaggcctcatgcgcttctacaagccccggatgagtgccagggagcgctatcttaccttcaaggccctgaatcagaacaacacacccctgctcagcctaaaggacttttacgatatctacgaagttgctgctttgaagtggaaggccaagaaaaacagagagcactggtttgatgagcttcccaggacggcgctcctcatcttcaaaggtattaatatccttgtgaagtccaaggccttccagtatttcatgtacttggtggtggcagtcaacggggtctggatcctcgtggagacatttatgctgaaaggtgggaacttcttctccaagcacgtgccctggagttacctcgtctttctaactatctatggggtggagctgttcctgaaggttgccggcctgggccctgtggagtacttgtcttccggatggaacttgtttgacttctccgtgacagtgttcgccttcctgggactgctggcgctggccctcaacatggagcccttctatttcatcgtggtcctgcgccccctccagctgctgaggttgtttaagttgaaggagcgctaccgcaacgtgctggacaccatgttcgagctgctgccccggatggccagcctgggcctcaccctgctcatcttttactactccttcgccatcgtgggcatggagttcttctgcgggatcgtcttccccaactgctgcaacacgagtacagtggcagatgcctaccgctggcgcaaccacaccgtgggcaacaggaccgtggtggaggaaggctactattatctcaataattttgacaacatcctcaacagctttgtgaccctgtttgagctcacagttgtcaacaactggtacatcatcatggaaggcgtcacctctcagacctcccactggagccgcctctacttcatgaccttttacattgtgaccatggtggtgatgacgatcattgtcgcctttatcctcgaggccttcgtcttccgaatgaactacagccgcaagaaccaggactcggaagttgatggtggcatcacccttgagaaggaaatctccaaagaagagctggttgccgtcctggagctctaccgggaggcacggggggcctcctcggatgtcaccaggctgctggagaccctctcccagatggagagataccagcaacattccatggtgtttctgggacggcgatcaaggaccaagagcgacctgagcctgaagatgtaccaggaggagatccaggagtggtatgaggagcatgccagggagcaagagcagcagcgacaactcagcagcagtgcagcccccgccgcccagcagcccccaggcagccgccagcgctcccagaccgttacctagcccagcgcccgaaagccgtctcttctatgcaataacacaatagtattactctactgcgatgtacggaactgcggtgtgtgtacacatactcacgtatatgcacatatttatatacaggaagaaaaaagacagacaagatggggcttggtttataaccaccttgccctgtcttccttaactccagaagccagtttggtgaggggtgggggtgcggccaccaggtctgagctcttcctactgtggaaggctccagaaggcccttcacaaggagacccctcacctggatccagtcgactgcggggcttgcccctcatgtgggctggcctccatcggccacgtccaaagctgtcactgctactgcttcaggctcacatccccccgacctgatggcgtgcccgccccctctccctgcggcccatgccacaggtttctgtgttttgctttagggacagaaccacttaggaaggaaagaactcccggtctccagggtggtatttcagtgtctgtgataatgtcacgcaacacctcttcggggaccagtgcccaggatctaatggaagcggaattggggcaactgggcccatgtggccagagctcagttagccagtgccgggcggccacagattacactgaccaatctcctcccttggctctgcaagcctcccacccagccttctctggcttaacccttgttggcgaaaactcttccacagtggcctccttggggacccagaacccggaggaaggggcatgaggcaggaagtggggccgatgtctgcaacccagaccacttcgtggaatgggctcttgaccaaatccctttttttgcgatttacccgttcaagcaaaacaacgttttggttaactaaggattgtgctaaagccgataccaggtccttcacacgtgtgcactaggaacaggagcgaacagcacagagagacgctccctgtgggacgcagcagccccgtggccccggcccagttcccagccaccctccctggctctgctcacaccagagatttccatagcaggagcggttggtgcagaagtaggttcagatgaacctcagttaacgtcgccacccctcctcccaccatggtaccctgtaggagccctgtatgacatctgagcgtggtggaggtaggagggttgccagctgcagtgaccctgccacagaggcagggtcagtgcagaggtcgctttggttccgcttccctgggccacagaacggaacacagcataggttctgcagcaggagccgcagtggcaggatggagggtgcgaagggcaaggagtgcactgctgggcattcctggccagccccggccctctggtgcctgcttcctgtgacttcagaaggcaggtggacagagcctccctctggccttgtcctcttcccagccacagaacgggcagggtggcacccgaccccaggggagcagtacctggtcccccaccccctcctcccaaccacctccaaggccaagctgggtcccatagccagcacggcatggttctccccttccccccttcccaggtcaggggagttggacaagtagcaggtgtttgtttttaaagcacagccctttgggaaagcaacacattattgagactcactgtgattcccccgggagtcagactggctttgtcctcttcctctctggagggccatgggccatcagcaggagctccacatcgagccccaggccagaaccccctccctttcacagagagggaactttattgcacaattgggtgccttttagcttttgtgtgttgaaatgggcgttttggaagcaagggtcaggggacagcttctaaaggtgtgagtctctgacctgagcatctgggcctcgcctgggcccttcttcctccccaggggtggaaacgtggaggggccagcagcaccccggggtctgcccaggggagtcaaggccccgaggtgggggggcctattccaggaggagtgggatctcggccctgtccagagcgagttaatgtgtccatctgcccaaccctgtcctgagaaaggacctggttttggccaggacctgacaaatacccaatggcagcagtgtcaacagacgggagtccagccagggtgggtgcccttgtcattgaggttagggacagctatccccaggttatgcctggccccacccagcagggagttggggtccccccacaggctgtgagctctgtgggccctgggatgtgatctagctcagatgccctctcatccttgatgtcatagttgagtgcacccaagtggcacccactggcggccaggggcacagcctggtggtggtggcaatagaactgtgcccctcctcagctcctcgcttcccctcccacagccccagccttactccaccatgcggacaatcattttgtacggatcacgggagcaatgctgtacggttttgtacactggtggtttgtttcctagaaaacccattgtgtctctggatttctagcacattactaaaagagcctctgctttgtaaa

SEQ ID NO: 55302 - DNA, 5175 bp, Artificial Sequence
  derived and/or modified sequence
agatggagtcttgctacattgcccaggctggtcttgaactgctaggctcaagcagttctcccaccttgacctcccaaagcgctgagattacagaagatgcctctaatggaggagtttctgagcagcacccctggcccagtggctttgaaagggagctcaaaccagagactatttcaagccctggatatcatatcctgagggccacaggagaagagaacatggctgtgagtttggatgacgacgtgccgctcatcctgaccttggatgagggtggcagtgccccactggctccctccaacggcctgggccaagaagagctacctagcaaaaatggcggcagctatgccatccacgactcccaggcccccagtctcagctctgggggtgagagttccccctccagccccgcacacaactgggagatgaattaccaagaggcagcaatctacctccaggaaggcgagaacaacgacaagttcttcacccaccccaaggatgccaaggcgctggcggcctacctctttgcacacaatcacctcttctacctgatggagctggccacggccctgctgctgctgctgctctccctgtgcgaggcccccgccgtccccgcactccggcttggcatctatgtccacgccaccctggagctgtttgccctgatggtggtagtgtttgaactctgcatgaagttacgctggctgggcctccacaccttcatccggcacaagcggaccatggtcaagacctcggtgctggtggtgcagtttgtcgaggccatcgtggtgttggtacggcagatgtcccatgtgcgggtgacccgagcactgcgctgcattttcctggtggactgtcggtattgcggtggcgtccggcgcaacctgcggcagatcttccagtccctgccgcccttcatggacatcctcctgctgctgctgttcttcatgatcatctttgccatcctcggtttctacttgttctcccctaacccttcagacccctacttcagcaccctggagaacagcatcgtcagtctgtttgtccttctgaccacagccaatttcccagatgtgatgatgccctcctactcccggaacccctggtcctgcgtcttcttcatcgtgtacctctccatcgagctgtatttcatcatgaacctgcttctggctgtggtgttcgacaccttcaatgacattgagaaacgcaagttcaagtctttgctactgcacaagcgaaccgctatccagcatgcctaccgcctgctcatcagccagaggaggcctgccggcatctcctacaggcagtttgaaggcctcatgcgcttctacaagccccggatgagtgccagggagcgctatcttaccttcaaggccctgaatcagaacaacacacccctgctcagcctaaaggacttttacgatatctacgaagttgctgctttgaagtggaaggccaagaaaaacagagagcactggtttgatgagcttcccaggacggcgctcctcatcttcaaaggtattaatatccttgtgaagtccaaggccttccagtatttcatgtacttggtggtggcagtcaacggggtctggatcctcgtggagacatttatgctgaaaggtgggaacttcttctccaagcacgtgccctggagttacctcgtctttctaactatctatggggtggagctgttcctgaaggttgccggcctgggccctgtggagtacttgtcttccggatggaacttgtttgacttctccgtgacagtgttcgccttcctgggactgctggcgctggccctcaacatggagcccttctatttcatcgtggtcctgcgccccctccagctgctgaggttgtttaagttgaaggagcgctaccgcaacgtgctggacaccatgttcgagctgctgccccggatggccagcctgggcctcaccctgctcatcttttactactccttcgccatcgtgggcatggagttcttctgcgggatcgtcttccccaactgctgcaacacgagtacagtggcagatgcctaccgctggcgcaaccacaccgtgggcaacaggaccgtggtggaggaaggctactattatctcaataattttgacaacatcctcaacagctttgtgaccctgtttgagctcacagttgtcaacaactggtacatcatcatggaaggcgtcacctctcagacctcccactggagccgcctctacttcatgaccttttacattgtgaccatggtggtgatgacgatcattgtcgcctttatcctcgaggccttcgtcttccgaatgaactacagccgcaagaaccaggactcggaagttgatggtggcatcacccttgagaaggaaatctccaaagaagagctggttgccgtcctggagctctaccgggaggcacggggggcctcctcggatgtcaccaggctgctggagaccctctcccagatggagagataccagcaacattccatggtgtttctgggacggcgatcaaggaccaagagcgacctgagcctgaagatgtaccaggaggagatccaggagtggtatgaggagcatgccagggagcaagagcagcagcgacaactcagcagcagtgcagcccccgccgcccagcagcccccaggcagccgccagcgctcccagaccgttacctagcccagcgcccgaaagccgtctcttctatgcaataacacaatagtattactctactgcgatgtacggaactgcggtgtgtgtacacatactcacgtatatgcacatatttatatacaggaagaaaaaagacagacaagatggggcttggtttataaccaccttgccctgtcttccttaactccagaagccagtttggtgaggggtgggggtgcggccaccaggtctgagctcttcctactgtggaaggctccagaaggcccttcacaaggagacccctcacctggatccagtcgactgcggggcttgcccctcatgtgggctggcctccatcggccacgtccaaagctgtcactgctactgcttcaggctcacatccccccgacctgatggcgtgcccgccccctctccctgcggcccatgccacaggtttctgtgttttgctttagggacagaaccacttaggaaggaaagaactcccggtctccagggtggtatttcagtgtctgtgataatgtcacgcaacacctcttcggggaccagtgcccaggatctaatggaagcggaattggggcaactgggcccatgtggccagagctcagttagccagtgccgggcggccacagattacactgaccaatctcctcccttggctctgcaagcctcccacccagccttctctggcttaacccttgttggcgaaaactcttccacagtggcctccttggggacccagaacccggaggaaggggcatgaggcaggaagtggggccgatgtctgcaacccagaccacttcgtggaatgggctcttgaccaaatccctttttttgcgatttacccgttcaagcaaaacaacgttttggttaactaaggattgtgctaaagccgataccaggtccttcacacgtgtgcactaggaacaggagcgaacagcacagagagacgctccctgtgggacgcagcagccccgtggccccggcccagttcccagccaccctccctggctctgctcacaccagagatttccatagcaggagcggttggtgcagaagtaggttcagatgaacctcagttaacgtcgccacccctcctcccaccatggtaccctgtaggagccctgtatgacatctgagcgtggtggaggtaggagggttgccagctgcagtgaccctgccacagaggcagggtcagtgcagaggtcgctttggttccgcttccctgggccacagaacggaacacagcataggttctgcagcaggagccgcagtggcaggatggagggtgcgaagggcaaggagtgcactgctgggcattcctggccagccccggccctctggtgcctgcttcctgtgacttcagaaggcaggtggacagagcctccctctggccttgtcctcttcccagccacagaacgggcagggtggcacccgaccccaggggagcagtacctggtcccccaccccctcctcccaaccacctccaaggccaagctgggtcccatagccagcacggcatggttctccccttccccccttcccaggtcaggggagttggacaagtagcaggtgtttgtttttaaagcacagccctttgggaaagcaacacattattgagactcactgtgattcccccgggagtcagactggctttgtcctcttcctctctggagggccatgggccatcagcaggagctccacatcgagccccaggccagaaccccctccctttcacagagagggaactttattgcacaattgggtgccttttagcttttgtgtgttgaaatgggcgttttggaagcaagggtcaggggacagcttctaaaggtgtgagtctctgacctgagcatctgggcctcgcctgggcccttcttcctccccaggggtggaaacgtggaggggccagcagcaccccggggtctgcccaggggagtcaaggccccgaggtgggggggcctattccaggaggagtgggatctcggccctgtccagagcgagttaatgtgtccatctgcccaaccctgtcctgagaaaggacctggttttggccaggacctgacaaatacccaatggcagcagtgtcaacagacgggagtccagccagggtgggtgcccttgtcattgaggttagggacagctatccccaggttatgcctggccccacccagcagggagttggggtccccccacaggctgtgagctctgtgggccctgggatgtgatctagctcagatgccctctcatccttgatgtcatagttgagtgcacccaagtggcacccactggcggccaggggcacagcctggtggtggtggcaatagaactgtgcccctcctcagctcctcgcttcccctcccacagccccagccttactccaccatgcggacaatcattttgtacggatcacgggagcaatgctgtacggttttgtacactggtggtttgtttcctagaaaacccattgtgtctctggatttctagcacattactaaaagagcctctgctttgt

SEQ ID NO: 55303 - DNA, 5345 bp, Artificial Sequence
  derived and/or modified sequence
aggagagctggcgcagctgccctggtggcagtggctgaagtggcggcggcttcggcggctgcggcggctgcaacagcttcgggctcggggttttggcggcggcgccggcgggctaggctgcgcggtgcggaccccggcgcgcggtccgggttgctggggcggcgcgtagatggagtcttgctacattgcccaggctggtcttgaactgctaggctcaagcagttctcccaccttgacctcccaaagcgctgagattacagaagatgcctctaatggaggagtttctgagcagcacccctggcccagtggctttgaaagggagctcaaaccagagactatttcaagccctggatatcatatcctgagggccacaggagaagagaacatggctgtgagtttggatgacgacgtgccgctcatcctgaccttggatgagggtggcagtgccccactggctccctccaacggcctgggccaagaagagctacctagcaaaaatggcggcagctatgccatccacgactcccaggcccccagtctcagctctgggggtgagagttccccctccagccccgcacacaactgggagatgaattaccaagaggcagcaatctacctccaggaaggcgagaacaacgacaagttcttcacccaccccaaggatgccaaggcgctggcggcctacctctttgcacacaatcacctcttctacctgatggagctggccacggccctgctgctgctgctgctctccctgtgcgaggcccccgccgtccccgcactccggcttggcatctatgtccacgccaccctggagctgtttgccctgatggtggtagtgtttgaactctgcatgaagttacgctggctgggcctccacaccttcatccggcacaagcggaccatggtcaagacctcggtgctggtggtgcagtttgtcgaggccatcgtggtgttggtacggcagatgtcccatgtgcgggtgacccgagcactgcgctgcattttcctggtggactgtcggtattgcggtggcgtccggcgcaacctgcggcagatcttccagtccctgccgcccttcatggacatcctcctgctgctgctgttcttcatgatcatctttgccatcctcggtttctacttgttctcccctaacccttcagacccctacttcagcaccctggagaacagcatcgtcagtctgtttgtccttctgaccacagccaatttcccagatgtgatgatgccctcctactcccggaacccctggtcctgcgtcttcttcatcgtgtacctctccatcgagctgtatttcatcatgaacctgcttctggctgtggtgttcgacaccttcaatgacattgagaaacgcaagttcaagtctttgctactgcacaagcgaaccgctatccagcatgcctaccgcctgctcatcagccagaggaggcctgccggcatctcctacaggcagtttgaaggcctcatgcgcttctacaagccccggatgagtgccagggagcgctatcttaccttcaaggccctgaatcagaacaacacacccctgctcagcctaaaggacttttacgatatctacgaagttgctgctttgaagtggaaggccaagaaaaacagagagcactggtttgatgagcttcccaggacggcgctcctcatcttcaaaggtattaatatccttgtgaagtccaaggccttccagtatttcatgtacttggtggtggcagtcaacggggtctggatcctcgtggagacatttatgctgaaaggtgggaacttcttctccaagcacgtgccctggagttacctcgtctttctaactatctatggggtggagctgttcctgaaggttgccggcctgggccctgtggagtacttgtcttccggatggaacttgtttgacttctccgtgacagtgttcgccttcctgggactgctggcgctggccctcaacatggagcccttctatttcatcgtggtcctgcgccccctccagctgctgaggttgtttaagttgaaggagcgctaccgcaacgtgctggacaccatgttcgagctgctgccccggatggccagcctgggcctcaccctgctcatcttttactactccttcgccatcgtgggcatggagttcttctgcgggatcgtcttccccaactgctgcaacacgagtacagtggcagatgcctaccgctggcgcaaccacaccgtgggcaacaggaccgtggtggaggaaggctactattatctcaataattttgacaacatcctcaacagctttgtgaccctgtttgagctcacagttgtcaacaactggtacatcatcatggaaggcgtcacctctcagacctcccactggagccgcctctacttcatgaccttttacattgtgaccatggtggtgatgacgatcattgtcgcctttatcctcgaggccttcgtcttccgaatgaactacagccgcaagaaccaggactcggaagttgatggtggcatcacccttgagaaggaaatctccaaagaagagctggttgccgtcctggagctctaccgggaggcacggggggcctcctcggatgtcaccaggctgctggagaccctctcccagatggagagataccagcaacattccatggtgtttctgggacggcgatcaaggaccaagagcgacctgagcctgaagatgtaccaggaggagatccaggagtggtatgaggagcatgccagggagcaagagcagcagcgacaactcagcagcagtgcagcccccgccgcccagcagcccccaggcagccgccagcgctcccagaccgttacctagcccagcgcccgaaagccgtctcttctatgcaataacacaatagtattactctactgcgatgtacggaactgcggtgtgtgtacacatactcacgtatatgcacatatttatatacaggaagaaaaaagacagacaagatggggcttggtttataaccaccttgccctgtcttccttaactccagaagccagtttggtgaggggtgggggtgcggccaccaggtctgagctcttcctactgtggaaggctccagaaggcccttcacaaggagacccctcacctggatccagtcgactgcggggcttgcccctcatgtgggctggcctccatcggccacgtccaaagctgtcactgctactgcttcaggctcacatccccccgacctgatggcgtgcccgccccctctccctgcggcccatgccacaggtttctgtgttttgctttagggacagaaccacttaggaaggaaagaactcccggtctccagggtggtatttcagtgtctgtgataatgtcacgcaacacctcttcggggaccagtgcccaggatctaatggaagcggaattggggcaactgggcccatgtggccagagctcagttagccagtgccgggcggccacagattacactgaccaatctcctcccttggctctgcaagcctcccacccagccttctctggcttaacccttgttggcgaaaactcttccacagtggcctccttggggacccagaacccggaggaaggggcatgaggcaggaagtggggccgatgtctgcaacccagaccacttcgtggaatgggctcttgaccaaatccctttttttgcgatttacccgttcaagcaaaacaacgttttggttaactaaggattgtgctaaagccgataccaggtccttcacacgtgtgcactaggaacaggagcgaacagcacagagagacgctccctgtgggacgcagcagccccgtggccccggcccagttcccagccaccctccctggctctgctcacaccagagatttccatagcaggagcggttggtgcagaagtaggttcagatgaacctcagttaacgtcgccacccctcctcccaccatggtaccctgtaggagccctgtatgacatctgagcgtggtggaggtaggagggttgccagctgcagtgaccctgccacagaggcagggtcagtgcagaggtcgctttggttccgcttccctgggccacagaacggaacacagcataggttctgcagcaggagccgcagtggcaggatggagggtgcgaagggcaaggagtgcactgctgggcattcctggccagccccggccctctggtgcctgcttcctgtgacttcagaaggcaggtggacagagcctccctctggccttgtcctcttcccagccacagaacgggcagggtggcacccgaccccaggggagcagtacctggtcccccaccccctcctcccaaccacctccaaggccaagctgggtcccatagccagcacggcatggttctccccttccccccttcccaggtcaggggagttggacaagtagcaggtgtttgtttttaaagcacagccctttgggaaagcaacacattattgagactcactgtgattcccccgggagtcagactggctttgtcctcttcctctctggagggccatgggccatcagcaggagctccacatcgagccccaggccagaaccccctccctttcacagagagggaactttattgcacaattgggtgccttttagcttttgtgtgttgaaatgggcgttttggaagcaagggtcaggggacagcttctaaaggtgtgagtctctgacctgagcatctgggcctcgcctgggcccttcttcctccccaggggtggaaacgtggaggggccagcagcaccccggggtctgcccaggggagtcaaggccccgaggtgggggggcctattccaggaggagtgggatctcggccctgtccagagcgagttaatgtgtccatctgcccaaccctgtcctgagaaaggacctggttttggccaggacctgacaaatacccaatggcagcagtgtcaacagacgggagtccagccagggtgggtgcccttgtcattgaggttagggacagctatccccaggttatgcctggccccacccagcagggagttggggtccccccacaggctgtgagctctgtgggccctgggatgtgatctagctcagatgccctctcatccttgatgtcatagttgagtgcacccaagtggcacccactggcggccaggggcacagcctggtggtggtggcaatagaactgtgcccctcctcagctcctcgcttcccctcccacagccccagccttactccaccatgcggacaatcattttgtacggatcacgggagcaatgctgtacggttttgtacactggtggtttgtttcctagaaaacccattgtgtctctggatttctagcacattactaaaagagcctctgctttgtaaa

SEQ ID NO: 55304 - protein, 485 aa, Artificial Sequence
  derived and/or modified sequence
MSYFVDSAGSSPVPYSAPRPAVVRQGPSNTYEDPRMNCGFQSNYHQQRPCYPFWDEMATQEVPTGLEHCVSDMECADVPLLTPSSKEMMSQALKATFSGFTKEQQRLGIPKDPRQWTETHVRDWVMWAVNEFSLKGVDFQKFCMNGAALCALGKDCFLELAPDFVGDILWEHLEILQKEDVKPYQVNGVNPAYPESRYTSDYFISYGIEHAQCVPPSEFSEPSFITESYQTLHPISSEELLSLKYENDYPSVILRDPLQTDTLQNDYFAIKQEVVTPDNMCMGRTSRGKLGGQDSFESIESYDSCDRLTQSWSSQSSFNSLQRVPSYDSFDSEDYPAALPNHKPKGTFKDYVRDRADLNKDKPVIPAAALAGYTGSGPIQLWQFLLELLTDKSCQSFISWTGDGWEFKLSDPDEVARRWGKRKNKPKMNYEKLSRGLRYYYDKNIIHKTAGKRYVYRFVCDLQSLLGYTPEELHAMLDVKPDADE

SEQ ID NO: 55305 - DNA, 1458 bp, Artificial Sequence
  derived and/or modified sequence
atgagctacttcgtggacagcgccggcagcagccccgtgccctacagcgcccccagacccgccgtggtgagacagggccccagcaacacctacgaggaccccagaatgaactgcggcttccagagcaactaccaccagcagagaccctgctaccccttctgggacgagatggccacccaggaggtgcccaccggcctggagcactgcgtgagcgacatggagtgcgccgacgtgcccctgctgacccccagcagcaaggagatgatgagccaggccctgaaggccaccttcagcggcttcaccaaggagcagcagagactgggcatccccaaggaccccagacagtggaccgagacccacgtgagagactgggtgatgtgggccgtgaacgagttcagcctgaagggcgtggacttccagaagttctgcatgaacggcgccgccctgtgcgccctgggcaaggactgcttcctggagctggcccccgacttcgtgggcgacatcctgtgggagcacctggagatcctgcagaaggaggacgtgaagccctaccaggtgaacggcgtgaaccccgcctaccccgagagcagatacaccagcgactacttcatcagctacggcatcgagcacgcccagtgcgtgccccccagcgagttcagcgagcccagcttcatcaccgagagctaccagaccctgcaccccatcagcagcgaggagctgctgagcctgaagtacgagaacgactaccccagcgtgatcctgagagaccccctgcagaccgacaccctgcagaacgactacttcgccatcaagcaggaggtggtgacccccgacaacatgtgcatgggcagaaccagcagaggcaagctgggcggccaggacagcttcgagagcatcgagagctacgacagctgcgacagactgacccagagctggagcagccagagcagcttcaacagcctgcagagagtgcccagctacgacagcttcgacagcgaggactaccccgccgccctgcccaaccacaagcccaagggcaccttcaaggactacgtgagagacagagccgacctgaacaaggacaagcccgtgatccccgccgccgccctggccggctacaccggcagcggccccatccagctgtggcagttcctgctggagctgctgaccgacaagagctgccagagcttcatcagctggaccggcgacggctgggagttcaagctgagcgaccccgacgaggtggccagaagatggggcaagagaaagaacaagcccaagatgaactacgagaagctgagcagaggcctgagatactactacgacaagaacatcatccacaagaccgccggcaagagatacgtgtacagattcgtgtgcgacctgcagagcctgctgggctacacccccgaggagctgcacgccatgctggacgtgaagcccgacgccgacgagtag

SEQ ID NO: 55306 - DNA, 1458 bp, Artificial Sequence
  derived and/or modified sequence
atgtcctacttcgtggacagcgcaggatcttcaccagtcccctactccgccccaaggcctgccgtagtgcgccaggggccttccaatacttatgaggaccccaggatgaattgcgggttccagagtaattatcatcagcagagaccctgttatccattctgggacgaaatggctacacaggaagtaccgaccggactggaacattgtgtgagtgacatggaatgcgccgacgttcccttgctgaccccttcctccaaggaaatgatgtctcaggcccttaaggccaccttctcgggtttcaccaaggagcaacagagattgggcatacctaaagacccacggcaatggactgagactcacgtgcgtgattgggtgatgtgggcagtcaatgaattcagtctgaaaggagtggacttccagaagttctgcatgaatggggccgcactgtgcgcgctgggcaaggactgtttcctcgaattagcgccagatttcgttggggacattctatgggagcacctcgagattctgcagaaagaggacgttaaaccttatcaggttaacggcgtaaacccagcctaccctgagtcgcggtatacctctgattactttatctcttacggaatagagcatgcccagtgtgtcccaccatcggaattttcagagccgtcattcattacagagagctatcagacccttcatcccatttcctcagaggagctgctatccttgaaatacgagaacgactacccgagcgtgattctccgcgatccactccagacagataccttgcagaacgattactttgctatcaagcaagaggtggtcaccccagacaacatgtgcatgggaaggacatctagaggaaagttaggtggccaagattctttcgagtcaatagagagttacgactcttgtgatcggttgacccagtcctggtctagccaaagttcctttaacagcctgcagagagtgccaagctatgacagttttgactccgaggactacccagccgccctccccaaccacaaacccaaaggcacatttaaggattatgtaagagacagggccgatttgaacaaggataagcctgtcattccagctgcagcattagccggctatacgggatccgggcctatccaattgtggcagttcctgttagagcttctcacagacaaatcctgccagtcctttatcagctggaccggtgatggatgggaattcaagctcagcgaccccgatgaggtggcacgacgttggggaaagaggaagaataagcccaaaatgaactacgaaaagctgtctaggggcctgcgctattattatgacaagaacatcatccataagactgctggcaaaagatatgtttataggttcgtgtgcgacctgcagtctctcctcggctacacccccgaagagctgcatgccatgctggacgtcaagcccgacgccgacgagtag

SEQ ID NO: 55307 - DNA, 1458 bp, Artificial Sequence
  derived and/or modified sequence
atgagctactttgtggacagcgctggcagcagccctgtgccctacagcgcccccaggcctgctgtggtgcggcagggccccagcaacacctatgaggaccccaggatgaactgtggcttccagagcaactaccaccagcagaggccctgctaccccttctgggatgagatggccacccaggaggtgcccaccggcctggagcactgtgtgtctgacatggagtgtgctgatgtgcccctgctgacccccagcagcaaggagatgatgagccaggccctgaaggccaccttcagcggcttcaccaaggagcagcagaggctgggcatccccaaggacccccggcagtggacagagacccacgtgcgggactgggtgatgtgggccgtgaatgagttcagcctgaagggcgtggacttccagaagttctgcatgaatggagctgccctgtgtgccctgggcaaggactgcttcctggagctggccccagactttgtgggggacatcctgtgggagcacctggagatcctgcagaaggaggatgtgaagccctaccaggtgaatggagtgaacccagcctacccagagagccgctacaccagtgactacttcatctcctatggcatcgagcacgcccagtgtgtgcccccatctgagttcagcgagcccagcttcatcacagagagctaccagaccctgcaccccatcagcagcgaggagctgctgagcctgaagtatgaaaatgactaccccagcgtcatcctgcgggaccccctgcagacagacaccctgcagaatgactactttgccatcaagcaggaggtggtgaccccagacaacatgtgcatgggccgcaccagccggggcaagctgggcggccaggacagctttgagagcattgagagctatgacagctgtgaccggctgacccagagctggagcagccagagcagcttcaacagcctgcagagggtgcccagctatgacagctttgacagcgaggactacccagctgccctgcccaaccacaagcccaagggcaccttcaaggactatgtgcgggacagagctgacctgaacaaggacaagcctgtgatcccagctgctgccctggccggctacacaggcagcggccccatccagctgtggcagttcctgctggagctgctgacagacaagagctgccagagcttcatctcctggacaggagatggctgggagttcaagctgagtgaccctgatgaggtggcccggcgctggggcaagaggaagaacaagcccaagatgaactatgagaagctgagccggggcctgcgctactactatgacaagaacatcatccacaagacagctgggaagcgctacgtgtacagatttgtgtgtgacctgcagagcctgctgggctacaccccagaggagctgcacgccatgctggatgtgaagccagatgctgatgaatag

SEQ ID NO: 55308 - DNA, 1458 bp, Artificial Sequence
  derived and/or modified sequence
atgagctacttcgtggacagcgccggcagcagccccgtgccctactctgcccctagaccggctgtggtccgacaggggccatcaaacacctatgaagatcctcggatgaattgcgggtttcagagtaattatcatcaacaacgaccctgctaccctttctgggatgaaatggccacccaggaagtgcccacggggctggagcattgtgtctctgatatggagtgcgccgacgtgccattactcactccgtcgtcaaaggaaatgatgtctcaggcattgaaagctacattctcgggcttcaccaaggaacagcagagattgggcattcctaaggatccaaggcaatggactgagactcatgtgcgagattgggttatgtgggcagtcaatgaattttctctgaagggcgtagatttccagaaattctgcatgaacggggctgctctgtgtgcgctggggaaagattgctttcttgagttggcacccgattttgtgggcgacatcctctgggagcacttggagatcctccagaaagaagacgtgaagccttatcaagtgaacggggtgaaccctgcatatccagaatcacggtatacttccgactacttcatcagctacgggatcgaacacgcccagtgcgtgccaccatccgaattttccgaaccgagtttcattaccgagagctaccagaccttgcacccgattagttcagaagagctgctgtccttgaaatacgaaaatgactatcctagcgtgattcttcgcgatccgttgcagactgacaccctccagaatgactactttgcgataaagcaggaagtggtaacccccgacaacatgtgtatgggacgaaccagcaggggtaagctaggcggacaggactctttcgagtcaatcgagtcatatgatagctgcgacagactcacccagagctggagtagtcagtcgtcttttaactccctgcagcgagtgccttcttatgattccttcgacagcgaggattaccctgccgccctgcccaaccacaagcccaaaggaacctttaaagactatgttcgggatcgggcggacctgaacaaggacaagccggtgatccctgcagcagccctcgccggctataccggaagtgggcctattcagctgtggcagttcctactcgaactgctcactgataagagctgtcagagcttcatcagttggacaggagacgggtgggaatttaaactcagtgatcctgacgaagttgcccgtaggtggggcaaaagaaaaaacaaacccaaaatgaactatgaaaagctctccagaggactgcgatattactatgacaagaacattattcacaaaaccgctggaaagcgctatgtgtatcggtttgtatgcgatctgcagtcattgttgggctacaccccagaagagttacatgccatgctagatgtgaagcccgatgcagacgagtag

SEQ ID NO: 55309 - DNA, 1458 bp, Artificial Sequence
  derived and/or modified sequence
atgagttatttcgtggactctgccggttcctcccccgtcccgtacagcgcacctaggcctgcggtggtacgtcaggggccatcaaatacttacgaggaccccaggatgaattgtggcttccaaagcaactaccatcagcagagaccttgttatcccttttgggatgaaatggcgactcaggaggtaccaacaggcctggagcattgtgtgtctgatatggagtgcgcggacgtgcccctgctgactccttcctcaaaggaaatgatgtcacaagccctgaaggccactttttccggcttcacgaaggaacagcagcgcctaggcatccccaaggatcccagacagtggactgaaacacatgtcagggattgggtgatgtgggccgtcaacgaattcagtttgaaaggtgtcgattttcaaaaattctgtatgaacggggcagccctgtgcgctctgggtaaggactgctttctggagctcgccccagatttcgtcggggacatcctctgggagcacctcgagattctgcagaaggaagacgtaaaaccctaccaggttaatggagtaaacccagcataccccgaatctaggtatacctctgactactttattagttatggcatcgaacacgctcagtgtgtgccccctagcgaattctctgaaccatctttcatcaccgagagctatcagacgctgcacccgatttcttcagaagagctgctctctctgaaatacgaaaatgactaccctagtgtgattctgagggatccgctgcagactgacactctccaaaatgattacttcgccatcaaacaagaagtggtgacgcccgacaacatgtgcatggggagaacgtcccgtggcaagctgggcggacaggattccttcgaatccatcgagtcatacgactcgtgcgatcgtctgactcagtcctggagctcacaatcttctttcaacagcttgcaacgagtccccagctatgactcatttgacagcgaagactatccggctgccctcccaaatcataaacccaaggggactttcaaggactatgttcgcgaccgggctgacctcaacaaggacaaacctgtcattccggcagccgctctagctggctacaccgggtcggggcctatccaactatggcagttcctgctagagctccttacagataagagctgtcagtcattcatctcctggacgggagatggctgggagttcaagctgtccgatcccgatgaagtggccaggcgctggggcaagagaaagaacaagcctaagatgaactatgagaagctgagtaggggtctgcgctattactacgacaagaacataatccataagaccgccggaaaacgatatgtctacaggtttgtatgtgatctgcagtcattgttgggttacacccctgaggaattgcacgccatgctggacgttaagcccgacgcagatgaatag

SEQ ID NO: 55310 - DNA, 5123 bp, Artificial Sequence
  derived and/or modified sequence
cagactttgagggaagctcactcaggatctgctctccggcaaagtagtaagtgaggtgctgagagcagaatgagctactttgtggattctgctgggagcagccccgtcccttactcagcgcctcgtcctgcagtggtgaggcaaggacctagcaacacttatgaagatcctcgaatgaactgtggtttccagtccaattatcaccagcaaagaccttgctaccccttttgggatgagatggcaactcaggaagttcctactggtcttgaacactgtgtctcagatatggaatgtgcagatgtcccactattaactccaagcagcaaagaaatgatgtctcaagcattaaaagctactttcagtggtttcactaaagaacagcaacgactggggatcccaaaagacccccggcagtggacagaaacccatgttcgggactgggtgatgtgggctgtgaatgaattcagcctgaaaggtgtagacttccagaagttctgtatgaatggagcagccctctgcgccctgggtaaagactgctttctcgagctggccccagactttgttggggacatcttatgggaacatctagagatcctgcagaaagaggatgtgaaaccatatcaagttaatggagtcaacccagcctatccagaatcccgctatacctcggattacttcattagctatggtattgagcatgcccagtgtgttccaccatcggagttctcagagcccagcttcatcacagagtcctatcagacgctccatcccatcagctcggaagagctcctctccctcaagtatgagaatgactacccctcggtcattctccgagaccctctccagacagacaccttgcagaatgactactttgctatcaaacaagaagtcgtcaccccagacaacatgtgcatggggaggaccagtcgtggtaaactcgggggccaggactcttttgaaagcatagagagctacgatagttgtgatcgcctcacccagtcctggagcagccagtcatctttcaacagcctgcagcgtgttccctcctatgacagcttcgactcagaggactatccggctgccctgcccaaccacaagcccaagggcaccttcaaggactatgtgcgggaccgtgctgacctcaataaggacaagcctgtcattcctgctgctgccctagctggctacacaggcagtggaccaatccagctatggcagtttcttctggaattactcactgataaatcctgtcagtcttttatcagctggacaggagatggctgggaattcaaactttctgacccagatgaggtggccaggagatggggaaagaggaaaaacaaacctaagatgaattatgagaaactgagccgtggcctacgctactattacgacaaaaacatcatccacaagacagcggggaaacgctacgtgtaccgctttgtgtgtgacctgcagagcctgctggggtacacccctgaggagctgcacgccatgctggacgtcaagccagatgccgacgagtgatggcactgaaggggctggggaaaccctgctgagaccttccaaggacagccgtgttggttggactctgaattttgaattgttattctattttttattttccagaactcattttttaccttcaggggtgggagctaagtcagttgcagctgtaatcaattgtgcgcagttgggaaaggaaagccaggacttgtggggtgggtgggaccagaaattcttgagcaaattttcaggagagggagaagggccttctcagaagcttgaaggctctggcttaacagagaaagagactaatgtgtccaatcatttttaaaaatcatccatgaaaaagtgtcttgagttgtggacccattagcaagtgacattgtcacatcagaactcatgaaactgatgtaaggcaattaatttgcttctgtttttaggtctgggagggcaaaaaagaggtgggtgggatgaaacatgttttggggggggatgcactgaaaatctgagaactatttacctatcactctagttttgaagcaaagatggacttcagtggggaggggccaaaaccgttgttgtgttaaaatttattttattaaattttgtgccagtattttttttcttaaaaatcgtcttaagctctaaggtggtctcagtattgcaatatcatgtaagtttgtttttatttgccggctgaggattctgtcacaatgaaagaaaactgtttatatagaccccattggaaaagcaaaacgctctcactgagatcagggatcccaaattcatgggacttatataagaaggacaattaatgctgatttgggtacaggggaattatgtgtgtgaatgtcatctacaattaaaaaaaattagcacatccctttacttacttgttatcagtggattctcggggtttggacttaatgttgagctaagaagcattaagtctttgaactgaatgtattttgcatccctggttttggacgacagtaaacgtaggagcactgttgaagtcctggaagggagatcgaaggaggaagattgacttggttctttcttagtcctatatctgtagcatagatgacttggaataaaagctgtatgcatgggcattacccctcaggtcctaagaaataagtcctgaatgcatgtcgttccaaactaacactctgtaatttttcttttatgtcttattttccaagagtcctccattttttgcaccccctcaccgccaactctgttattcagtagagagaagtgtacggctttctgattggtgagtgaaaaagtaacttgagacacgacctaagttgaagagtttagacttgctgagttttagaagtgatggaaattaagagagcatttcaataaaatgtgacttggctgtctttggaagagaagtgcaaggctttcctttgaagaatttaaattagtccggtaggatgtcaggtgagactgtgtatgcaaaatgaatggcacaggtgatgccagggcctcttgcttgggtctgatgtcttggcacagggtaagtgaaggttaattccagaagagaggaatgacttgaaggcaaaggaaactaaggaaggaggttcagtgaggaaaataaggttgtccatgagatttgaatagatttttagttcccccaaggtttaaatacaaacatagtcaagcaaggtagtcatctttctgctggttgtgagggggaatctgaaaatggagttttagaggaaaagtcaacatctaactagtgaggaaaagtgcctaatacaattagaatctccctcactctatagttgcccagttgaaaggataaggaggaggggtggcttttatggacttccatgagagaaggaaagaaatatttcaggtaagcttctcagggctggccctttttgggatttggatgagaaattggaagtactaactactttctagcatatctttaagaaaattgattgttatttactcccagatcctcttgcagacccagaattatcaggaacatagctctgtgattcatgagtgtccccatactgatgaattggagcatccatatggaaagcaaaggcagaattatcccagctgtattattttgatcttttggatgcaggtgccttaatgaagctctcaaaatattttaggagctgctcagggagtgttgggtggaactgtttggactacattgttttctcttagattatgtgatttttgttgggcactggcaaaaggtgtgtgtgtgaatgtgtgcatgtgtgtgaatgttgtgtgtgtgtgtgtgtgtgtgtgtgtgtgtgtgtgtgtgtgtgtttgcagacatgcaaaactgcagctgaaataataccttagatttctaggtaagtctttccacatttcaataatgggtaagagtagaaccagggccgggtatcaattattgcttgctgtttgcaaccaggcataaaatcactttctcaaatcatccaccgttcctattaaatttatgccggaaactctccttctgtgagtataactcctgcagttcctatagcagataagatataagaaagtgcctcctagtgctcctccgcccgcttgtttgctaaaattccctttctctctaagtccaccattttcaagatttgtagatagtgtattagttaagacagctttgtcgatctggccagatgttttttctcctttgtccaaaggccagagaccatcccaggaagagtggtgggtggtttatacactggaaatgttgcgtttatgctttttaaaaacacacgttaacttcagaggaaggatgggcaaatctggtctagctgggtgaaacccttattttcccagagatgccttaacctttgttggttttggctttagggttcagagtcacttttgttcccttctccattctggagagggacttcccctacatagagccctgatttttgtggctgtggggattggaggtagcattcaaagatcagatgtgcttttcctcactttggagatgaacactctgggttttacagcattaacctgcctaaccttcatggtgagaaatacaccatctctcttctagtcatgctgtgcatgccgcttactctgttggggtctatataaatttgttgaactcttacctacattccaaagaagtttcaaggaaccataaatatatgtatacatatacatatataaaatatatatattaaaataaaattatcaggaatactgcctcagttattgaacttttttttttaagaatactttttttttaagctgagaagtatagggatgaaaaagatgttatattgtgtttgactattttccaacttgtattttcatataatttatattttttaaaagctgaaaatttagaagcaagatgaaaaaaaggaaaagcaggtgctttttaaaaatcagaactgaggtagcttagagatgtagcgatgtaagtgtcgatgtttttttaaaaaaaaatgcaaaaaaattcttatggcggagttttttgtttgtttattttagtagctgatgctggcacatcattttgctggagagttttttatatactgtagcctgatttcatattgtattttaaactgtgtgaaattaaaaacaaagaatttcattcataa

SEQ ID NO: 55311 - protein, 1174 aa, Artificial Sequence
  derived and/or modified sequence
MAADLNLEWISLPRSWTYGITRGGRVFFINEEAKSTTWLHPVTGEAVVTGHRRQSTDLPTGWEEAYTFEGARYYINHNERKVTCKHPVTGQPSQDNCIFVVNEQTVATMTSEEKKERPISMINEASNYNVTSDYAVHPMSPVGRTSRASKKVHNFGKRSNSIKRNPNAPVVRRGWLYKQDSTGMKLWKKRWFVLSDLCLFYYRDEKEEGILGSILLPSFQIALLTSEDHINRKYAFKAAHPNMRTYYFCTDTGKEMELWMKAMLDAALVQTEPVKRVDKITSENAPTKETNNIPNHRVLIKPEIQNNQKNKEMSKIEEKKALEAEKYGFQKDGQDRPLTKINSVKLNSLPSEYESGSACPAQTVHYRPINLSSSENKIVNVSLADLRGGNRPNTGPLYTEADRVIQRTNSMQQLEQWIKIQKGRGHEEETRGVISYQTLPRNMPSHRAQIMARYPEGYRTLPRNSKTRPESICSVTPSTHDKTLGPGAEEKRRSMRDDTMWQLYEWQQRQFYNKQSTLPRHSTLSSPKTMVNISDQTMHSIPTSPSHGSIAAYQGYSPQRTYRSEVSSPIQRGDVTIDRRHRAHHPKHVYVPDRRSVPAGLTLQSVSPQSLQGKTPEELTLLLIKLRRQQAELSSIREHTLAQLMQLKLEAHSPKNEILSHHLQRNTIYLDHQLSQDEGRGTLYKYRPEEVDIDAKLSRLCEQDKVVHALEEKLQQLHKEKYTLEQALLSASQEIEMHADNPAAIQTVVLQRDDLQNGLLSTCRELSRATAELERAWREYDKLEYDVTVTRNQMQEQLDHLGEVQTESAGIQRAQIQKELWRIQDVMEGLSKHKQQRGTTEIGMIGSKPFSTVKYKNEGPDYRLYKSEPELTTVAEVDESNGEEKSEPVSEIETSVVKGSHFPVGVVPPRAKSPTPESSTIASYVTLRKTKKMMDLRTERPRSAVEQLCLAESTRPRMTVEEQMERIRRHQQACLREKKKGLNVIGASDQSPLQSPSNLRDNPFRTTQTRRRDDKELDTAIRENDVKPDHETPATEIVQLKETEPQNVDFSKELKKTENISYEMLFEPEPNGVNSVEMMDKERNKDKMPEDVTFSPQDETQTANHKPEEHPEENTKNSVDEQEETVISYESTPEVSRGNQTMAVKSLSPSPESSASPVPSTQPQLTEGSHFMCV

SEQ ID NO: 55312 - protein, 320 aa, Artificial Sequence
  derived and/or modified sequence
MAADLNLEWISLPRSWTYGITRGGRVFFINEEAKSTTWLHPVTGEAVVTGHRRQSTDLPTGWEEAYTFEGARYYINHNERKVTCKHPVTGQPSQDNCIFVVNEQTVATMTSEEKKERPISMINEASNYNVTSDYAVHPMSPVGRTSRASKKVHNFGKRSNSIKRNPNAPVVRRGWLYKQDSTGMKLWKKRWFVLSDLCLFYYRDEKEEGILGSILLPSFQIALLTSEDHINRKYAFKAAHPNMRTYYFCTDTGKEMELWMKAMLDAALVQTEPVKRVDKITSENAPTKETNNIPNHRVLIKPEIQNNQKNKEKKKKKKKK

SEQ ID NO: 55313 - DNA, 3525 bp, Artificial Sequence
  derived and/or modified sequence
atggccgccgacctgaacctggagtggatcagcctgcccagaagctggacctacggcatcaccagaggcggcagagtgttcttcatcaacgaggaggccaagagcaccacctggctgcaccccgtgaccggcgaggccgtggtgaccggccacagaagacagagcaccgacctgcccaccggctgggaggaggcctacaccttcgagggcgccagatactacatcaaccacaacgagagaaaggtgacctgcaagcaccccgtgaccggccagcccagccaggacaactgcatcttcgtggtgaacgagcagaccgtggccaccatgaccagcgaggagaagaaggagagacccatcagcatgatcaacgaggccagcaactacaacgtgaccagcgactacgccgtgcaccccatgagccccgtgggcagaaccagcagagccagcaagaaggtgcacaacttcggcaagagaagcaacagcatcaagagaaaccccaacgcccccgtggtgagaagaggctggctgtacaagcaggacagcaccggcatgaagctgtggaagaagagatggttcgtgctgagcgacctgtgcctgttctactacagagacgagaaggaggagggcatcctgggcagcatcctgctgcccagcttccagatcgccctgctgaccagcgaggaccacatcaacagaaagtacgccttcaaggccgcccaccccaacatgagaacctactacttctgcaccgacaccggcaaggagatggagctgtggatgaaggccatgctggacgccgccctggtgcagaccgagcccgtgaagagagtggacaagatcaccagcgagaacgcccccaccaaggagaccaacaacatccccaaccacagagtgctgatcaagcccgagatccagaacaaccagaagaacaaggagatgagcaagatcgaggagaagaaggccctggaggccgagaagtacggcttccagaaggacggccaggacagacccctgaccaagatcaacagcgtgaagctgaacagcctgcccagcgagtacgagagcggcagcgcctgccccgcccagaccgtgcactacagacccatcaacctgagcagcagcgagaacaagatcgtgaacgtgagcctggccgacctgagaggcggcaacagacccaacaccggccccctgtacaccgaggccgacagagtgatccagagaaccaacagcatgcagcagctggagcagtggatcaagatccagaagggcagaggccacgaggaggagaccagaggcgtgatcagctaccagaccctgcccagaaacatgcccagccacagagcccagatcatggccagataccccgagggctacagaaccctgcccagaaacagcaagaccagacccgagagcatctgcagcgtgacccccagcacccacgacaagaccctgggccccggcgccgaggagaagagaagaagcatgagagacgacaccatgtggcagctgtacgagtggcagcagagacagttctacaacaagcagagcaccctgcccagacacagcaccctgagcagccccaagaccatggtgaacatcagcgaccagaccatgcacagcatccccaccagccccagccacggcagcatcgccgcctaccagggctacagcccccagagaacctacagaagcgaggtgagcagccccatccagagaggcgacgtgaccatcgacagaagacacagagcccaccaccccaagcacgtgtacgtgcccgacagaagaagcgtgcccgccggcctgaccctgcagagcgtgagcccccagagcctgcagggcaagacccccgaggagctgaccctgctgctgatcaagctgagaagacagcaggccgagctgagcagcatcagagagcacaccctggcccagctgatgcagctgaagctggaggcccacagccccaagaacgagatcctgagccaccacctgcagagaaacaccatctacctggaccaccagctgagccaggacgagggcagaggcaccctgtacaagtacagacccgaggaggtggacatcgacgccaagctgagcagactgtgcgagcaggacaaggtggtgcacgccctggaggagaagctgcagcagctgcacaaggagaagtacaccctggagcaggccctgctgagcgccagccaggagatcgagatgcacgccgacaaccccgccgccatccagaccgtggtgctgcagagagacgacctgcagaacggcctgctgagcacctgcagagagctgagcagagccaccgccgagctggagagagcctggagagagtacgacaagctggagtacgacgtgaccgtgaccagaaaccagatgcaggagcagctggaccacctgggcgaggtgcagaccgagagcgccggcatccagagagcccagatccagaaggagctgtggagaatccaggacgtgatggagggcctgagcaagcacaagcagcagagaggcaccaccgagatcggcatgatcggcagcaagcccttcagcaccgtgaagtacaagaacgagggccccgactacagactgtacaagagcgagcccgagctgaccaccgtggccgaggtggacgagagcaacggcgaggagaagagcgagcccgtgagcgagatcgagaccagcgtggtgaagggcagccacttccccgtgggcgtggtgccccccagagccaagagccccacccccgagagcagcaccatcgccagctacgtgaccctgagaaagaccaagaagatgatggacctgagaaccgagagacccagaagcgccgtggagcagctgtgcctggccgagagcaccagacccagaatgaccgtggaggagcagatggagagaatcagaagacaccagcaggcctgcctgagagagaagaagaagggcctgaacgtgatcggcgccagcgaccagagccccctgcagagccccagcaacctgagagacaaccccttcagaaccacccagaccagaagaagagacgacaaggagctggacaccgccatcagagagaacgacgtgaagcccgaccacgagacccccgccaccgagatcgtgcagctgaaggagaccgagccccagaacgtggacttcagcaaggagctgaagaagaccgagaacatcagctacgagatgctgttcgagcccgagcccaacggcgtgaacagcgtggagatgatggacaaggagagaaacaaggacaagatgcccgaggacgtgaccttcagcccccaggacgagacccagaccgccaaccacaagcccgaggagcaccccgaggagaacaccaagaacagcgtggacgagcaggaggagaccgtgatcagctacgagagcacccccgaggtgagcagaggcaaccagaccatggccgtgaagagcctgagccccagccccgagagcagcgccagccccgtgcccagcacccagccccagctgaccgagggcagccacttcatgtgcgtgtag

SEQ ID NO: 55314 - DNA, 3525 bp, Artificial Sequence
  derived and/or modified sequence
atggcagcggatttgaacctcgagtggatcagtctgcccaggtcctggacttacgggatcacaagggggggcagggtgttcttcataaatgaggaggccaagtcaacgacctggctgcacccagtgacaggcgaggccgtggttactggccacaggcggcagagcacggatctgcccaccgggtgggaagaggcctatacatttgagggcgctaggtactatataaatcacaacgagagaaaggttacttgcaaacatcctgtgactggccagccatcccaggacaactgtatctttgtcgtcaacgaacagaccgtagccacgatgaccagcgaagagaaaaaggaacgacctattagtatgatcaacgaagctagcaattacaacgtgacatcagattatgcggtgcacccaatgtcccccgtgggcaggacctcaagagccagtaaaaaggttcataactttgggaagagatccaacagcataaagagaaacccaaatgccccagtggtaaggcgtgggtggctatataaacaggatagtacaggtatgaaactgtggaagaaacgatggttcgtcttgtccgacctctgccttttttactatagagacgagaaggaggagggcattcttggttcaattttacttccatcgttccagatcgcactgctgacttcagaagatcacataaacagaaaatatgcatttaaagctgcccaccctaacatgcggacatattatttctgcaccgacaccgggaaggaaatggagctgtggatgaaagctatgcttgatgcagcgctggtgcaaactgagccagtcaagagagtggacaaaatcacaagcgagaatgctcccaccaaagagaccaataatatacctaaccaccgtgtgcttatcaaacctgaaatacaaaataatcagaagaacaaggagatgagtaagattgaagaaaagaaggccctggaagcagagaagtacgggttccagaaagacggccaggatcgccctttaaccaagatcaatagcgttaagctgaactcgctgcccagtgagtatgaaagcggttccgcatgccccgctcagaccgtgcactaccgtccaattaacctttcaagttcagaaaataaaatcgtaaatgtgtcccttgctgatctgcgcggtggaaatagaccgaatactggccctctctatacggaggcagatagagtcatccaaaggactaatagcatgcagcagctggaacagtggattaagatccagaagggccgcgggcacgaagaggagactcgcggagtgattagctatcaaacactgccccggaacatgccttcacaccgcgcccagattatggctcggtaccctgagggttaccggacccttccaaggaacagtaagacacgcccagaatccatatgcagtgtgacacccagcacgcacgataagaccttgggtcccggcgccgaggaaaagcggaggtctatgagagatgatacaatgtggcagttgtatgagtggcagcagcgacaattttacaataaacagtcaaccctccctcggcactcaacgcttagctccccgaagacaatggttaatatctctgatcagacaatgcactctattcctacgtccccctctcatggctctattgccgcttaccaaggctattcaccacagcgcacctatagaagtgaagtatcaagccctattcagaggggggatgttacgatcgataggaggcatcgggcccatcatccgaaacacgtgtacgtacccgacagaagatccgtgcccgccggactgaccctgcagtctgtgagccctcagagtcttcaaggcaagacgcctgaagagctgacccttctgcttatcaagctccggaggcagcaggcagagctgtcatctattcgagagcacaccctggctcagctgatgcaattaaagcttgaggctcacagcccaaagaatgagatcctctctcaccaccttcaaagaaacacgatctacctggatcaccagctgagtcaggacgagggacgaggtaccttatataaatacaggccagaagaagttgacatagatgcaaaactttcccggttatgcgaacaggacaaggtcgttcacgcccttgaggagaagctgcagcaactgcataaggaaaaatacaccttggagcaagcacttctgtctgcctcacaggagatcgagatgcacgctgacaatcccgcagcaatccagacagtggttctgcagagggatgatctccagaatggattactctcaacgtgtcgggaactttctagagccaccgctgagctggaaagggcctggcgagaatatgataagctggaatatgacgtcactgtgactcggaaccagatgcaggagcaactcgaccacctcggagaagtccaaacggaatcagcaggcatccagcgggcccaaatccagaaggaactgtggcgtatccaagatgtcatggaaggtctcagtaagcacaaacaacaacggggcacaactgagatcggaatgataggttccaagcccttcagcacggtaaagtacaagaacgaaggaccagattacagactctataaaagcgagccggaactaaccacggtggccgaagttgatgagtctaacggtgaagaaaagagcgagcccgtatctgaaatcgagacaagcgtggtgaagggaagccactttcctgtgggggtcgtgcccccccgcgccaagtcgcccacacctgagtcaagtaccatcgcttcttatgtaacgctaaggaagactaagaagatgatggacctaaggaccgaacgcccaaggtccgctgtggagcaactttgtctagccgagtccacaagacctcggatgactgttgaagagcaaatggagcgcatacgtcggcatcaacaggcgtgcctacgtgagaagaaaaaaggcctgaacgttatcggcgcatctgatcaatcgcccttgcagtcaccaagtaatttgagagataaccccttccgcacaactcagacccgccgtcgcgatgataaggaattagacactgccatcagggagaacgacgtcaagcccgatcatgagactccagcgactgaaatagtgcaactgaaggaaacagaacctcagaacgtcgacttttccaaggaattaaaaaaaactgagaacatttcctatgagatgctgtttgagccagagcccaatggagttaacagtgtggagatgatggataaagagaggaataaagataagatgccggaggacgtgacattctccccccaggatgaaacacaaactgccaaccataagcccgaggaacaccccgaagaaaataccaaaaattcagtggacgagcaagaagagactgtgatatcgtatgaaagtacccctgaagtttcccgaggtaaccagaccatggcggtgaaaagtctgagcccatccccagaatcatcagcatctccggtgccatccactcagccacaactgaccgaaggctcccacttcatgtgtgtatag

SEQ ID NO: 55315 - DNA, 3525 bp, Artificial Sequence
  derived and/or modified sequence
atggccgctgacctgaatttggaatggatctctctgccccggtcctggacctatggtattactcgtggcggccgggtattttttatcaacgaggaggccaagagcaccacatggctacacccagtcactggggaggcagtggtcacaggccaccggcgacagagcacagacctgcccacaggctgggaggaagcctacacattcgaaggtgctcgttactacatcaaccacaatgagcgaaaagtcacatgcaaacaccctgtgaccgggcaaccctcccaggataactgcatattcgtggtgaatgagcagaccgttgccacaatgacatcggaggagaaaaaggagagacccatcagcatgatcaatgaggcttctaactataatgtgaccagcgattatgcagtgcatcccatgtcccccgtcggtaggacttccagggccagcaagaaggtgcacaatttcggtaaacgatccaactcaattaagcgaaatccgaatgcacctgtggtgaggcgtggctggctgtacaaacaggactctaccggcatgaaactttggaagaaacgatggtttgtactgagtgatctttgtctattctattacagggatgaaaaagaggaagggatcctgggaagcatcctgctcccatcttttcagattgctctccttaccagcgaagaccatattaacagaaaatatgcctttaaggcagcgcatccgaacatgcgaacttattacttctgtacagacacgggcaaagaaatggagctgtggatgaaagccatgctggacgccgccttagttcagacagagcccgttaagagagtggacaagattacctccgagaacgcccctaccaaggagaccaataacatccccaatcaccgcgtgctcatcaaacccgagattcagaacaaccaaaagaacaaagagatgtctaaaattgaggagaagaaagctctggaggctgagaagtatggtttccagaaagatgggcaggacaggcccctgacgaaaattaatagcgtgaagctaaactccctgccgtcggagtatgaatctggcagcgcctgcccagcccagacagtgcattataggccaatcaacttgtcctctagcgagaacaaaattgtaaatgtgtctctcgccgatttgcgggggggcaatcgccctaacaccggccccctctacactgaagcagaccgcgtaatccagagaacgaattccatgcagcagctcgagcaatggattaagatccagaagggacgtggccacgaggaagaaacaaggggggtcatctcctaccagacgctgccgagaaatatgcctagccaccgcgcacagatcatggcgcgctaccccgagggctaccgcacgctgcctcggaattcgaagacgagacctgagtctatctgcagcgtgaccccttccacacatgacaagactctaggtcccggagcagaagagaagaggagatccatgcgtgacgacacaatgtggcagctgtatgaatggcagcagagacaattctacaataagcagtcgacgcttccaagacactcaacactgagctcacccaaaaccatggtgaatatttcagatcagaccatgcactcaattcctacttcaccatctcatggatccatcgccgcctaccagggatatagcccacagcgcacctacagatctgaggtgagctcccctattcagagaggtgatgtgaccatagatcgcagacacagagctcaccatcccaaacatgtatatgtgcccgaccggaggagcgtgcctgcaggactcactctccaatctgtaagccctcagagtcttcagggcaagactccggaagagctcactctgctgctcataaagctgcgacggcagcaggccgaactgtcctctattcgcgagcataccctggcccagcttatgcagctgaaattagaggctcacagtccaaaaaacgagatcctgagtcatcatctccaacggaacacaatttacctggatcaccaattgtcccaggatgagggccgcgggaccctatacaagtataggcccgaggaagtggatatagatgccaagctctcccgcttgtgcgagcaagataaagtggtgcacgcattggaagagaaattacagcagctgcacaaggagaagtatacactggagcaggcgctgttgagtgctagtcaggagatcgagatgcacgctgacaacccagccgctattcagactgtcgtattgcagcgggatgatctgcagaatggcctgctttcgacttgcagagagcttagcagggcgacagctgagcttgaaagagcatggagggagtatgacaaactagagtacgatgtgaccgtcaccagaaaccagatgcaagagcaactggatcatctgggcgaggtacagacggaatccgccggcattcaacgcgcacagattcagaaggaactctggcgtatccaggacgttatggaggggctgagtaagcacaagcaacaaagaggcactactgagataggtatgataggcagcaagccttttagtactgttaagtacaagaatgagggtcctgactaccgattatacaagagcgagcccgagctgacaacagtcgccgaggtcgacgaatccaacggcgaggagaaatcagaacctgtcagcgagattgaaacaagcgtagtgaaaggctcacattttcctgtgggagtggtaccgccacgagcaaagagtcccacccctgaatcctctactatagcctcttacgtcactctccgcaaaactaagaagatgatggacctcagaacagagaggccaagatccgctgtggaacagttgtgtttagcagagagcaccaggcccaggatgactgtggaggagcaaatggaaaggatccggagacaccagcaggcctgtctgcgcgagaagaagaagggattaaacgtgatcggtgcatctgaccagtctcccctgcagagccccagcaatctgcgggacaatcctttcagaaccacgcagacgaggaggcgcgatgacaaagagctggatacagcgattagggaaaatgacgttaagcccgaccacgagacccctgccaccgagatcgttcagctgaaggagaccgagcctcagaatgtggattttagtaaggaactcaagaagactgagaacatttcttacgagatgctgtttgagccggaacctaatggcgtaaatagcgtggaaatgatggataaggagagaaacaaggataaaatgcccgaagacgtaaccttttctcctcaggacgaaacacaaacagccaaccacaagccagaggaacaccccgaggaaaataccaaaaattctgtcgacgagcaggaggaaacagtgatctcatacgagtcaacccctgaagtgtcccgtgggaaccaaacgatggctgtgaagtctctgtcacccagtcccgagagctctgcctcacctgtaccatccacacagcctcaactgacagagggctcccatttcatgtgcgtttag

SEQ ID NO: 55316 - DNA, 3525 bp, Artificial Sequence
  derived and/or modified sequence
atggctgctgacctgaacctggagtggatcagcctgcccaggtcctggacctacggcatcacccggggcggccgggtcttcttcatcaatgaggaggccaagagcaccacctggctgcaccctgtgactggagaggccgtggtgacaggccaccggcggcagagcacagacctgcccaccggctgggaggaggcctacacctttgagggcgcccgctactacatcaaccacaatgaaaggaaggtgacctgcaagcaccctgtgacaggccagcccagccaggacaactgcatctttgtggtgaatgagcagacagtggccaccatgaccagcgaggagaagaaggagcggcccatctccatgatcaatgaggccagcaactacaacgtgaccagtgactatgctgtgcaccccatgagccctgtgggccgcaccagccgggccagcaagaaggtgcacaactttgggaagaggagcaacagcatcaagaggaaccccaatgcccctgtggtgcggcggggctggctgtacaagcaggacagcacaggcatgaagctgtggaagaagcgctggtttgtgctgagtgacctgtgcctcttctactacagagatgagaaggaggagggcatcctgggcagcatcctgctgcccagcttccagatcgccctgctgaccagcgaggaccacatcaacagaaaatatgccttcaaggccgcccaccccaacatgaggacctactacttctgcacagacaccgggaaggagatggagctgtggatgaaggccatgctggatgctgccctggtgcagacagagcctgtgaagagggtggacaagatcaccagtgaaaatgcccccaccaaggagaccaacaacatccccaaccaccgggtgctgatcaagccagagatccagaacaaccagaagaacaaggagatgagcaagattgaggagaagaaggccctggaggccgagaagtatggcttccagaaggatggccaggaccggcccctgaccaagatcaacagcgtgaagctgaacagcctgcccagtgaatatgaaagtggcagcgcctgcccagcccagacagtgcactaccggcccatcaacctgagcagcagcgagaacaagatcgtgaatgtgtccctggccgacctgcggggcggcaaccggcccaacacaggccccctgtacacagaagctgacagagtcatccagaggaccaacagcatgcagcagctggagcagtggatcaagatccagaagggccggggccacgaggaggagacccggggcgtcatctcctaccagaccctgcccaggaacatgcccagccaccgggcccagatcatggcccgctacccagagggctaccgcaccctgcccaggaacagcaagaccaggcctgagagcatctgcagcgtgacccccagcacccatgacaagaccctgggccctggagctgaggagaagaggaggtccatgagagatgacaccatgtggcagctgtatgagtggcagcagaggcagttctacaacaagcagagcaccctgcccaggcacagcaccctgagcagccccaagaccatggtgaacatcagtgaccagaccatgcacagcatccccaccagccccagccacggcagcattgctgcctaccagggctacagcccccagaggacctacagaagtgaggtgagcagccccatccagagaggagatgtgaccatcgacagaagacaccgggcccaccaccccaagcacgtgtatgtgcctgaccggcgctctgtgcctgctggcctgaccctgcagagcgtgagcccccagagcctgcagggcaagaccccagaggagctgaccctgctgctgatcaagctgcggcggcagcaggccgagctgagcagcatccgggagcacaccctggcccagctgatgcagctgaagctggaggcccacagccccaagaatgagatcctgagccaccacctgcagaggaacaccatctacctggaccaccagctgagccaggatgagggccggggcaccctgtacaagtacagacctgaggaggtggacattgatgccaagctgagccggctgtgtgagcaggacaaggtggtgcacgccctggaggagaagctgcagcagctgcacaaggagaagtacaccctggagcaggccctgctgagcgccagccaggagattgagatgcatgctgacaacccagctgccatccagacagtggtgctgcagagagatgacctgcagaatggcctgctgagcacctgccgggagctgagccgggccacagctgagctggagcgggcctggagagaatatgacaagctggagtatgatgtgacagtgaccaggaaccagatgcaggagcagctggaccacctgggggaggtgcagacagagagcgctggcatccagagggcccagatccagaaggagctgtggaggatccaggatgtgatggagggcctgagcaagcacaagcagcagaggggcaccacagagatcggcatgattggcagcaagcccttcagcacagtgaagtacaagaatgaaggaccagactaccgcctgtacaagtctgagcctgagctgaccaccgtggccgaggtggatgagagcaatggagaggagaagtctgagcctgtgtctgaaattgagacctctgtggtgaagggcagccacttccctgtgggcgtggtgcccccccgggccaagagccccaccccagagagcagcaccatcgccagctatgtgaccctgaggaagaccaagaagatgatggacctgaggacagagcggcccaggtctgctgtggagcagctgtgcctggccgagagcacccggcccaggatgacagtggaggagcagatggagcgcatccgccgccaccagcaggcctgcctgcgggagaagaagaagggcctgaatgtgattggagccagtgaccagagccccctgcagagccccagcaacctgcgggacaaccccttccgcaccacccagaccaggagaagagatgacaaggagctggacacagccatcagagaaaatgatgtgaagccagaccacgagaccccagccacagaaattgtgcagctgaaggagacagagccccagaatgtggacttcagcaaggagctgaagaagacagagaacatctcctatgagatgctgtttgagcctgagcccaatggagtgaacagcgtggagatgatggacaaggagaggaacaaggacaagatgccagaagatgtgaccttcagcccccaggatgagacccagacagccaaccacaagccagaggagcaccctgaggagaacaccaagaacagcgtggatgagcaggaggagaccgtcatctcctatgagagcaccccagaggtgtcccggggcaaccagaccatggctgtgaagagcctgagccccagccctgagagcagcgccagccctgtgcccagcacccagccccagctgacagagggcagccacttcatgtgtgtgtag

SEQ ID NO: 55317 - DNA, 3525 bp, Artificial Sequence
  derived and/or modified sequence
atggccgccgacctgaacctggagtggatcagcctgccccggagctggacatacgggatcactaggggaggtcgagtgttctttatcaacgaagaagcgaagtctactacttggctgcacccagtcacaggagaggccgtcgtgactggccacaggagacaatccaccgatcttccaactggctgggaagaagcttacacatttgagggagcacgttactacatcaatcataacgaaaggaaggtgacatgcaaacaccccgtcacaggccagccatcacaagataactgcatttttgtggtgaatgaacagaccgtggccactatgaccagtgaggagaagaaagaaaggcccattagcatgataaacgaagcatccaactataacgtgacctctgactacgcggtgcatccaatgagtccagtcgggcggactagcagagcgtctaagaaggttcataacttcggcaaacgctctaatagcattaagcggaatccaaacgcccccgtggtccgccgcggatggctttacaagcaggattccaccgggatgaagctttggaaaaagcggtggtttgtactttcagatctgtgtctattctactaccgggacgaaaaggaagagggtattctggggtctatactcctcccctctttccaaatcgctctgttgaccagtgaagatcacataaaccggaagtacgctttcaaagccgctcatcccaacatgagaacttactacttctgtactgatacagggaaagagatggaattgtggatgaaggctatgctcgacgcggcgcttgtgcagactgaacctgtgaagagagtcgacaagataactagtgagaatgcgcccacaaaggagactaacaacattcctaatcacagagtactgatcaagcccgaaatccagaacaatcagaagaacaaggaaatgtcaaaaatcgaggagaaaaaggccctagaagccgagaaatacggctttcagaaggacgggcaggacagacctctgactaaaatcaacagtgttaagctgaactcgttgccttccgaatacgaatctggaagcgcctgcccagctcagacagtacattaccgacctatcaacctcagcagctctgagaataaaattgtcaatgtgtcattggccgatctgcgcggcggcaaccgtcccaatacaggtcccctttacactgaggccgaccgagtcatccagcgcaccaattcaatgcagcagctggaacaatggattaagatacagaagggaaggggccacgaagaggaaactaggggagtgataagttatcagacactaccccggaacatgccttcacatagagcacaaattatggcacgatacccagaaggctaccgaacgctgccacggaatagtaaaactagaccagagtcaatttgtagtgttacgccgagtactcatgataaaacactcggccctggggccgaggagaaacggcgaagtatgcgggacgacacaatgtggcagttgtatgagtggcaacagcgtcaattctacaacaagcaaagtacactgcctcgacacagtactttatcttccccgaagactatggttaacatcagtgatcagaccatgcacagtattccaaccagtccctcacacgggagcattgcggcttaccaaggttacagtccacagcgtacatatcgcagcgaggtcagttccccaatacagaggggtgacgtcacaatcgaccgcaggcatcgtgctcaccaccccaagcacgtgtacgtgccagaccgcaggtcggtaccagctggactgaccctgcaatctgtttctccgcaaagcctccagggcaaaacacccgaggaactgactctacttcttattaagctgagaagacagcaggccgaactgtccagcattagggaacataccctggcacaactcatgcagctcaagctcgaggctcacagccccaagaacgaaattttatctcatcaccttcagagaaatacgatctatctggatcaccagcttagccaagacgaaggcagaggcacactgtacaaataccggcctgaagaagtggacattgacgccaagctttcccgcctctgtgaacaagataaggtggttcatgcactggaagagaaactgcagcagctccacaaggagaaatataccctggaacaggctttgctttcagcctcgcaggaaatcgaaatgcacgccgacaacccagctgccatccagaccgtggtgctccaaagagatgatttacagaatggactgttgtcgacctgtagagaactgtcccgcgccacagctgaactcgagcgagcctggagagaatacgataagttggagtacgatgtgacagttacccgcaaccaaatgcaggagcaactcgatcacctcggcgaagtgcagaccgaatccgcaggcatacagcgcgctcaaatccaaaaggaactgtggcgcatacaggatgtaatggagggactcagtaagcataagcagcagcgaggcactacggaaatcggcatgataggctccaaacctttttctacagtgaagtataagaacgagggcccagactatcgactttataagtccgagccagaactcacaaccgtggccgaggtcgatgagtctaacggggaggagaaatctgagcccgtatcagagatagagacatccgtggtgaaggggtcccacttcccagtgggtgttgtgccaccccgagcaaagtcacccactcctgagtctagcaccatcgcaagttacgtgactctgagaaaaactaagaagatgatggatcttcgtacagagcggcccagaagtgccgtggagcagctgtgtctcgctgaatctacccgtccacggatgaccgtagaggagcaaatggagaggatccggaggcaccaacaggcgtgcctcagagagaagaagaaggggctaaatgtcattggcgccagcgatcagtcacccttgcaatccccttctaatttacgggacaaccccttccggaccactcagacacgccgccgggatgataaagagttggacaccgctattcgagagaacgacgtgaagccagatcatgaaaccccagcgaccgaaatagtccaactgaaagaaaccgagccccagaatgtcgacttcagtaaggagctcaaaaaaacagaaaatatttcttacgagatgttattcgaaccggagccaaacggcgtaaattcagtcgaaatgatggacaaggagcgtaataaggataagatgccagaggatgtgaccttctctccacaggatgagacccagacagccaaccacaagcccgaagagcacccagaagaaaataccaagaattcggttgatgagcaggaagagacggtaatatcttatgaatccaccccagaggtcagtcgcggaaaccaaacaatggctgtgaaaagtctgagtccatccccggagagtagcgccagccccgtcccctctacacagcctcaattaacagagggatcccattttatgtgcgtctag

SEQ ID NO: 55318 - DNA, 3525 bp, Artificial Sequence
  derived and/or modified sequence
atggccgccgacctgaacctggagtggatcagcctgccccggagctggacgtatggtataacccgtgggggccgcgtcttttttatcaatgaggaagcgaagagcaccacatggctgcaccccgtaactggcgaggctgtcgtgactggccataggcggcagtcaactgatctgcccacaggctgggaggaggcttacacatttgagggagctcggtactacatcaaccataacgagcgcaaagtcacgtgcaagcatcctgtgactgggcagccttctcaagacaattgcatctttgtggtaaacgagcagaccgtggccacaatgacatcggaggaaaagaaggagcgcccaatcagtatgatcaacgaggcgtccaattataacgtaacctccgactatgccgtgcacccaatgagccccgttgggagaaccagtcgggctagcaagaaagtgcataactttggcaaacggagcaatagcattaagcggaatcccaacgctcctgttgtgaggaggggatggttgtacaagcaggacagcactggtatgaagctctggaaaaagagatggtttgtgctgtctgatctctgtctcttctattacagagacgaaaaagaagagggcattctgggctctatattactaccatccttccagatcgccctgctcaccagcgaagatcacatcaaccgcaagtacgcattcaaagctgcacaccctaacatgcgaacctattacttttgtaccgacaccggcaaggaaatggaactatggatgaaagctatgttggacgccgctctggtgcagacagagccagttaaacgggtggacaaaattacatcagagaacgctccgacgaaagaaaccaacaatattcctaaccaccgcgtgttaatcaaacctgagatccagaataaccagaaaaacaaggagatgtctaagatcgaagaaaagaaggccctcgaagcagaaaaatacgggtttcaaaaggacggccaggaccgaccacttaccaagattaatagtgtgaagctaaactctctgccgtcggagtatgaaagcggttcagcctgcccggcccagaccgtgcactatcgaccaatcaacctgtcatcttcggaaaataaaattgttaacgtgagcctggccgatttgaggggtggtaacagaccaaacaccggacccttgtataccgaggcagatagggtgatccagcggacaaacagtatgcagcaactggagcagtggataaagatccagaagggacggggccacgaggaggaaacacggggggtgattagctatcagacactgccccgaaatatgccgtcacatcgggcccagattatggctagataccctgagggctatcgcactctgccgcgtaatagcaaaactagacccgagtcaatctgttctgtcaccccctctacacacgacaagaccttgggacctggtgctgaagaaaaaaggcgctctatgcgagacgatacaatgtggcagttgtatgagtggcaacagaggcagttttataataaacagtctaccctcccgagacactccacactctccagccccaagactatggttaatattagcgaccagacgatgcatagcatcccaaccagtccttcacatggctccattgcggcgtaccagggctattcgccacagcgcacatatcggagtgaggtttcttctcccatacaacgtggagacgtgacaatcgaccgaagacatcgggcccaccatccaaagcatgtatacgttccagataggcgcagtgtgcctgctggcctcactctccagtcagttagcccacagtcccttcaggggaagacaccagaggagctgacactgctactgatcaagttgagacggcaacaggcagaactttcctccatcagagagcatacactggcacagttaatgcagctcaagttagaagctcactcgccaaagaacgagatcctgtcacatcatttgcagagaaatacaatctatctggaccatcagttgtcccaagatgagggaagaggtactttgtacaaataccgccctgaggaggtcgatattgacgccaaactgtcccggttgtgtgagcaggacaaagtcgttcacgcgctcgaggaaaagttgcagcagctgcacaaggaaaagtacaccctggagcaggccttgctgagcgcaagtcaggagattgagatgcacgccgacaatccggcagccatccagactgtcgttctgcaacgggacgatctgcagaacggcctgctgtctacgtgcagggaactcagtagggccaccgccgagctggagcgcgcctggagggagtatgataagctcgaatacgacgttacagttacccgcaaccagatgcaggaacaattggaccacctgggggaagtgcagacagagtctgccggtattcagagggcgcagattcagaaagaactgtggcggatacaggatgtgatggaaggcttgagcaagcataaacaacaacggggcaccacggagatcggaatgatcggctcaaagcctttttcaacagtgaagtacaaaaatgagggaccggactaccggctgtataagtctgagcctgaattaaccaccgtggcggaggtggacgaatcaaacggggaagaaaagtcggaacccgtcagcgagatcgagacatccgtcgtgaaaggtagccacttccccgtcggtgttgtgccgcccagagctaagtccccaactccagagagctctacaatcgcgagctatgtgacactgagaaaaactaagaaaatgatggacctgagaacagagcgaccacggagtgccgttgaacaactgtgcttggccgaatccacgcggcccagaatgacagtggaggagcaaatggagcggatcaggcgccaccagcaggcctgtctaagagagaaaaaaaagggactgaacgtgatcggggcgtccgatcaaagtcccttgcagagcccaagcaatctgagggataacccattcaggacgacgcagacacgccgccgcgacgacaaagaactggatacagcgatcagggaaaacgacgtaaaacccgaccacgagactccggccaccgagattgttcagttaaaggagacagagccacagaacgtcgacttcagtaaagaattgaagaagaccgagaacattagctatgaaatgctgttcgagccggagccaaacggcgtgaactccgtagaaatgatggataaggagagaaacaaggataagatgccagaggatgtgactttctccccccaagatgagacgcagacagccaatcacaagcccgaggaacatcctgaggaaaacaccaagaacagcgtcgacgaacaggaggaaaccgtcatttcatacgagtccacccccgaagtttccagaggcaatcagacgatggccgtgaagagtttatccccttctccggagagttccgcaagccccgtccctagcacacagcctcagctgacggagggatcacacttcatgtgtgtctag

SEQ ID NO: 55319 - DNA, 4489 bp, Artificial Sequence
  derived and/or modified sequence
gcgctcccttcgctcgctcgttccctcctccctcggcagccgcggcggcagcaggagaaggcggcggcggcggctagggatcagacatggcggcggatctgaacctggagtggatctccctgccccggtcctggacttacgggatcaccaggggcggccgagtcttcttcatcaacgaggaggccaagagcaccacctggctgcaccccgtcaccggcgaggcggtggtcaccggacaccggcggcagagcacagatttgcctactggctgggaagaagcatatacttttgaaggtgcaagatactatataaaccataatgaaaggaaagtgacctgcaaacatccagtcacaggacaaccatcacaggacaattgtatttttgtagtgaatgaacagactgttgcaaccatgacatctgaagaaaagaaggaacggccaataagtatgataaatgaagcttctaactataacgtgacttcagattatgcagtgcatccaatgagccctgtaggcagaacttcacgagcttcaaaaaaagttcataattttggaaagaggtcaaattcaattaaaaggaatcctaatgcaccggttgtcagacgaggttggctttataaacaggacagtactggcatgaaattgtggaagaaacgctggtttgtgctttctgacctttgcctcttttattatagagatgagaaagaagagggtatcctgggaagcatactgttacctagttttcagatagctttgcttacctctgaagatcacattaatcgcaaatatgcttttaaggcagcccatccaaacatgcggacctattatttctgcactgatacaggaaaggaaatggagttgtggatgaaagccatgttagatgctgccctagtacagacagaacctgtgaaaagagtggacaagattacatctgaaaatgcaccaactaaagaaaccaataacattcccaaccatagagtgctaattaaaccagagatccaaaacaatcaaaaaaacaaggaaatgagcaaaattgaagaaaaaaaggcattagaagctgaaaaatatggatttcagaaggatggtcaagatagacccttaacaaaaattaatagtgtaaagctgaattctctgccatctgaatatgagagtgggtcagcatgccctgctcagactgtgcactacagaccaatcaacttgagcagttcagagaacaaaatagtcaatgttagcctggcagatcttagaggtggaaatcgccccaatacagggcccttatacacagaggccgatcgagtcatacagagaacaaattcaatgcagcagttggaacagtggattaaaatccagaaggggaggggtcatgaagaagaaaccaggggagtaatttcttaccaaacattaccaagaaatatgccaagtcacagagcccagattatggcccgctaccctgaaggttatagaacactcccaagaaacagcaagacaaggcctgaaagtatctgcagtgtaaccccttccactcatgacaagacattaggacccggagcggaggagaaacggaggtccatgagagatgacacaatgtggcagctctacgaatggcagcagcgtcagttttataacaaacagagcaccctccctcgacacagtactttgagtagtcccaaaaccatggtaaatatttctgaccagacaatgcactctattcccacatcaccttcccacgggtcaatagctgcttatcagggatactcccctcaacgaacttacagatcggaagtgtcttcaccaattcagagaggagatgtgacaatagaccgcagacacagggcccatcaccctaagcatgtctatgtgcctgacagaaggtcagtgccagctggcctgactttacagtctgttagtccccagagcctccaagggaaaacgccagaggagcttacgctgctgctaataaagctgagacggcagcaagccgaactgagtagtatccgggagcatacgttagcacagctcatgcagctaaagcttgaggcccacagcccaaagaatgaaattctttcacatcatctccaaaggaacaccatatatttggatcatcagctgtcacaagatgaaggtagaggcacattatacaaatacagacctgaagaagtagatattgatgccaagttaagccgattatgtgaacaagataaagtggtgcatgctctggaagagaaacttcagcaactccacaaggagaaatacacgcttgagcaagctttgctatcagccagccaagagatagaaatgcatgcagataacccagcagccattcagacagtggtgttacaaagggatgatttacaaaatggactgcttagtacgtgtcgagaactttctcgagccactgccgaattggaacgagcatggagagaatatgataagttagaatacgatgtaactgttaccaggaaccagatgcaagagcagctggatcaccttggtgaagttcagacggaatcagcaggaattcagcgtgcacagattcagaaagaactttggcgaattcaggatgtcatggaagggctgagtaaacataagcagcaaagaggtactacagaaataggtatgataggatcaaagcctttctcaacagttaagtacaaaaatgagggtccagattatagactctacaagagtgaaccagagttaacaacagtggcagaagttgatgaatctaatggagaagaaaaatcagaacctgtttcagagatagaaacttcagttgttaaaggttcccactttcctgttggagtagtccctccaagagcaaaatcaccaacacccgaatcttcgacaatagcttcctatgtaaccttgaggaaaactaagaagatgatggatctaagaacggaaagaccaagaagtgcagtggaacagctctgtttggctgaaagtactcgaccaaggatgactgtggaagagcaaatggaaagaataagaagacatcaacaagcgtgcctgagggagaagaaaaaagggttaaatgttatcggtgcttcagaccagtcacccttacaaagcccttcaaatttaagggataatccatttaggactactcagactcgaaggagggatgataaggaactggacactgccattagagaaaatgatgtaaagccagaccatgaaactcctgcaacagaaattgttcaactaaaagaaaccgaaccccaaaatgtggacttcagcaaagagttaaaaaaaactgaaaacatttcatatgaaatgctttttgaacctgagccaaatggagtaaattctgtggaaatgatggataaagaaagaaacaaagacaaaatgcctgaggatgttacattcagccctcaagatgaaacacagaccgcaaatcataaaccagaagagcatcctgaagaaaatacaaagaacagtgttgacgaacaggaagaaactgttatttcttacgaatcaactcctgaggtttctagaggaaatcaaacaatggcagtgaaaagtctgtccccatctcctgagtcctcggcatcgccagttccatccactcagccgcagctcacagaaggatcacatttcatgtgtgtgtagtcttagaagaactatactgacttctgttgaaaccattcaaagctaaagacatggaccttcagcagtgtaagaagatattgtacagtatattttaaatctatgaaattcatagttctgatgcttttggtcacagagcatcattttatcacttctggaaaatgtttattccaaaacagctttaatggcccatatgtacacttcgtaatctcaaggttattattctgacaccagcttgctgctatgatttcagagcacataagtaaaggtgctttttaatgtgcagtctatttccagagcttacttagttgctgatttccagatttcgatgtttcttaagtctaggtgaatttatatatatatttttttgcttttcattttctaaagttagttattatttccattgaagcttgttttcttttttttcttcccattttagctactgcagtgcttttgtttcacacttgatttgtaaaaattttatatatatgtatttaaaatgtgccattttattgctaagtgaagtatgtcctgttttctgctataattctttctcggtcagattgcaatgtcagcagttactgccacactcctgtcagcttaaacacaaatgttactgcttatcttttcttaaaaaaaaaaaaaacaaagtgtaggtattttgaagtactgggcttatatttcattggaatacatgtgtacagcaataagcaggtttccaaatccggtacttagtttgtgtacaaatgtaattatgttcattgtgtatatattatacaatgagcacatgtaatgtattaaaggctacttactattgtttaaatgcaaatgttcatatctcatttctttttttatcatgttaaataaatgttgatgttctt

SEQ ID NO: 55320 - DNA, 6487 bp, Artificial Sequence
  derived and/or modified sequence
agacatggcggcggatctgaacctggagtggatctccctgccccggtcctggacttacgggatcaccaggggcggccgagtcttcttcatcaacgaggaggccaagagcaccacctggctgcaccccgtcaccggcgaggcggtggtcaccggacaccggcggcagagcacagatttgcctactggctgggaagaagcatatacttttgaaggtgcaagatactatataaaccataatgaaaggaaagtgacctgcaaacatccagtcacaggacaaccatcacaggacaattgtatttttgtagtgaatgaacagactgttgcaaccatgacatctgaagaaaagaaggaacggccaataagtatgataaatgaagcttctaactataacgtgacttcagattatgcagtgcatccaatgagccctgtaggcagaacttcacgagcttcaaaaaaagttcataattttggaaagaggtcaaattcaattaaaaggaatcctaatgcaccggttgtcagacgaggttggctttataaacaggacagtactggcatgaaattgtggaagaaacgctggtttgtgctttctgacctttgcctcttttattatagagatgagaaagaagagggtatcctgggaagcatactgttacctagttttcagatagctttgcttacctctgaagatcacattaatcgcaaatatgcttttaaggcagcccatccaaacatgcggacctattatttctgcactgatacaggaaaggaaatggagttgtggatgaaagccatgttagatgctgccctagtacagacagaacctgtgaaaagagtggacaagattacatctgaaaatgcaccaactaaagaaaccaataacattcccaaccatagagtgctaattaaaccagagatccaaaacaatcaaaaaaacaaggaaatgagcaaaattgaagaaaaaaaggcattagaagctgaaaaatatggatttcagaaggatggtcaagatagacccttaacaaaaattaatagtgtaaagctgaattctctgccatctgaatatgagagtgggtcagcatgccctgctcagactgtgcactacagaccaatcaacttgagcagttcagagaacaaaatagtcaatgttagcctggcagatcttagaggtggaaatcgccccaatacagggcccttatacacagaggccgatcgagtcatacagagaacaaattcaatgcagcagttggaacagtggattaaaatccagaaggggaggggtcatgaagaagaaaccaggggagtaatttcttaccaaacattaccaagaaatatgccaagtcacagagcccagattatggcccgctaccctgaaggttatagaacactcccaagaaacagcaagacaaggcctgaaagtatctgcagtgtaaccccttccactcatgacaagacattaggacccggagcggaggagaaacggaggtccatgagagatgacacaatgtggcagctctacgaatggcagcagcgtcagttttataacaaacagagcaccctccctcgacacagtactttgagtagtcccaaaaccatggtaaatatttctgaccagacaatgcactctattcccacatcaccttcccacgggtcaatagctgcttatcagggatactcccctcaacgaacttacagatcggaagtgtcttcaccaattcagagaggagatgtgacaatagaccgcagacacagggcccatcaccctaagcatgtctatgtgcctgacagaaggtcagtgccagctggcctgactttacagtctgttagtccccagagcctccaagggaaaacgccagaggagcttacgctgctgctaataaagctgagacggcagcaagccgaactgagtagtatccgggagcatacgttagcacagctcatgcagctaaagcttgaggcccacagcccaaagaatgaaattctttcacatcatctccaaaggaacaccatatatttggatcatcagctgtcacaagatgaaggtagaggcacattatacaaatacagacctgaagaagtagatattgatgccaagttaagccgattatgtgaacaagataaagtggtgcatgctctggaagagaaacttcagcaactccacaaggagaaatacacgcttgagcaagctttgctatcagccagccaagagatagaaatgcatgcagataacccagcagccattcagacagtggtgttacaaagggatgatttacaaaatggactgcttagtacgtgtcgagaactttctcgagccactgccgaattggaacgagcatggagagaatatgataagttagaatacgatgtaactgttaccaggaaccagatgcaagagcagctggatcaccttggtgaagttcagacggaatcagcaggaattcagcgtgcacagattcagaaagaactttggcgaattcaggatgtcatggaagggctgagtaaacataagcagcaaagaggtactacagaaataggtatgataggatcaaagcctttctcaacagttaagtacaaaaatgagggtccagattatagactctacaagagtgaaccagagttaacaacagtggcagaagttgatgaatctaatggagaagaaaaatcagaacctgtttcagagatagaaacttcagttgttaaaggttcccactttcctgttggagtagtccctccaagagcaaaatcaccaacacccgaatcttcgacaatagcttcctatgtaaccttgaggaaaactaagaagatgatggatctaagaacggaaagaccaagaagtgcagtggaacagctctgtttggctgaaagtactcgaccaaggatgactgtggaagagcaaatggaaagaataagaagacatcaacaagcgtgcctgagggagaagaaaaaagggttaaatgttatcggtgcttcagaccagtcacccttacaaagcccttcaaatttaagggataatccatttaggactactcagactcgaaggagggatgataaggaactggacactgccattagagaaaatgatgtaaagccagaccatgaaactcctgcaacagaaattgttcaactaaaagaaaccgaaccccaaaatgtggacttcagcaaagagttaaaaaaaactgaaaacatttcatatgaaatgctttttgaacctgagccaaatggagtaaattctgtggaaatgatggataaagaaagaaacaaagacaaaatgcctgaggatgttacattcagccctcaagatgaaacacagaccgcaaatcataaaccagaagagcatcctgaagaaaatacaaagaacagtgttgacgaacaggaagaaactgttatttcttacgaatcaactcctgaggtttctagaggaaatcaaacaatggcagtgaaaagtctgtccccatctcctgagtcctcggcatcgccagttccatccactcagccgcagctcacagaaggatcacatttcatgtgtgtgtagtcttagaagaaagatgtcccccatgctggagtgtagtggcataatcacagctcactgcagccttgacctcctgggctcaagcagtcgtcctgcctcagcctcacaagtagctgggatcacaagtgcacgccaccacactcggctgatatttcgattttcttatagagacagtcttactaagttgtccacgctggtctcaaactcctgaattcaagctaccctcccactgcatgagccactgtgcctagcctctttgattttcacattctcaaaatatttcttttattttctctcctttttttttttttttcgaggcaaggtcttactctgtcacccaggctggagtgcagtggtgcaagatcatggctcaatggctcactgaaggctgacctcccaggctcaagcaatcctcccacctcagccccctgagtagctgggactacaggtgtatgccaccatgccaggctaattgttttgcagagatggagttttcaccatgttgcccaggctgatctcaagctcctgagctcaagtgatctgtccgcctcagcctcccaaagtgctgagattacaggtgtgagccaccacacccagccttttttcttccttttcaagcattttttaaatttcactagctttgggtacaagtggttttgggttacatggaagaattgtatagtggtgaagtctgagattttagtgcacccattacccgagtagtgtatgttgtacccaatccttcaccgaccttccaccctctcccttctgagtctccaaagtccattataccacactgtatgcctttgcatacccatagtgtagctccaacttataagtgagaacatatgatatttggttttcctttcctgagttactttacttagaataatggcctccagctccatccaagttgctgcaaaatacattattttgttcctttttattgctgagtagtattccatggtgtatataaaccacattttctttatccactccttggttggtggactcttaggttggttccatacccttggagttgcaaattgtgctgctataaacatgcatgtgcatgtatcttttttatgtaatgacttgttttcttttgggtcgatactcagtagtgggattgctggatcaaatgctggatctacttttagttctttaaggaatctccacactgttttccgtagtggttgtactagtttacattcccaccagcagtgtaaaagtgttttcttctcaccacatccataccaacatctgttgttttttgacttttaaattatggccattctttttttttgtttttgagatggagtctcgctctgtcagcaggctggagtgcagtggcgtgatcttggctcactgcaacctcctcctccagggttcaagtgattctcctgcctcagcctcccccgtagctgggactacaggcgtgtgccaccacacccagctaatttttgaatttttagtagagatggggtttcaccatgttggccagtatggtctcgatctcttgacctcatgatccgcccacctcggcctcccaaagtgctggcgtgacccactgcacccggccaattatggccattcttgcaggaataaggaggcatctcattgttgtgtaccttcttttgagaaatgcctattcgcgtcatttgcccactttttgatgggattatttgtttttgttttttttttcttgctgatttgttttgagttccttccagattctggatattagtcctttgttggatgcatagtttgcaaatatttcctcccatcctgttttctggaatctacttcctttcacaccttattgtaggaactataatctgtgccctttttttcagcccaaagtattttgttgtcttttcatatttgtaacttttatttgagattatgtctacctggaacctcaaagaggcttctgtttttgtcagttggtatctgtgcaggactgaagtgcttgctggagagttacaaataacctaactgtgatagtcttacctgtgttctgcctttgtcacttgtgtttaagccttttttcttttttcttttttcttttttttttttttgttgagaccaggtctcaccctgtcacccacactggagtgcaatggtgagatcttggagccttgccctcctgggcttaagtgatcctcccacgacagcctcccaagtagctgggaccacacgcctgtgccaccaagcctggctgatttttttgtattttttgtagagtaggggtttcaccgtgttgcccaggctggtctcaaactcctgagctcaagcgctctgcccgcctcaatctcccaaagtgctgagattacaagattgagccatcacgcctggctatgtttaaacttttaatttaatatgtttagaaatgactgttgaggccaggtgcggtaatgccagcactttgggaggccagggctggtggatcacttgaggtcgggagttcaggaccagcctggccaacatggtaaaaccccatctctacttaaaaatacaaaaattagctgggcatggtgtcaggcgcctgtaatcccagctacctgggaggctgagacaggagaatcgcttgaacctgggaggcagaggttgcagtgagccgagatcacaccatcgcactccggcctgggtgacagaacaagactttgtctcaaaaaaaaaaaaaaaaatctgggtgtggtggcccacacctgtaatcccagcactttgggaggccgaggcaggcagatcacctggctcctgaccagcgtgaccaacatggagaaacccagtctctactaaaattacaaaattagctgggcgtggtggcacatgcctgtaatcccagctacttgggaggctgaggcaggagaatcgcttgaacccagaggcagtggttgcagtgagccgaggtcgtgccattgcactccagcctgggcaacaagaacgaaactctgtctc

SEQ ID NO: 55321 - DNA, 3525 bp, Artificial Sequence
  derived and/or modified sequence
atggccgcagatcttaatctggagtggatatcattgcctaggtcatggacctacggaataactaggggcggaagagtgttttttattaacgaggaagcaaagtccactacctggctgcacccggtcactggggaggctgttgtgacagggcaccggaggcagagcacagatctgcccacagggtgggaggaggcctatacttttgagggcgctagatactacattaatcacaacgagcggaaagttacttgcaagcaccccgttaccgggcaaccatctcaggataattgcatctttgttgtgaatgaacaaacagtcgcaacaatgacaagcgaggaaaagaaggaacgacccatctccatgattaacgaggcaagcaactataacgtgacatcagattacgccgtacacccgatgagtcccgtgggacgcacgtcccgggcaagcaaaaaagtgcataatttcggcaagagaagcaactcaattaaacgaaaccccaatgcccctgtcgttcggaggggatggctgtataagcaggacagcacaggcatgaaactgtggaaaaagcgctggtttgtgttatccgatttgtgtcttttttactacagagacgagaaagaggagggtatattagggagcatcctgctgccgtcttttcagatagccctgctcaccagtgaggatcacataaataggaagtacgcctttaaggccgcacatccgaacatgcgtacctactatttctgtacggatacgggcaaggagatggagttgtggatgaaggcaatgctggacgctgcgttggtgcagactgagccagtgaagagagtcgacaagattaccagtgagaacgcacctacaaaagaaaccaataatattccgaaccaccgagtgctaatcaaaccagaaatccaaaataaccagaagaataaggagatgagtaaaatcgaggagaaaaaggccctggaggccgagaagtatggattccagaaggatggtcaggaccgtcccctgacaaagattaacagcgtgaagctgaattcattgcccagtgagtacgaaagtggtagcgcatgcccggctcagaccgttcactatcgtcctattaatctgtcatcctctgaaaataaaatcgttaacgtcagtttagctgacttaagaggtgggaacagaccgaacacaggcccactgtacaccgaggcggacagggtcatccagagaacaaattctatgcagcagttagagcagtggataaaaatccagaaagggcgaggacatgaagaggagactcggggtgtcatctcctaccagaccttgcctcggaacatgccctcccatcgtgcccaaattatggccagataccctgagggataccggacactgcccaggaattcgaagacaagaccggagtccatctgtagcgtgactcctagtacgcatgacaagacattgggaccaggagccgaggagaagcggcgaagtatgagagacgatacaatgtggcagttatatgaatggcagcaacgtcaattttacaacaagcagtcaacattgcctagacattctaccctgagctcacccaaaaccatggtgaacatcagcgaccagaccatgcactcaattccaacgtcaccgtcccatgggagtattgccgcataccagggctacagcccccagaggacttataggagtgaggtttcttctcctatacaacggggagatgtcacaattgaccgacggcatagggctcaccatcccaagcatgtctacgtgcctgataggcggagcgtgccagctggtttgaccctgcaaagcgtcagcccccagtctctgcaaggcaagacgcctgaagagctgacattgttattaattaaactgaggcgccaacaggcagaactaagctccatccgcgaacataccctcgcacagctgatgcagctgaagcttgaggcacattcccccaagaacgagatcctgtctcaccatctgcaacggaacacaatatacctggaccaccagctgagtcaggacgagggacggggtacgctgtataaatatcggcctgaagaggtggatatcgatgctaagcttagcaggttatgtgagcaggacaaagtggtacatgcgcttgaggagaaactgcagcaattacacaaagaaaagtacacgctagagcaggctctcctgtctgcgagtcaggagattgaaatgcacgccgataaccccgcagctatccagacagttgtactgcagagagatgacctgcaaaacggcctcctctcgacatgccgcgaactatccagagccacagcggagcttgaacgggcatggagggagtacgacaaactggagtacgacgtcaccgtcacccgcaatcagatgcaggagcaactggaccacctgggggaagttcaaactgagagtgccggaatccagagagcccagattcagaaagagctttggcggatccaggacgtgatggaaggcctgtcaaagcacaagcagcagcggggaactactgaaatcggaatgatcggctcgaagccgttctccaccgtcaaatacaaaaatgagggaccagactacagactgtacaagtcagagcctgaattgaccaccgtggccgaggtcgatgaaagtaacggggaagagaagtctgaacctgttagcgaaatcgagacaagtgtggtgaaggggagccactttcccgtgggggtggtgcccccacgggctaaaagcccaactccagagtcctctaccatagcctcatatgtgaccttgagaaagacaaaaaagatgatggacttgaggaccgagcgcccacggtcagccgtcgagcagctgtgcttggccgaatcaacaaggccaaggatgacggtcgaggaacagatggaaaggatcaggagacaccagcaggcatgcctccgtgaaaagaagaagggcctgaatgtgataggggctagtgatcaatctcctctgcagagtcctagtaatttacgtgataatccctttcgaaccacgcagacacgacggagagatgacaaggagctagacaccgcaatccgagagaacgacgtcaaacctgaccacgaaacccctgccaccgagattgttcagcttaaggagactgagccgcagaacgtggactttagtaaggaattaaaaaaaaccgagaatatctcctacgaaatgctgtttgagccagaacccaacggagtcaacagtgtcgaaatgatggacaaggagaggaataaagataaaatgccggaggacgtgacattctccccacaggatgaaacacagacagcgaaccataaaccagaggagcacccagaggaaaacacgaaaaactcagtggacgagcaagaggaaacggtcatttcatatgaatctactcccgaagtgtccaggggtaaccagaccatggctgtgaaatctcttagtccctccccagaatcctccgcctcccctgtgccatccactcagccccagctcaccgagggcagccacttcatgtgcgtttag

SEQ ID NO: 55322 - DNA, 3525 bp, Artificial Sequence
  derived and/or modified sequence
atggcagccgatctgaacctggagtggattagcctccccagatcttggacctatggaatcacccgtggaggccgtgtgttcttcatcaacgaggaggcgaaaagtaccacatggcttcaccctgtcactggcgaagctgtcgttacaggacatagaaggcaatctactgacctccctaccggctgggaagaggcttatacattcgaaggtgccaggtattacatcaaccacaacgagcggaaagtgacatgcaaacatccagtgaccggtcagccttcacaggacaattgcatctttgtcgtcaacgaacagacagtagccacaatgaccagtgaagagaaaaaggagagacctataagtatgataaatgaagcttcaaactataatgtgacatccgactatgctgtgcacccaatgtctccggtggggcgtacctcaagagcatccaagaaagtgcataactttggcaagcgtagcaactccatcaaacgtaatcccaacgccccagttgtacggagagggtggctatataaacaagactctactggaatgaagctatggaagaagcgttggttcgtgctctctgacctgtgcctcttttactaccgggacgagaaggaggaaggcattttggggagcattctgctgccaagttttcaaattgccctgttaacttccgaagaccacatcaaccgcaagtatgcgttcaaagcggcacaccccaatatgaggacttattacttctgcacagacacgggcaaggaaatggaactttggatgaaggccatgctggatgctgcactggtgcaaacggagcctgtcaaacgagtggacaaaattacaagtgaaaatgcaccaaccaaggagaccaacaacatccctaaccaccgtgttctgattaagccggaaatacagaacaatcagaaaaataaagaaatgagcaagattgaagaaaagaaagccctggaggcggaaaaatacggctttcaaaaggacggacaagaccgcccacttacaaagataaactccgtgaaactcaatagcctgccctccgagtatgaaagcggatctgcatgccctgctcaaacagtgcattaccgacctatcaacctctcatcttccgaaaacaagatcgttaatgtgtcattggccgatctgaggggcggaaacaggcctaatacaggaccactgtacactgaagcggacagagtgatccagcggaccaactcaatgcaacagttagaacagtggattaagatccagaagggacggggacacgaggaagaaactcgcggagtgattagttaccagactctcccccgaaacatgcccagtcaccgcgctcaaatcatggcacggtacccagaaggatacaggacactgccgagaaactccaagacgcgacccgagagcatttgtagcgtaacgccttccacccatgataagaccctgggcccaggagccgaagaaaagcgtagatccatgcgggatgatacaatgtggcagttatacgagtggcaacagagacaattttacaacaaacaatccacacttccaaggcactctactttgtcttccccaaagactatggtgaacattagcgatcaaactatgcactctattccaacatccccctcgcacggtagcattgccgcataccagggctacagtccacaaaggacttacaggtccgaggtgagtagtccaatccagagaggggatgtgacaatagacaggcggcacagagcccatcaccccaaacacgtatacgtgcctgacagaaggtctgtgcccgctggccttacgttacaatctgtaagtccccagtctctccagggtaagactccagaggaactcactctcctcctcataaaactcaggcggcagcaagccgagttatcttcaatccgggaacacaccctggctcagctgatgcagctcaaacttgaagcgcatagccccaagaacgaaatcctctcacaccaccttcaaaggaatactatctacctggatcaccaactgtcgcaggatgaaggcagaggcacgctttataagtatcgccctgaggaggtggacatagacgctaaactgtcaaggctctgcgaacaggacaaagtagtgcacgccctcgaggaaaagctccagcagcttcataaggaaaagtataccttggaacaggcactattgtctgcctcccaggaaatcgagatgcatgctgacaacccagctgcaattcagactgttgtcttgcagcgggatgaccttcaaaacggcttactgagcacttgccgtgaattgtctcgtgctacggctgagctggaaagagcttggcgcgagtacgacaagctcgagtacgacgtcacagtaacacggaatcagatgcaggaacagctggatcacctgggcgaagtgcagaccgagtccgcaggcatccagagagctcaaatccagaaagaattgtggcgtatccaggacgtcatggagggactcagtaaacacaaacagcaacggggaacaaccgaaattgggatgatcggctccaagccatttagcaccgtaaagtataagaacgaaggccctgattatcgcctctacaagtcagagcccgagctcacaacggtagcagaggtggacgagagcaacggtgaggagaaatcagagccggtctctgagattgagacctcagtggtaaagggctcgcacttccccgtgggagtggtgccccctcgtgccaagtctcccacacctgaatcaagcactattgcctcctatgtcacgctgcgcaagacgaaaaagatgatggatctgagaactgaacgcccaagatcagcagttgaacagctgtgtttggccgaaagcacccggcctagaatgactgtggaggagcagatggaacgtattaggaggcaccagcaggcttgcttgcgagagaagaaaaagggcctgaacgtcattggggcttctgatcaatccccattacaaagtcctagtaacctcagggacaatcctttccgcactacacagacccgcagacgcgacgacaaagagctggatacagccatcagagagaatgacgtcaagccggaccatgagactccggctactgagattgttcaattgaaggaaaccgaacctcaaaatgtcgattttagcaaagagcttaaaaagaccgaaaatatttcttatgagatgctttttgaacctgagcccaatggtgtcaactctgttgaaatgatggataaggagcgaaacaaggacaagatgccggaagatgtaaccttttccccccaagacgaaacgcagacagctaaccacaagccagaagagcacccggaggagaatacaaaaaactcagtagacgagcaggaagaaactgtgatcagttacgagtcaacccccgaggtgtctaggggaaaccaaacaatggcagttaaaagcttatcacccagtccagagtccagcgcgagcccggtgccaagcacacagccccagctgacagagggatcacattttatgtgcgtatag

SEQ ID NO: 55323 - protein, 449 aa, Artificial Sequence
  derived and/or modified sequence
MEFFISMSETIKYNDDDHKTLFLKTLNEQRLEGEFCDIAIVVEDVKFRAHRCVLAACSTYFKKLFKKLEVDSSSVIEIDFLRSDIFEEVLNYMYTAKISVKKEDVNLMMSSGQILGIRFLDKLCSQKRDVSSPDENNGQSKSKYCLKINRPIGDAADTQDDDVEEIGDQDDSPSDDTVEGTPPSQEDGKSPTTTLRVQEAILKELGSEEVRKVNCYGQEVESMETPESKDLGSQTPQALTFNDGMSEVKDEQTPGWTTAASDMKFEYLLYGHHREQIACQACGKTFSDEGRLRKHEKLHTADRPFVCEMCTKGFTTQAHLKEHLKIHTGYKPYSCEVCGKSFIRAPDLKKHERVHSNERPFACHMCDKAFKHKSHLKDHERRHRGEKPFVCGSCTKAFAKASDLKRHENNMHSERKQVTPSAIQSETEQLQAAAMAAEAEQQLETIACS

SEQ ID NO: 55324 - DNA, 3510 bp, Artificial Sequence
  derived and/or modified sequence
gtgttcacggccggctagacattctgtgctcgtgcaggaggagggctgctaccatcagggacgtgcacgatttcccccaccccgccccctccccaaactccaaaaaaaaatccaaaacacactgccacccaccgtgcccccgcgccccgagcccctccggtcccggcctgcgtttgctagcgagcgcggggaacccacggcagtgtctgtgcctgtgccaggctgcaggtctggcgtgctcctgatcagagttactctgatctgaagattttggcgttcaaggcattaagataatagcctgagttgttcatggagtttttcatcagtatgtctgaaaccattaaatataatgacgatgatcataaaactctgtttctgaaaacactaaatgaacaacgcctggaaggagaattttgtgatattgctattgtggttgaggatgtgaaattcagagcacacagatgtgttcttgctgcctgcagcacttactttaaaaagcttttcaagaagcttgaggttgatagttcttcggtcatagaaatagattttcttcgttctgatatatttgaagaggtcctgaactacatgtacacagcaaagatttccgtgaaaaaagaagatgttaacttaatgatgtcatcgggtcagattcttggtatccgatttttggataaactgtgttctcagaagcgtgatgtgtccagtcccgatgaaaacaatggtcagtccaaaagtaagtattgccttaaaataaatcgccccattggagatgctgctgacacccaggatgatgatgtagaggaaatcggggatcaggatgacagtccttctgatgacacagtagaaggcacacccccgagtcaggaggacggcaagtcgcccaccacaacgctcagggttcaggaagcgatcctgaaagagctggggagtgaggaagttcggaaggtcaattgctacggccaggaagtagaatccatggagaccccagaatcaaaagacttggggtcccagacccctcaagccttaacatttaatgatgggatgagtgaagtgaaagatgaacagacaccaggctggacaacagccgccagtgacatgaagtttgagtatttgctttatggtcaccatcgggagcagattgcctgccaggcgtgtgggaagacgttttctgatgaaggcagattgaggaagcatgagaaactccacacggcggacaggccatttgtttgtgaaatgtgcacaaaaggtttcaccacacaggcccacctgaaagaacacctaaaaatccacacaggatataagccctatagctgtgaggtgtgtggaaaatcatttatccgtgccccagacttaaagaagcatgagagagttcacagtaatgaaagaccgtttgcgtgccacatgtgtgacaaagccttcaaacacaagtctcacctcaaggatcatgaaagaagacacagaggggaaaagccttttgtgtgtggctcctgcaccaaggcatttgccaaggcatctgatctgaaaaggcacgagaacaatatgcacagtgaaaggaagcaggttacccccagtgccatccagagcgagacagaacagttgcaggcggcagcgatggctgcggaagcagaacagcagctggagacgatagcctgtagctagaggcggtgggacagggacactttgcctggaaagtggagactgagatgacgtggatcataatgagtgaatgccagttacaatatttttgtggaaacgtatggaacattgtactcactggacttaaggcagtgcttggttagctatttttaagacttttcaaggaaatggtgttcctcagttctgaccaaaccgtttcactgtcttgtctggtgtctagtattaatgttgcccagtaagcacctctctcccttttttttttttattattttaatttgagaactcctgtgtccagtttagaagtgagagacttccatttttagttcctttacactcaccaccctagcaagtgccctgcacagagtaataagtaaattgatttcctaatcacaattctatgtgacttatggtcaaaagagcagttttaataactttaaaagtacttcagatagacgcagaaaattggtgagtggttgaccaagaacactgcacaaatataaaaaaagttctggaaatgcagaatggcgttagatttatatttggtttgttaattttatatcactgtttttcactgtttttgtggacaaataatggttgctttgctgaagtgttcttcctcaatcttgattgccctgtacctacccaaaagctgtagtcacacatcctaaaggccaagcaaacccaccgggatggtggggggtcttggagccaagctcttaggttcctcttatttggggcagtaccagtccataccagctgcgatttgtgagtggacctgtggtaagaagaatagaaaaggctctcagagataaggttttttacatgtgtaacaatcccaagatttcctagattaaaatcttaattgattttgaaattggatttttatttagaatcaaaattaggacaagaacagataacttcttcagatacatttgtgtaactttacagaatgtcatcaagctttggggctctgtggggcacatgatttatccataaaggagatgcagtatgcttacttaaattaataaatttaaaatcttttaagtgtgtaaatagtagtgttggtcttacgtatttcaagtaaaaagtagacagctgcactttttttgcacattggattaaaataacttccatcagcaacaaacatcagactgtttttaacaaatattaaagattgtcagaccaaatgtttatgttttcgaaatatatttcatcactggttacagttttaaatagaagttgattgccttttcatagccgtaaatgagaattataaactctattccagttttggtatactaaatgttcttttaaccatctttaggaatatattgaaatgccaacaatagtttgaattgtgttctgtaaaaaagtattagtcaattatttttcaaaatgtagaattgtagaaaatgtcaatttttcaaactcatttttcattgctaggatttcttttaaaaaaattaaagtaatttcacttcatagcttgttgcattaacacctgtaattctattgtgaaagaaatttgattttttaattggtgtgtgttatgcccaagatgttaggatgaagatgctacctttttaaaaattttagttattggtaaaatgtttaattttacttaaaattaatttcttttcttgaaagttgtttattctgttctaaaagtagtcctgtcactgtgtttttatgctacttatagaaggggaactgattgccgttcctaggctgttttaaccaaagcaaaggaaaaataattttaacatcttgtcaatagctacttcaacaaaccatattttgggacttcattttttgtatataaaagaaaatatacttctatcaaaaaaaaaaaaa

SEQ ID NO: 55325 - DNA, 1350 bp, Artificial Sequence
  derived and/or modified sequence
atggagttcttcatcagcatgagcgagaccatcaagtacaacgacgacgaccacaagaccctgttcctgaagaccctgaacgagcagagactggagggcgagttctgcgacatcgccatcgtggtggaggacgtgaagttcagagcccacagatgcgtgctggccgcctgcagcacctacttcaagaagctgttcaagaagctggaggtggacagcagcagcgtgatcgagatcgacttcctgagaagcgacatcttcgaggaggtgctgaactacatgtacaccgccaagatcagcgtgaagaaggaggacgtgaacctgatgatgagcagcggccagatcctgggcatcagattcctggacaagctgtgcagccagaagagagacgtgagcagccccgacgagaacaacggccagagcaagagcaagtactgcctgaagatcaacagacccatcggcgacgccgccgacacccaggacgacgacgtggaggagatcggcgaccaggacgacagccccagcgacgacaccgtggagggcaccccccccagccaggaggacggcaagagccccaccaccaccctgagagtgcaggaggccatcctgaaggagctgggcagcgaggaggtgagaaaggtgaactgctacggccaggaggtggagagcatggagacccccgagagcaaggacctgggcagccagaccccccaggccctgaccttcaacgacggcatgagcgaggtgaaggacgagcagacccccggctggaccaccgccgccagcgacatgaagttcgagtacctgctgtacggccaccacagagagcagatcgcctgccaggcctgcggcaagaccttcagcgacgagggcagactgagaaagcacgagaagctgcacaccgccgacagacccttcgtgtgcgagatgtgcaccaagggcttcaccacccaggcccacctgaaggagcacctgaagatccacaccggctacaagccctacagctgcgaggtgtgcggcaagagcttcatcagagcccccgacctgaagaagcacgagagagtgcacagcaacgagagacccttcgcctgccacatgtgcgacaaggccttcaagcacaagagccacctgaaggaccacgagagaagacacagaggcgagaagcccttcgtgtgcggcagctgcaccaaggccttcgccaaggccagcgacctgaagagacacgagaacaacatgcacagcgagagaaagcaggtgacccccagcgccatccagagcgagaccgagcagctgcaggccgccgccatggccgccgaggccgagcagcagctggagaccatcgcctgcagctag

SEQ ID NO: 55326 - DNA, 1350 bp, Artificial Sequence
  derived and/or modified sequence
atggagttctttatttcaatgtccgaaaccattaaatacaacgacgatgatcacaagactctcttccttaaaacactgaatgagcagcgcctggagggcgagttctgcgatattgccatcgtcgttgaggatgttaagtttagggcacacaggtgcgtcctggccgcctgttctacctacttcaaaaaactgtttaaaaagctcgaggtcgacagttcctctgtaatcgaaatcgattttctgaggtcagacatctttgaagaagtgctcaattatatgtatactgccaaaatctctgtgaagaaagaagacgttaatttaatgatgagttctggtcagattctggggattcggttcctggacaagctatgctcccagaaaagggacgtgtcaagtcctgatgagaataatgggcagagcaaaagtaagtactgtctcaagataaatcgtccaatcggggacgcagctgacacacaggatgatgatgtggaggagatcggcgaccaggatgactctccgtctgacgacacagttgagggtactcctccatctcaggaggacgggaaatctcccactaccacactgcgggtgcaggaagctatcctgaaagagctgggcagtgaggaagtccggaaggtgaactgctacggtcaggaggtggagagcatggagactccagagagtaaggacctgggatcccagaccccacaggcactcacatttaacgatggaatgagcgaggttaaagacgagcagactccaggctggacgacagccgctagcgacatgaagtttgagtatcttctctatggtcatcatagagaacagatcgcatgccaggcatgtggcaagactttttctgacgaaggcaggctgcgcaaacacgaaaaacttcatacagctgacaggccgttcgtgtgtgaaatgtgtacgaagggctttacaactcaagcccatctgaaggagcatctgaaaatccataccgggtacaaaccttactcctgtgaagtgtgcgggaagtcctttatcagggcaccggacctcaagaagcacgaacgggtgcactcaaacgagcgcccattcgcctgccacatgtgcgacaaagccttcaagcataagtctcacttgaaggatcacgaacgccgacatagaggcgagaaacccttcgtgtgtgggagctgcaccaaggcatttgccaaagccagtgacctgaagagacacgagaataacatgcatagtgagcgaaagcaagtcacacccagtgccattcaatccgagacggaacagctgcaagctgccgctatggcagcagaagctgaacaacagctcgagaccatcgcctgtagctag

SEQ ID NO: 55327 - DNA, 1350 bp, Artificial Sequence
  derived and/or modified sequence
atggaattctttatctctatgagtgagactatcaaatacaatgatgatgaccacaagaccctcttcctgaagacactgaacgagcagcggttggaaggtgagttctgtgacatagccatcgtggtggaagatgtgaaattcagagcccacagatgtgtgttagctgcatgctcaacatacttcaaaaaactgtttaagaagctggaagtggattccagtagcgtgattgagattgatttcctccggagcgatatctttgaagaagtgctgaattatatgtataccgcgaaaatcagtgtgaaaaaagaggatgtgaatctcatgatgtcatctggacaaatcttagggattcgatttctggacaagttatgcagtcagaaaagggatgtttcttctcccgacgagaataacgggcagtccaaatcaaagtattgtctcaaaattaaccggcctatcggtgacgccgctgacacccaggacgatgatgtagaggagattggcgaccaggacgacagcccttctgacgacacggtagagggaactccgccctcgcaggaggacggcaaaagtccaaccacaactttaagggtccaggaggcaatccttaaggagctaggctccgaggaggtgagaaaagtcaactgctacggccaggaggtagaatcgatggaaactccagaaagtaaagatttaggcagccagaccccccaggctcttacattcaatgatggcatgagcgaagtaaaggacgagcaaactccaggatggacaaccgcagccagtgacatgaaattcgagtacctcctgtatggccatcaccgtgaacagattgcttgtcaagcgtgtgggaagaccttctctgacgagggacgattgaggaaacatgagaagctgcacaccgcagaccggcctttcgtgtgcgagatgtgtaccaagggattcacaacgcaagcccatctaaaggagcatttgaagatacatacagggtataagccttatagctgtgaagtgtgtggcaagtccttcattcgtgcacctgaccttaagaaacatgaacgagtgcactccaacgaaaggccatttgcttgtcacatgtgtgataaagcgtttaagcacaagtctcatctgaaagatcacgagaggcgccacaggggcgagaagccgttcgtatgtggctcgtgcactaaggctttcgccaaggcgagtgatctgaaacggcacgagaacaacatgcactctgagagaaaacaagtcaccccctccgctattcaaagcgagaccgagcaactgcaggccgccgccatggcagcagaagccgaacagcagttggaaactatcgcgtgctcttag

SEQ ID NO: 55328 - DNA, 1350 bp, Artificial Sequence
  derived and/or modified sequence
atggagttcttcatctccatgtctgagaccatcaagtacaatgatgatgaccacaagaccctcttcctgaagaccctgaatgagcagaggctggagggggagttctgtgacatcgccatcgtggtggaggatgtgaagttccgggcccaccgctgtgtgctggccgcctgcagcacctacttcaagaagctgttcaagaagctggaggtggacagcagcagcgtcatcgagattgacttcctgcggagtgacatctttgaggaggtgctgaactacatgtacacagccaagatctctgtgaagaaggaggatgtgaacctgatgatgagcagcggccagatcctgggcatccgcttcctggacaagctgtgcagccagaagagagatgtgagcagcccagatgaaaataatggccagagcaagagcaagtactgcctgaagatcaaccggcccatcggagatgctgctgacacccaggatgatgatgtggaggagatcggggaccaggatgacagccccagtgatgacacagtggagggcaccccacccagccaggaggatggcaagagccccaccaccaccctgcgggtgcaggaggccatcctgaaggagctgggcagcgaggaggtgaggaaggtgaactgctacggccaggaggtggagagcatggagaccccagagagcaaggacctgggcagccagaccccccaggccctgaccttcaatgatggcatgtctgaggtgaaggatgagcagaccccaggctggaccacagctgccagtgacatgaagtttgagtacctgctgtatggccaccaccgggagcagatcgcctgccaggcctgtgggaagaccttcagtgatgagggccgcctgaggaagcatgagaagctgcacacagctgaccggccctttgtgtgtgagatgtgcaccaagggcttcaccacccaggcccacctgaaggagcacctgaagatccacacaggctacaagccctacagctgtgaggtgtgtgggaagagcttcatccgggccccagacctgaagaagcatgagcgggtgcacagcaatgaaagaccatttgcctgccacatgtgtgacaaggccttcaagcacaagagccacctgaaggaccatgaaagaagacacagaggagagaagccctttgtgtgtggcagctgcaccaaggcctttgccaaggccagtgacctgaagagacatgagaacaacatgcacagcgagaggaagcaggtgaccccatctgccatccagagcgagacagagcagctgcaggccgccgccatggctgctgaggccgagcagcagctggagaccatcgcctgcagctag

SEQ ID NO: 55329 - DNA, 1350 bp, Artificial Sequence
  derived and/or modified sequence
atggagttcttcatcagcatgagcgagaccatcaagtacaacgacgacgatcataagacactgttcctcaagacactgaatgagcagcgtttggagggagagttctgtgatatcgccatcgtggtggaggatgtcaagttccgtgcacaccgctgtgtcctggccgcctgctctacttacttcaagaaacttttcaaaaagcttgaggtagactctagcagtgtcatcgaaattgatttcctccgttccgacattttcgaagaggtcctgaactacatgtatacagccaagatttctgttaagaaggaggatgtgaatttgatgatgagcagcggtcagatcctggggataagatttctagacaaactctgctctcagaagcgggacgttagttctcccgacgaaaacaatggacagtctaagagcaagtattgcctgaaaataaacagacccattggagatgccgctgacacgcaggacgatgacgtggaggagataggcgatcaggatgattccccttctgacgataccgtggagggaactccccctagtcaggaggacggtaagtccccaaccacgacattgcgggtgcaggaagctatcctcaaagaactgggatccgaggaggtgaggaaggtcaactgctacggacaggaagttgagagcatggaaaccccagaaagcaaggacctgggtagccagacccctcaggcactgaccttcaacgatgggatgtcagaagtgaaagacgagcagacaccgggctggacaactgctgcttccgatatgaagttcgagtatctgctgtacgggcaccatcgggagcaaatcgcatgccaagcgtgcgggaaaacgttctctgatgaaggcaggctgcgcaagcacgagaaactgcatacagcagataggccctttgtgtgcgagatgtgtactaaagggttcaccactcaggcacacctgaaggaacacctgaagatccataccggatacaagccttactcatgcgaagtatgtgggaagtcgttcatcagggcgccagatctcaagaagcacgaacgagtacattcaaatgaacgccctttcgcctgccatatgtgcgacaaggcctttaagcacaaatctcatttgaaagatcatgagcggcggcaccgcggcgagaaaccatttgtgtgcgggagctgcaccaaggcctttgcaaaagcctccgacttaaaacgccatgagaataatatgcactccgaacgcaagcaagttacccctagcgctatacagtcagaaactgaacagctgcaggctgccgctatggccgctgaagccgagcagcaactggagaccatcgcatgcagttag

SEQ ID NO: 55330 - DNA, 1350 bp, Artificial Sequence
  derived and/or modified sequence
atggagttcttcatcagcatgagcgagaccatcaagtacaacgacgacgatcacaaaactctgtttctcaagacactgaacgagcaacgcctggaaggcgaattctgcgatatcgcgattgttgtcgaggatgtaaaattcagggcccatcggtgcgtgctggccgcatgctccacttacttcaagaaactgtttaaaaagttggaagtggacagtagctctgtgattgagatcgatttccttcgctcggacatcttcgaggaggtgctgaattacatgtacacggcgaaaatatctgtgaaaaaggaggatgtgaacctgatgatgagctctggtcaaatcctgggtatcaggtttctggataagctgtgtagtcagaaaagagacgtgtccagccccgacgaaaacaatggccagtccaagtccaaatattgtctcaagatcaatcgaccaatcggggatgctgccgatactcaggatgatgacgtcgaagagataggggaccaggatgactcaccatctgatgacaccgttgaaggcacacctccctctcaggaggacggaaaatcacccaccacaactctacgcgtgcaggaggctatacttaaggagttaggctccgaagaggtccggaaggtgaattgttacggccaggaggtggaatcaatggagactccggaatcaaaagatctgggctctcagactccccaggccctgacattcaatgacggcatgtccgaagtgaaagacgagcagactcctggctggacaaccgctgccagcgatatgaaatttgaatacctgctgtacggccatcatcgcgagcagattgcgtgtcaggcttgcggtaaaacattttctgacgagggacgactgagaaaacacgaaaaactgcatacggccgataggccctttgtctgcgagatgtgtaccaaaggtttcactactcaagcccatcttaaggagcacttaaaaatccatacaggctacaagccctattcatgtgaagtttgcggcaaaagttttatacgggcccccgacctgaagaaacacgagagggttcactctaatgagaggccatttgcttgtcatatgtgcgacaaagcattcaagcataagagccacctgaaagaccatgaaagaaggcatcgaggcgaaaagccgtttgtgtgtggttcatgcactaaggccttcgcgaaggcttccgatctgaaaaggcatgagaataacatgcacagtgaacgcaagcaggtaactcccagtgcaatccaatcagagacagaacagctgcaagccgccgcgatggccgccgaagcagagcaacagcttgagactattgcttgcagctag

SEQ ID NO: 55331 - DNA, 1350 bp, Artificial Sequence
  derived and/or modified sequence
atggagttcttcatcagcatgtccgaaactatcaaatacaatgacgatgaccataaaacactcttcttgaaaactttgaacgaacaacgcctcgagggcgaattttgcgacatcgcgatagttgttgaggatgttaaattccgcgctcacaggtgtgtgttagcggcatgctccacctacttcaagaaactctttaagaagcttgaagtagactcctccagcgtgatagagatcgactttctccgcagcgatatatttgaagaggtcctaaactacatgtacactgcgaagatttcagtgaagaaagaagatgttaacctgatgatgtcgagcgggcagattttgggcatacgctttcttgataaactgtgttcccaaaaacgcgacgtgtcatctccagatgagaataacggtcaatccaaaagcaaatactgtctgaaaatcaaccgacctattggtgacgcggcagacactcaggacgacgacgtcgaggaaataggcgaccaggatgacagcccttcagatgacacagtggaggggacgcccccatctcaggaggacggaaagtccccaactactactctccgcgtgcaggaagccattctcaaggaactcgggtccgaagaggtgcgcaaggtcaattgctacggtcaggaggttgagagtatggaaaccccagagtctaaagacctagggtctcagacgccccaagcactgacattcaatgatgggatgagtgaagtgaaggacgagcaaacacccggatggaccactgctgcctcagacatgaagtttgaatacctgctatatggtcaccaccgcgagcaaattgcctgccaagcatgtgggaagacgttcagcgatgagggtcgccttcggaaacatgagaaactgcacacagcagaccgaccttttgtttgtgagatgtgcactaaggggtttactactcaagcccatttgaaagagcacttgaaaattcacacaggctacaagccgtattcttgtgaggtctgtggcaagagctttatcagggcccctgacttaaagaaacatgagagagttcactccaatgaacggccatttgcctgtcatatgtgcgataaagcatttaagcataagtcccatctgaaggaccacgagcgcagacaccgcggagagaaacctttcgtttgtgggtcctgcaccaaagcattcgctaaagcctctgatctcaaacggcatgagaacaatatgcattcggaacgcaaacaggtgactccaagcgccattcaatcagagaccgaacagctgcaggccgctgccatggccgctgaagctgagcagcaactcgagacaatagcatgttcatag

SEQ ID NO: 55332 - DNA, 1350 bp, Artificial Sequence
  derived and/or modified sequence
atggagtttttcatctccatgagtgagacgattaaatacaatgacgacgaccacaaaaccttatttcttaaaacactgaacgagcaacggctggagggtgagttttgcgacatcgccatagtggtggaagatgtgaaattccgagcacataggtgtgtgctcgctgcctgcagcacatattttaagaagctcttcaagaaactcgaagtggacagttcaagtgtcattgaaatcgatttcttaaggagcgatattttcgaggaggtgctcaattacatgtatacggccaaaataagcgtgaagaaggaagacgtgaatctgatgatgtcttccggacaaattctcgggatccgttttctggataaattgtgcagtcagaaaagagatgtgagttctcctgacgagaataacggacagagtaagtctaaatactgtctcaaaatcaatcggccaatcggcgatgccgcagacacccaggacgatgacgtggaggagattggggaccaggatgattcacctagcgatgataccgtggaagggacacctcccagccaggaggatggcaagagccccacaaccacccttcgtgttcaggaggcaattctgaaggagctgggcagcgaagaggttcgcaaggtgaattgttatggccaagaagttgaatctatggaaacacctgaatctaaagatttaggctcacagacacctcaggccttaacatttaacgatggcatgagtgaggtcaaggacgagcagactccaggatggacaaccgcagccagtgacatgaagttcgaatacctcctgtacggccaccatcgagagcagatcgcctgtcaggcatgcggtaaaacctttagcgacgagggcagactaagaaaacatgagaaactgcacacagcagacaggccgtttgtgtgtgaaatgtgtaccaaggggtttacgacccaggctcatcttaaggagcacttaaaaatacacacaggctataaaccttactcatgtgaggtatgtggcaagtcctttattagggcacctgatctgaagaaacacgaaagagtgcactctaacgaaaggcccttcgcctgccacatgtgcgataaggccttcaagcataagtcccaccttaaagatcacgaacgcaggcaccgcggtgagaagcccttcgtctgcgggtcctgtaccaaggccttcgctaaggcctccgacctcaaacgccatgagaacaatatgcatagcgaaaggaaacaggtgacaccttctgcaattcagtcggagactgagcagctgcaggctgcagcaatggcagctgaggctgagcagcagctggaaacgatcgcctgtagctag

SEQ ID NO: 55333 - DNA, 3528 bp, Artificial Sequence
  derived and/or modified sequence
gtgttcacggccggctagacattctgtgctcgtgcaggaggagggctgctaccatcagggacgtgcacgatttcccccaccccgccccctccccaaactccaaaaaaaaatccaaaacacactgccacccaccgtgcccccgcgccccgagcccctccggtcccggcctgcgtttgctagcgagcgcggggaacccacggcagtgtctgtgcctgtgccaggctgcaggatatgggtctgcaggatggagttcttccggtctggcgtgctcctgatcagagttactctgatctgaagattttggcgttcaaggcattaagataatagcctgagttgttcatggagtttttcatcagtatgtctgaaaccattaaatataatgacgatgatcataaaactctgtttctgaaaacactaaatgaacaacgcctggaaggagaattttgtgatattgctattgtggttgaggatgtgaaattcagagcacacagatgtgttcttgctgcctgcagcacttactttaaaaagcttttcaagaagcttgaggttgatagttcttcggtcatagaaatagattttcttcgttctgatatatttgaagaggtcctgaactacatgtacacagcaaagatttccgtgaaaaaagaagatgttaacttaatgatgtcatcgggtcagattcttggtatccgatttttggataaactgtgttctcagaagcgtgatgtgtccagtcccgatgaaaacaatggtcagtccaaaagtaagtattgccttaaaataaatcgccccattggagatgctgctgacacccaggatgatgatgtagaggaaatcggggatcaggatgacagtccttctgatgacacagtagaaggcacacccccgagtcaggaggacggcaagtcgcccaccacaacgctcagggttcaggaagcgatcctgaaagagctggggagtgaggaagttcggaaggtcaattgctacggccaggaagtagaatccatggagaccccagaatcaaaagacttggggtcccagacccctcaagccttaacatttaatgatgggatgagtgaagtgaaagatgaacagacaccaggctggacaacagccgccagtgacatgaagtttgagtatttgctttatggtcaccatcgggagcagattgcctgccaggcgtgtgggaagacgttttctgatgaaggcagattgaggaagcatgagaaactccacacggcggacaggccatttgtttgtgaaatgtgcacaaaaggtttcaccacacaggcccacctgaaagaacacctaaaaatccacacaggatataagccctatagctgtgaggtgtgtggaaaatcatttatccgtgccccagacttaaagaagcatgagagagttcacagtaatgaaagaccgtttgcgtgccacatgtgtgacaaagccttcaaacacaagtctcacctcaaggatcatgaaagaagacacagaggggaaaagccttttgtgtgtggctcctgcaccaaggcatttgccaaggcatctgatctgaaaaggcacgagaacaatatgcacagtgaaaggaagcaggttacccccagtgccatccagagcgagacagaacagttgcaggcggcagcgatggctgcggaagcagaacagcagctggagacgatagcctgtagctagaggcggtgggacagggacactttgcctggaaagtggagactgagatgacgtggatcataatgagtgaatgccagttacaatatttttgtggaaacgtatggaacattgtactcactggacttaaggcagtgcttggttagctatttttaagacttttcaaggaaatggtgttcctcagttctgaccaaaccgtttcactgtcttgtctggtgtctagtattaatgttgcccagtaagcacctctctcccttttttttttttattattttaatttgagaactcctgtgtccagtttagaagtgagagacttccatttttagttcctttacactcaccaccctagcaagtgccctgcacagagtaataagtaaattgatttcctaatcacaattctatgtgacttatggtcaaaagagcagttttaataactttaaaagtacttcagatagacgcagaaaattggtgagtggttgaccaagaacactgcacaaatataaaaaaagttctggaaatgcagaatggcgttagatttatatttggtttgttaattttatatcactgtttttcactgtttttgtggacaaataatggttgctttgctgaagtgttcttcctcaatcttgattgccctgtacctacccaaaagctgtagtcacacatcctaaaggccaagcaaacccaccgggatggtggggggtcttggagccaagctcttaggttcctcttatttggggcagtaccagtccataccagctgcgatttgtgagtggacctgtggtaagaagaatagaaaaggctctcagagataaggttttttacatgtgtaacaatcccaagatttcctagattaaaatcttaattgattttgaaattggatttttatttagaatcaaaattaggacaagaacagataacttcttcagatacatttgtgtaactttacagaatgtcatcaagctttggggctctgtggggcacatgatttatccataaaggagatgcagtatgcttacttaaattaataaatttaaaatcttttaagtgtgtaaatagtagtgttggtcttacgtatttcaagtaaaaagtagacagctgcactttttttgcacattggattaaaataacttccatcagcaacaaacatcagactgtttttaacaaatattaaagattgtcagaccaaatgtttatgttttcgaaatatatttcatcactggttacagttttaaatagaagttgattgccttttcatagccgtaaatgagaattataaactctattccagttttggtatactaaatgttcttttaaccatctttaggaatatattgaaatgccaacaatagtttgaattgtgttctgtaaaaaagtattagtcaattatttttcaaaatgtagaattgtagaaaatgtcaatttttcaaactcatttttcattgctaggatttcttttaaaaaaattaaagtaatttcacttcatagcttgttgcattaacacctgtaattctattgtgaaagaaatttgattttttaattggtgtgtgttatgcccaagatgttaggatgaagatgctacctttttaaaaattttagttattggtaaaatgtttaattttacttaaaattaatttcttttcttgaaagttgtttattctgttctaaaagtagtcctgtcactgtgtttttatgctacttatagaaggggaactgattgccgttcctaggctgttttaaccaaagcaaaggaaaaataattttaacatcttgtcaatagctacttcaacaaaccatattttgggacttcattttttgtatataaaagaaaatatacttctatca

SEQ ID NO: 55334 - DNA, 3497 bp, Artificial Sequence
  derived and/or modified sequence
gtgttcacggccggctagacattctgtgctcgtgcaggaggagggctgctaccatcagggacgtgcacgatttcccccaccccgccccctccccaaactccaaaaaaaaatccaaaacacactgccacccaccgtgcccccgcgccccgagcccctccggtcccggcctgcgtttgctagcgagcgcggggaacccacggcagtgtctgtgcctgtgccaggctgcaggtctggcgtgctcctgatcagagttactctgatctgaagattttggcgttcaaggcattaagataatagcctgagttgttcatggagtttttcatcagtatgtctgaaaccattaaatataatgacgatgatcataaaactctgtttctgaaaacactaaatgaacaacgcctggaaggagaattttgtgatattgctattgtggttgaggatgtgaaattcagagcacacagatgtgttcttgctgcctgcagcacttactttaaaaagcttttcaagaagcttgaggttgatagttcttcggtcatagaaatagattttcttcgttctgatatatttgaagaggtcctgaactacatgtacacagcaaagatttccgtgaaaaaagaagatgttaacttaatgatgtcatcgggtcagattcttggtatccgatttttggataaactgtgttctcagaagcgtgatgtgtccagtcccgatgaaaacaatggtcagtccaaaagtaagtattgccttaaaataaatcgccccattggagatgctgctgacacccaggatgatgatgtagaggaaatcggggatcaggatgacagtccttctgatgacacagtagaaggcacacccccgagtcaggaggacggcaagtcgcccaccacaacgctcagggttcaggaagcgatcctgaaagagctggggagtgaggaagttcggaaggtcaattgctacggccaggaagtagaatccatggagaccccagaatcaaaagacttggggtcccagacccctcaagccttaacatttaatgatgggatgagtgaagtgaaagatgaacagacaccaggctggacaacagccgccagtgacatgaagtttgagtatttgctttatggtcaccatcgggagcagattgcctgccaggcgtgtgggaagacgttttctgatgaaggcagattgaggaagcatgagaaactccacacggcggacaggccatttgtttgtgaaatgtgcacaaaaggtttcaccacacaggcccacctgaaagaacacctaaaaatccacacaggatataagccctatagctgtgaggtgtgtggaaaatcatttatccgtgccccagacttaaagaagcatgagagagttcacagtaatgaaagaccgtttgcgtgccacatgtgtgacaaagccttcaaacacaagtctcacctcaaggatcatgaaagaagacacagaggggaaaagccttttgtgtgtggctcctgcaccaaggcatttgccaaggcatctgatctgaaaaggcacgagaacaatatgcacagtgaaaggaagcaggttacccccagtgccatccagagcgagacagaacagttgcaggcggcagcgatggctgcggaagcagaacagcagctggagacgatagcctgtagctagaggcggtgggacagggacactttgcctggaaagtggagactgagatgacgtggatcataatgagtgaatgccagttacaatatttttgtggaaacgtatggaacattgtactcactggacttaaggcagtgcttggttagctatttttaagacttttcaaggaaatggtgttcctcagttctgaccaaaccgtttcactgtcttgtctggtgtctagtattaatgttgcccagtaagcacctctctcccttttttttttttattattttaatttgagaactcctgtgtccagtttagaagtgagagacttccatttttagttcctttacactcaccaccctagcaagtgccctgcacagagtaataagtaaattgatttcctaatcacaattctatgtgacttatggtcaaaagagcagttttaataactttaaaagtacttcagatagacgcagaaaattggtgagtggttgaccaagaacactgcacaaatataaaaaaagttctggaaatgcagaatggcgttagatttatatttggtttgttaattttatatcactgtttttcactgtttttgtggacaaataatggttgctttgctgaagtgttcttcctcaatcttgattgccctgtacctacccaaaagctgtagtcacacatcctaaaggccaagcaaacccaccgggatggtggggggtcttggagccaagctcttaggttcctcttatttggggcagtaccagtccataccagctgcgatttgtgagtggacctgtggtaagaagaatagaaaaggctctcagagataaggttttttacatgtgtaacaatcccaagatttcctagattaaaatcttaattgattttgaaattggatttttatttagaatcaaaattaggacaagaacagataacttcttcagatacatttgtgtaactttacagaatgtcatcaagctttggggctctgtggggcacatgatttatccataaaggagatgcagtatgcttacttaaattaataaatttaaaatcttttaagtgtgtaaatagtagtgttggtcttacgtatttcaagtaaaaagtagacagctgcactttttttgcacattggattaaaataacttccatcagcaacaaacatcagactgtttttaacaaatattaaagattgtcagaccaaatgtttatgttttcgaaatatatttcatcactggttacagttttaaatagaagttgattgccttttcatagccgtaaatgagaattataaactctattccagttttggtatactaaatgttcttttaaccatctttaggaatatattgaaatgccaacaatagtttgaattgtgttctgtaaaaaagtattagtcaattatttttcaaaatgtagaattgtagaaaatgtcaatttttcaaactcatttttcattgctaggatttcttttaaaaaaattaaagtaatttcacttcatagcttgttgcattaacacctgtaattctattgtgaaagaaatttgattttttaattggtgtgtgttatgcccaagatgttaggatgaagatgctacctttttaaaaattttagttattggtaaaatgtttaattttacttaaaattaatttcttttcttgaaagttgtttattctgttctaaaagtagtcctgtcactgtgtttttatgctacttatagaaggggaactgattgccgttcctaggctgttttaaccaaagcaaaggaaaaataattttaacatcttgtcaatagctacttcaacaaaccatattttgggacttcattttttgtatataaaagaaaatatacttctatc

SEQ ID NO: 55335 - protein, 547 aa, Artificial Sequence
  derived and/or modified sequence
MDPMELRNVNIEPDDESSSGESAPDSYIGIGNSEKAAMSSQFANEDTESQKFLTNGFLGKKKLADYADEHHPGTTSFGMSSFNLSNAIMGSGILGLSYAMANTGIILFIIMLLAVAILSLYSVHLLLKTAKEGGSLIYEKLGEKAFGWPGKIGAFVSITMQNIGAMSSYLFIIKYELPEVIRAFMGLEENTGEWYLNGNYLIIFVSVGIILPLSLLKNLGYLGYTSGFSLTCMVFFVSVVIYKKFQIPCPLPVLDHSVGNLSFNNTLPMHVVMLPNNSESSDVNFMMDYTHRNPAGLDENQAKGSLHDSGVEYEAHSDDKCEPKYFVFNSRTAYAIPILVFAFVCHPEVLPIYSELKDRSRRKMQTVSNISITGMLVMYLLAALFGYLTFYGEVEDELLHAYSKVYTLDIPLLMVRLAVLVAVTLTVPIVLFPIRTSVITLLFPKRPFSWIRHFLIAAVLIALNNVLVILVPTIKYIFGFIGASSATMLIFILPAVFYLKLVKKETFRSPQKVGALIFLVVGIFFMIGSMALIIIDWIYDPPNSKHH

SEQ ID NO: 55336 - protein, 259 aa, Artificial Sequence
  derived and/or modified sequence
MDPMELRNVNIEPDDESSSGESAPDSYIGIGNSEKAAMSSQFANEDTESQKFLTNGFLGKKKLADYADEHHPGTTSFGMSSFNLSNAIMGSGILGLSYAMANTGIILFIIMLLAVAILSLYSVHLLLKTAKEGGSLIYEKLGEKAFGWPGKIGAFVSITMQNIGAMSSYLFIIKYELPEVIRAFMGLEENTGEWYLNGNYLIIFVSVGIILPLSLLKNLGYLGYTSGFSLTCMVFFVSVMIYKKISFFLQIFIILKLFF

SEQ ID NO: 55337 - protein, 192 aa, Artificial Sequence
  derived and/or modified sequence
MDPMELRNVNIEPDDESSSGESAPDSYIGIGNSEKAAMSSQFANEDTESQKFLTNGFLGKKKLADYADEHHPGTTSFGMSSFNLSNAIMGSGILGLSYAMANTGIILFIIMLLAVAILSLYSVHLLLKTAKEGGSLIYEKLGEKAFGWPGKIGAFVSITMQNIGAMSSYLFIIKYELPEVIRAFMGLEENTG

SEQ ID NO: 55338 - protein, 219 aa, Artificial Sequence
  derived and/or modified sequence
MDPMELRNVNIEPDDESSSGESAPDSYIGIGNSEKAAMSSQFANEDTESQKFLTNGFLGKKKLADYADEHHPGTTSFGMSSFNLSNAIMGSGILGLSYAMANTGIILFIIMLLAVAILSLYSVHLLLKTAKEGGSLIYEKLGEKAFGWPGKIGAFVSITMQNIGAMSSYLFIIKYELPEVIRAFMGLEENTGEWYLNGNYLIIFVSVGIILPLSLLKNL

SEQ ID NO: 55339 - DNA, 1644 bp, Artificial Sequence
  derived and/or modified sequence
atggatcccatggaactcagaaatgttaacatcgagcctgacgatgagagttctagcggggaaagcgccccagattcttacatcggcatagggaactctgagaaggccgcgatgtccagccagtttgcaaatgaggataccgagagtcagaagttcctgaccaatgggttccttggtaaaaagaagctggctgattacgcagacgagcatcaccccggcacaacctcatttggtatgagttcattcaatctaagcaacgccatcatggggtcgggaattctgggactgagctatgctatggctaacaccggtatcatcctcttcataatcatgctcctggccgttgccatactgtccctgtactccgtacatctgctgctgaaaaccgctaaggagggtgggagtctgatctacgaaaagctcggtgagaaggctttcggctggcctgggaagattggggcgtttgtgtctattacaatgcaaaacataggcgctatgtcaagctacttgttcataattaagtacgaactgcctgaggtgatacgggcgtttatggggctggaggaaaacacgggggagtggtatcttaacggaaactacctgatcattttcgtctctgtgggaattatcctgccactgtccctgctcaagaacctgggttacctgggctatactagcgggttttctctgacctgtatggtgtttttcgtgtctgtcgtcatttataaaaagttccaaattccctgtcctctgcctgtccttgatcactctgtgggaaatctttcctttaataacaccctcccaatgcacgtggtcatgttgccaaacaattccgaatcatccgatgtgaacttcatgatggactatacacatagaaacccggctggccttgatgagaaccaggctaaaggtagcctgcacgattcaggtgtggagtatgaggcacactctgatgataagtgcgagcctaagtacttcgtgttcaattctaggacagcatatgccataccaatactcgtgtttgccttcgtctgtcaccccgaagtcctgcctatctattctgaactcaaagacaggtcaaggcggaagatgcaaactgtgtcaaatattagcattaccggcatgctcgtcatgtatctgctggccgcattgtttggttatctcacgttctatggcgaagtggaagatgagctgcttcatgcctattccaaggtgtataccctggatatcccactcctgatggtgaggctggcagtgctggtggcagtaaccttgaccgtgcccattgtactcttcccaattagaacgtctgtgatcactctgcttttccctaagagaccattctcttggatccggcacttcctgattgccgctgtgctcatcgccctgaacaatgtcctggtgatactggttccaactatcaaatatatcttcggattcattggcgcctcatctgctaccatgctgatttttattctgcccgcagtgttttatctgaagttggtcaaaaaggagacctttagatctccccagaaagtgggagctcttatatttcttgtcgtgggtattttctttatgattggcagcatggccttgattatcatagattggatatacgacccgcctaatagtaagcatcactag

SEQ ID NO: 55340 - DNA, 780 bp, Artificial Sequence
  derived and/or modified sequence
atggatcctatggagctgaggaacgtgaatattgagcctgacgacgagtctagctccggggaaagcgcacctgactcttatatcggaattggaaactccgaaaaagctgcaatgagctcccagttcgctaatgaggataccgaatcccagaaatttcttacaaacggattcttaggaaaaaagaagttggcagactacgctgacgagcaccaccctggtacaacctctttcgggatgagcagtttcaacctcagcaacgccattatggggtcgggtatcctcggcctctcttatgccatggcgaacacaggtatcatcctgttcatcattatgttgctcgccgtcgcaatcctgagtctctactcggtgcacctgctccttaaaacagcaaaagagggagggtctctgatttacgagaagcttggtgagaaagcctttggctggccagggaagatcggtgcttttgtgtccattacaatgcagaatatcggggctatgtccagctacctgtttattataaaatacgagctccccgaggtcattagagccttcatgggcctggaggagaacaccggggaatggtacctgaatggaaactacctcatcattttcgttagtgtagggattatcttaccactcagcctcttgaaaaacctgggttatcttggatatacatccggattcagtttaacgtgtatggtgttttttgtcagtgtaatgatatataagaagatcagtttctttcttcaaatctttatcattctcaagctgtttttctag

SEQ ID NO: 55341 - DNA, 1644 bp, Artificial Sequence
  derived and/or modified sequence
atggatcctatggagctgagaaacgtcaacatcgagcccgatgacgagagcagctcaggagagtctgcccccgacagctatataggtataggtaactcagagaaggccgccatgagtagccaattcgccaacgaagacacagagtcccaaaaatttttaacaaatggcttcttgggaaaaaaaaagctggccgactacgcggatgaacaccaccctggcacgaccagttttggtatgagcagctttaatctcagtaacgccattatgggaagcggaattttgggcctgagttacgcaatggccaacaccggcatcattttgttcattatcatgttgctggccgtggccattctgtccctgtactccgtacacttgttgttaaagactgctaaagagggcggatccctcatctatgagaagttgggagagaaggctttcggttggccgggaaagatcggcgcattcgtttcaattactatgcagaacatcggggctatgtcctcttacctgttcatcattaagtatgaacttcccgaggtcatccgggcttttatggggctggaagagaatacgggagagtggtatctgaacggcaattaccttattatttttgtgtctgtcgggatcattctgcctcttagcctccttaagaacttagggtacttaggatacactagcggcttctcgctcacctgcatggtgttttttgtcagcgtcgtgatttataaaaagttccagattccttgccctcttcctgtgctggaccactctgtcggaaatttgtcttttaataacaccttgccaatgcatgtggtgatgctgcccaacaactcggagtcaagcgacgtgaattttatgatggattacactcaccgcaaccccgctggcctggacgaaaaccaggcaaaagggtctcttcacgattccggagtcgaatacgaggcacactccgacgacaaatgtgaacctaagtatttcgtattcaacagtcgcactgcttacgcaatccctattctggtgtttgcttttgtgtgccaccccgaggtactcccgatctattcagagttgaaggatagaagccgacggaaaatgcagacagtcagtaacatctcgataactggaatgctggtaatgtatctactggcagccctgttcggctacctcacattctatggcgaggtagaagacgaattgctgcacgcctactctaaagtgtacacgttggatattcccctgctcatggtaagattggctgtccttgtggcagttacgctcactgtccccatcgttctcttccccattagaacctctgtgataaccctcctgttccccaagaggccttttagctggattagacacttcttgattgccgccgtgctgatagcgcttaacaacgtcttagtaatactcgtgcctactattaagtacatctttggtttcatcggagcatctagcgcaactatgctgatctttattctgcctgctgtgttctatcttaaactcgttaaaaaggagaccttccgatctccacagaaggtgggtgccctaattttcttggttgtagggatcttcttcatgataggcagtatggccctgataatcatagactggatatatgacccacccaatagcaaacaccactag

SEQ ID NO: 55342 - DNA, 579 bp, Artificial Sequence
  derived and/or modified sequence
atggacccaatggagctccggaacgtaaacatcgagcccgatgatgaaagcagcagcggagagtcagcgccagacagctacataggtatcggcaattcagagaaggctgccatgtcttcacagttcgctaacgaggatacagaaagtcagaaattcctgaccaacggattcctcggcaaaaagaagttagctgactatgcagatgagcaccaccctggaactacttcgtttggcatgagctcctttaatttatctaatgctatcatgggatccggaatactgggtctaagttacgccatggccaatactgggattatcctgttcatcattatgctgctcgccgtcgctattctgtccttgtactcagttcatttactgctgaaaacggctaaggagggaggttcgctaatttacgaaaaattgggcgaaaaggcctttggctggcctggaaaaatcggcgcatttgtctcgattacgatgcaaaacattggagctatgagctcctatctgtttattattaaatacgagttgcctgaggtgattagagcttttatgggattggaagaaaatacaggttag

SEQ ID NO: 55343 - DNA, 660 bp, Artificial Sequence
  derived and/or modified sequence
atggatccgatggagctgcggaatgtgaacatcgagcctgacgacgagtcctccagtggcgaatcggcacccgactcatacatcgggatcgggaattctgagaaagccgcgatgtcttcccaattcgctaatgaagacactgaatctcagaaattcctcaccaatgggtttctgggcaagaagaagctcgccgattacgcggacgagcaccatccaggtaccactagcttcggcatgtcttcttttaatctgtcgaatgccattatggggagtggaattttgggcctcagttatgcaatggctaataccggcattatcctcttcatcatcatgctgctggccgtggcaatcctcagcctatacagtgtgcacctgctactcaaaaccgctaaggagggtggctccttgatttatgaaaaactgggcgagaaggcgttcggttggcctggaaaaatcggagctttcgtgagcatcacaatgcagaatattggcgccatgtcttcctatttgttcatcattaaatacgaattacccgaagtaattagggcattcatgggccttgaagaaaacaccggtgagtggtacctgaacggaaattacctcattatctttgtgagcgttggcattattctcccactttctctgttaaaaaacctctag

SEQ ID NO: 55344 - DNA, 1644 bp, Artificial Sequence
  derived and/or modified sequence
atggaccccatggagctgagaaatgtgaacattgaaccagatgatgagagcagcagtggagagagcgccccagacagctacatcggcatcggcaacagcgagaaggccgccatgagcagccagtttgccaatgaagacacagagagccagaagttcctgaccaacggcttcctgggcaagaagaagctggccgactatgcagatgagcaccaccctggcaccaccagctttggcatgagcagcttcaacctgagcaatgccatcatgggcagcggcatcctgggcctgtcctatgccatggccaacacaggcatcatcctcttcatcatcatgctgctggccgtggccatcctgagcctgtacagcgtgcacctgctgctgaagacagccaaggagggcggcagcctcatctatgagaagctgggggagaaggccttcggctggccaggcaagatcggggcctttgtgtccatcaccatgcagaacattggagccatgagcagctacctgttcatcatcaagtatgagctgcctgaggtgatccgggccttcatgggcctggaggagaacacaggagagtggtacctgaatggaaactacctgatcatctttgtgtctgtgggcatcatcctgcccctgagcctgctgaagaacctgggctacctgggctacaccagcggcttcagcctgacctgcatggtgttctttgtgtctgtggtgatctacaagaagttccagatcccctgccccctgcctgtgctggaccacagcgtgggcaacctgtccttcaacaacaccctgcccatgcacgtggtgatgctgcccaacaacagcgagagcagtgatgtgaacttcatgatggactacacccacaggaacccagctggcctggatgagaaccaggccaagggcagcctgcatgattctggagtggagtatgaggcccacagtgatgacaagtgtgagcccaagtactttgtgttcaacagcaggacagcctatgccatccccatcctggtgtttgcctttgtgtgccaccctgaggtgctgcccatctacagcgagctgaaggacaggagcaggaggaagatgcagacagtgagcaacatcagcatcaccggcatgctggtgatgtacctgctggccgccctgtttggctacctgaccttctatggagaggtggaggatgagctgctgcacgcctacagcaaggtgtacaccctggacatccccctgctgatggtgcggctggccgtgctggtggccgtgaccctgactgtgcccatcgtgctcttccccatccgcaccagcgtcatcaccctgctcttccccaagaggcccttctcctggatccgccacttcctgattgctgctgtgctgattgccctgaacaacgtgctggtgatcctggtgcccaccatcaagtacatcttcggcttcatcggggccagcagcgccaccatgctgatcttcatcctgcctgctgtgttctacctgaagctggtgaagaaggagaccttccgcagcccccagaaggtgggcgccctgatcttcctggtggtgggcatcttcttcatgattggctccatggccctgatcatcatcgactggatctatgacccccccaacagcaagcaccactag

SEQ ID NO: 55345 - DNA, 780 bp, Artificial Sequence
  derived and/or modified sequence
atggaccccatggagctgagaaatgtgaacattgaaccagatgatgagagcagcagtggagagagcgccccagacagctacatcggcatcggcaacagcgagaaggccgccatgagcagccagtttgccaatgaagacacagagagccagaagttcctgaccaacggcttcctgggcaagaagaagctggccgactatgcagatgagcaccaccctggcaccaccagctttggcatgagcagcttcaacctgagcaatgccatcatgggcagcggcatcctgggcctgtcctatgccatggccaacacaggcatcatcctcttcatcatcatgctgctggccgtggccatcctgagcctgtacagcgtgcacctgctgctgaagacagccaaggagggcggcagcctcatctatgagaagctgggggagaaggccttcggctggccaggcaagatcggggcctttgtgtccatcaccatgcagaacattggagccatgagcagctacctgttcatcatcaagtatgagctgcctgaggtgatccgggccttcatgggcctggaggagaacacaggagagtggtacctgaatggaaactacctgatcatctttgtgtctgtgggcatcatcctgcccctgagcctgctgaagaacctgggctacctgggctacaccagcggcttcagcctgacctgcatggtgttctttgtgtctgtgatgatctacaagaagatctccttcttcctgcagatcttcatcatcctgaagctgttcttctag

SEQ ID NO: 55346 - DNA, 579 bp, Artificial Sequence
  derived and/or modified sequence
atggaccccatggagctgagaaatgtgaacattgaaccagatgatgagagcagcagtggagagagcgccccagacagctacatcggcatcggcaacagcgagaaggccgccatgagcagccagtttgccaatgaagacacagagagccagaagttcctgaccaacggcttcctgggcaagaagaagctggccgactatgcagatgagcaccaccctggcaccaccagctttggcatgagcagcttcaacctgagcaatgccatcatgggcagcggcatcctgggcctgtcctatgccatggccaacacaggcatcatcctcttcatcatcatgctgctggccgtggccatcctgagcctgtacagcgtgcacctgctgctgaagacagccaaggagggcggcagcctcatctatgagaagctgggggagaaggccttcggctggccaggcaagatcggggcctttgtgtccatcaccatgcagaacattggagccatgagcagctacctgttcatcatcaagtatgagctgcctgaggtgatccgggccttcatgggcctggaggagaacacaggatag

SEQ ID NO: 55347 - DNA, 660 bp, Artificial Sequence
  derived and/or modified sequence
atggaccccatggagctgagaaatgtgaacattgaaccagatgatgagagcagcagtggagagagcgccccagacagctacatcggcatcggcaacagcgagaaggccgccatgagcagccagtttgccaatgaagacacagagagccagaagttcctgaccaacggcttcctgggcaagaagaagctggccgactatgcagatgagcaccaccctggcaccaccagctttggcatgagcagcttcaacctgagcaatgccatcatgggcagcggcatcctgggcctgtcctatgccatggccaacacaggcatcatcctcttcatcatcatgctgctggccgtggccatcctgagcctgtacagcgtgcacctgctgctgaagacagccaaggagggcggcagcctcatctatgagaagctgggggagaaggccttcggctggccaggcaagatcggggcctttgtgtccatcaccatgcagaacattggagccatgagcagctacctgttcatcatcaagtatgagctgcctgaggtgatccgggccttcatgggcctggaggagaacacaggagagtggtacctgaatggaaactacctgatcatctttgtgtctgtgggcatcatcctgcccctgagcctgctgaagaacctgtag

SEQ ID NO: 55348 - DNA, 1644 bp, Artificial Sequence
  derived and/or modified sequence
atggaccccatggagctgcggaacgtgaacatcgagcccgacgacgagagcagctcaggagaatccgctcccgattcttacattggcatcgggaattccgaaaaagcagcgatgagttctcaatttgcaaatgaagacaccgagtcccagaagtttttaaccaacggttttctggggaagaaaaagctggctgactatgctgacgaacaccatcccgggacgacatcctttggcatgtcatccttcaacctcagtaatgccatcatggggtcagggattctcggcctgtcctatgccatggctaacaccggtatcatcctcttcatcattatgctactggctgtcgccatactcagcctgtatagcgtgcacctgctgctgaaaacagcaaaggaaggcgggtcgctgatttatgagaagctgggggaaaaagccttcggatggccgggaaagattggcgccttcgtaagtattacaatgcagaacataggcgccatgagttcttaccttttcattataaagtacgagctccccgaggtcatcagggcttttatgggacttgaggagaatactggcgaatggtaccttaatggcaattacttaatcatcttcgtctctgtgggcatcatcttgcccctgtcactgctgaagaatctcggatacctggggtacactagcggctttagcctgacatgtatggtgtttttcgtgtcagtcgtgatatacaaaaagtttcagattccgtgcccactgcccgtcctcgatcattccgtaggcaacctgtcattcaataatacactacccatgcacgtggtaatgctccctaacaactcagagtcctctgacgtgaattttatgatggactacacacatcggaatcctgctggtctggacgaaaaccaggccaaagggagcttacatgactctggcgtagagtacgaggcccactccgatgacaaatgcgagcctaagtatttcgttttcaacagcagaacggcctatgcgattccgattctagtgtttgctttcgtctgtcaccccgaggtcttgcctatatacagcgaactaaaagaccggtcacgccggaagatgcagacggtgagcaacatctctattaccggcatgctcgtgatgtatctgttggccgccctttttggctacctgacattttatggtgaagtggaagatgaacttctacatgcttactccaaagtgtacacactggacatccccctactgatggtgcgtctggcggtcctagtagccgtgaccctgacagtgcctattgtgctgttcccaatccggacttccgtgatcacgctgctgttcccgaaacgccccttctcgtggatacgacattttctgattgcagccgttctgatcgcgctcaacaacgttctggtgattctggtgccaactattaaatatatatttggatttattggggcctcatcagccacaatgttgatctttattctccccgctgtgttttacttgaagctggtgaagaaagagaccttccgaagcccccagaaagttggggctttgattttcctggtcgtgggcatcttttttatgattggctctatggctctcatcattattgattggatatatgacccgcctaacagtaagcatcactag

SEQ ID NO: 55349 - DNA, 780 bp, Artificial Sequence
  derived and/or modified sequence
atggaccccatggagctgcggaacgtgaacatcgagcccgacgacgagtccagtagtggagagtccgcccctgattcatacattggaatcggaaatagtgagaaggctgcaatgtcttcccaatttgccaacgaagacaccgaaagtcagaagtttctgaccaacgggttcctcggcaagaaaaaactcgctgactacgccgacgagcatcatcctggaactactagcttcggcatgagcagttttaacctctccaacgccatcatggggtccgggattctgggcttgagctatgctatggcaaacacaggaatcatcctgttcattatcatgttgttagctgtagccatcctctccctctactcggttcatctcctgcttaagacagcgaaagagggaggctctttgatctatgagaagctcggcgagaaggcatttggctggcctgggaaaatcggcgcattcgtatccattactatgcagaacattggggcaatgtcctcttacctctttataatcaagtacgagctgcctgaggtgatccgggcctttatgggcttagaggagaataccggcgagtggtatctcaacggcaactacctgatcattttcgtgagtgtcggcatcatcttgccactgagcctcctgaaaaatctgggctatctgggctataccagcgggtttagcctgacttgcatggtcttttttgtttctgtcatgatttataagaagatcagcttctttctacaaatctttatcattctgaagctcttcttctag

SEQ ID NO: 55350 - DNA, 1644 bp, Artificial Sequence
  derived and/or modified sequence
atggaccccatggagctgcggaacgtgaacatcgagcccgacgacgaatcctcttcaggggagtccgcaccagattcctacattggcattggcaactccgagaaggccgcaatgagctcccaattcgctaacgaggataccgagtcacagaagtttctgactaatggctttttggggaagaaaaagttagctgactatgcagacgaacaccacccgggcactacctcttttggcatgtcctcgtttaatttgagcaatgcaatcatgggatccggcatcctgggtctctcttacgctatggccaatactggcatcatcctgttcatcattatgctccttgcagtcgctatcctcagcctctactccgtacatcttctcctcaaaactgcaaaggaaggaggaagtcttatatacgagaaattgggcgaaaaagcattcggttggcctggaaagataggtgcctttgtttcaatcacaatgcagaacatcggtgctatgtcatcttatctgtttataatcaaatacgagctgcctgaagtcatcagggctttcatgggattagaggagaataccggtgagtggtatcttaacggaaactatctcatcattttcgtgtctgtgggaattatcctgcctctatcactgctcaaaaacttaggctacctgggttatacttccggattttcacttacctgcatggttttctttgttagcgtagtcatatataagaagttccagataccttgccccttgccagtcctggaccattccgtaggtaatctctcattcaataacacactcccgatgcatgtcgtcatgctcccaaataacagcgaaagctcagacgtgaacttcatgatggattacactcacaggaaccccgccgggctcgatgagaaccaggcaaagggaagtcttcacgattccggcgttgaatatgaggctcacagcgacgacaagtgtgaacctaaatactttgtgtttaacagccggactgcctacgctatccccatcctggtattcgcctttgtgtgtcacccggaagtgctacctatctatagcgaactgaaggatagatcaagacggaaaatgcagacagtctccaatatttccataactgggatgttagtgatgtatcttctggcagccctgtttgggtacttaaccttctatggagaagtagaagatgagctgctgcacgcctattcgaaagtgtatactttggatataccgctgcttatggtaagactcgccgtgctggttgctgttacactcacagttcccatagtccttttccctatccgcacctcagtgataactctgctgttcccaaagcgaccgttcagctggatccgacatttcttgattgctgctgtcctgatcgcgctgaacaatgtgctcgtgatcttggttccaactatcaaatatatttttggctttattggtgcttcatcagctaccatgctcatcttcatcttacccgccgtgttttatttaaaactggttaaaaaagagacctttcggtcacctcagaaggtcggggctctcatcttccttgtcgttggaatattctttatgatcggatccatggccctcatcattatcgattggatttacgatccgcccaattccaaacatcactag

SEQ ID NO: 55351 - DNA, 579 bp, Artificial Sequence
  derived and/or modified sequence
atggaccccatggagctgcggaacgtgaacatcgagcccgacgacgagtcttcatcaggggaaagcgcacctgacagctatatcggtatcgggaacagcgagaaagccgctatgtcaagtcagttcgctaacgaagataccgagagtcaaaaatttctcaccaacggcttccttggaaagaagaaactagcggactatgccgacgagcatcatccaggaacaaccagcttcggaatgtcctcattcaatctgtcaaatgcgataatgggttctgggatactgggactgagctacgcgatggccaataccgggataatactgtttataatcatgctgctcgcggtcgccatcctaagcttatactccgttcatcttctgcttaaaacggcaaaagagggaggctcactcatctatgagaaactaggagaaaaggcctttggctggcctggaaagatcggggcctttgtctctattacaatgcaaaatattggggcaatgagttcttatctattcataatcaagtacgaactgcccgaagttatcagagcattcatgggcctcgaagagaacactggctag

SEQ ID NO: 55352 - DNA, 660 bp, Artificial Sequence
  derived and/or modified sequence
atggaccccatggagctgcggaacgtgaacatcgagcccgacgacgagtcctcatccggtgagtcagccccagattcttatataggcattggcaatagtgagaaagcagccatgtctagtcagttcgcaaacgaagacacagagagtcagaagttcctcactaacggcttcctaggcaagaagaagctggctgattacgctgacgaacatcaccccggaactactagtttcggcatgtcatccttcaatctgtcaaacgcaattatgggcagtgggatactgggcctttcctacgccatggcaaatacagggataattctcttcataattatgctactggctgtagccattctgagtctatatagcgtccacctcttgctgaaaactgctaaggagggcggctctttgatctacgaaaaactgggagagaaagcatttggctggcctggaaagattggcgcatttgtgagcattacgatgcagaacattggcgctatgtcctcatatctgtttatcataaagtacgaactgccagaagttattcgtgccttcatgggcttggaagagaacacgggtgaatggtatctaaatggcaattatctaatcattttcgtctcagtgggcatcatactgcctctgagtttgctgaagaatctgtag

SEQ ID NO: 55353 - DNA, 1644 bp, Artificial Sequence
  derived and/or modified sequence
atggacccgatggaactccgaaatgtcaacatcgagccggacgacgaatcatcctcaggcgagagtgcccctgattcatatattggtatcggcaacagtgaaaaagccgcaatgagcagtcagttcgccaatgaggataccgagtcccaaaagttccttacaaacggctttttggggaagaagaagctggcagattacgctgacgagcaccatccaggtacaacgtcatttgggatgagttccttcaatctatccaatgcaattatgggaagcggtatccttggcctgtcctatgccatggcaaatacaggcatcatcttgttcatcatcatgctccttgccgtggcaatcttgagtctctatagcgtccacttgctcttaaaaactgccaaggagggaggatcactcatctatgagaaactcggagagaaggcattcggatggcccggtaagatcggagcttttgttagtatcacgatgcagaacattggcgcaatgtcatcctatctctttatcatcaaatacgaactcccagaagttatccgcgctttcatgggcctggaggaaaataccggagaatggtatctgaacggcaattatctgatcatctttgtgtctgtaggcattatcttgcctctttcccttctcaagaatctgggctatctaggatatactagtggtttttcactgacctgtatggttttttttgttagcgtcgtcatttacaagaaattccaaattccttgtcctctccctgtgctagaccactccgtgggtaacctaagcttcaacaatacgctcccgatgcacgtggtgatgctgccgaataattcagaatctagcgacgtgaattttatgatggactacacacaccggaatcctgctggcctggacgagaaccaggccaagggatccctgcacgacagtggcgtggaatacgaagctcattcagacgacaagtgcgagccgaagtactttgtgttcaacagcaggactgcctatgcaatccctattctcgttttcgcctttgtgtgccacccagaggtgctgcccatctacagcgagctaaaggacagatcccgcagaaaaatgcagacggtgtctaacatctctatcacaggaatgcttgttatgtacctgttggccgctctgttcggttacctgactttttacggtgaggtggaggatgagctgcttcacgcctactcgaaggtctacaccctggacatcccacttctcatggtcaggttggcagtgctagtggccgtcacactgacggtgccaattgtgctcttccccatccggactagtgtcataaccctgctgttcccgaagcggcctttctcgtggattcggcatttcctgattgctgccgtgttgatcgctttgaataatgtcctggtgatactggtcccaactatcaagtacatctttggatttatcggcgcttcgagtgctaccatgctgatatttattctaccagcagttttttacctgaagctggtgaagaaagagacatttcggagtcctcagaaggttggcgctctaatatttcttgtcgtgggaatctttttcatgatcggctctatggccctgatcatcatcgactggatctacgatccccctaattccaaacaccattag

SEQ ID NO: 55354 - DNA, 780 bp, Artificial Sequence
  derived and/or modified sequence
atggacccaatggagctgaggaatgtcaatatcgaacccgacgacgagagtagtagtggtgagtccgcgcctgacagttacattggaataggtaacagcgagaaagccgctatgagtagtcaatttgcaaatgaggacaccgagagtcagaagttcctaactaatggtttcctggggaagaagaagcttgccgattacgccgatgagcaccaccccggaacgactagctttggcatgtcctccttcaatctttcaaacgcgataatgggctcagggatccttgggctgtcatacgccatggcgaacacggggattatcctgtttatcatcatgctactggccgtcgctattctaagtttgtactccgtgcatctactgctgaagacagccaaggaagggggatccctaatttacgaaaaacttggagaaaaggcatttggatggcccggaaagattggcgcattcgtgagcataacaatgcagaacataggagccatgtcctcttacctcttcatcattaagtatgaactgcccgaggtcatccgggctttcatgggcttagaagaaaacaccggtgagtggtacctgaacggaaactacctgatcatttttgtgtccgtcggaataattttgcccctgtctctgctaaaaaatctgggatacctcggatacacctcaggcttttccttaacatgcatggtattcttcgtaagcgtgatgatctacaagaaaatcagtttcttccttcagatcttcatcatactgaagctctttttttag

SEQ ID NO: 55355 - DNA, 1644 bp, Artificial Sequence
  derived and/or modified sequence
atggaccccatggagctgcggaatgtgaacatcgagccagacgacgagtctagttctggagagtcagcccctgactcctacatcggcatcgggaacagtgagaaggccgcaatgagctcgcagttcgcgaacgaagatactgagtcacagaaattcctaacaaacggatttctaggcaagaagaagctggctgattatgctgatgagcatcaccccggtacaacttccttcgggatgtcatcattcaatcttagtaacgcgattatgggctctggcatactgggtctgtcatatgctatggccaacactggcatcattctgtttatcataatgcttttagccgttgccatccttagtctgtattcggtccacctcttactgaaaaccgccaaggagggaggcagcctgatttatgagaaactgggtgaaaaggcttttggctggcccggaaagattggggcatttgtctccattacaatgcagaacatcggagctatgagctcttacttgtttattattaagtacgagctgcccgaagtgattagagccttcatgggtttggaagagaataccggcgagtggtacctgaacggcaattatctgatcattttcgtgtccgtgggcatcattctgccactctcgctgcttaagaatcttggatacctcggatatacaagcggcttctcattgacatgcatggtgttctttgtttcggtggtgatctataaaaagttccagatcccctgtcctctcccagtcctggatcactccgtgggcaacctgtcttttaacaacaccctccccatgcatgtcgtaatgttgccaaataactcagagtcttcagacgtcaattttatgatggactatactcacagaaacccagccggtttggatgagaaccaggccaaaggtagcttgcatgattccggcgtcgaatacgaagcgcacagtgacgacaagtgtgagccaaagtactttgtatttaattcccgaactgcgtacgccattcctattcttgtgtttgccttcgtctgtcaccccgaggtcctgccaatttattctgagctgaaggaccggagccgccgtaagatgcagaccgtcagcaatatctctatcaccggaatgctggtgatgtacttgcttgctgctctgtttggttatctgacattttacggggaggtggaggacgaactgctccacgcgtatagcaaagtttacacccttgatatcccactgttaatggtgagactcgctgttctggtggctgtgacactgactgtcccaattgtgttgttcccgatcaggacgtcagtgattactcttctgtttcccaaaaggccgttttcttggatccgtcattttctgatcgctgctgttttaatcgcactaaacaatgttctcgtaatactggtccctacaattaagtatatcttcggttttatcggagcaagtagcgccacaatgctgattttcatactccccgctgtcttttatctcaaactggtaaaaaaagagacattccgaagccctcagaaggtgggcgcactgatcttcttggtggtaggaattttctttatgatcggcagcatggcactaataattatagactggatttatgatccacccaactctaagcaccactag

SEQ ID NO: 55356 - DNA, 579 bp, Artificial Sequence
  derived and/or modified sequence
atggacccaatggagttgaggaacgtgaatattgagccagatgacgagagtagctccggcgaatccgctcctgacagctacattggcattggtaacagcgaaaaggctgccatgtcatcccagttcgctaatgaggataccgagagccagaaattcctcaccaatgggtttctgggcaaaaaaaaacttgcagactacgcggacgagcaccaccccggaaccacttctttcggaatgtcatcatttaacctgagcaatgcaatcatggggtccggaatcttgggtttaagctatgccatggccaacaccggcatcatactcttcataatcatgctcctggccgttgccattctatccctgtactcagtgcacctgctgttgaaaactgctaaggaggggggttcgttgatttatgagaagctcggggagaaagcattcggctggcccggaaagatcggcgcatttgtctccattaccatgcaaaacattggagctatgtcctcttacctgttcattattaaatacgaactgcctgaggtgattagagctttcatgggactcgaagagaacaccgggtag

SEQ ID NO: 55357 - DNA, 660 bp, Artificial Sequence
  derived and/or modified sequence
atggatcccatggaactgaggaatgtcaatatcgagcccgacgatgaatcatcttcgggcgaatcagcgcctgactcctacattggcattggcaattcagagaaggctgctatgagcagccagtttgctaacgaggatactgaaagccagaagttcttgactaacggattcttggggaagaagaagctggctgactacgctgatgagcatcatccaggaactacatcctttggaatgtccagttttaacctctccaatgccatcatgggatctggcattcttggactgtcctacgccatggctaacactggcataattttgttcatcatcatgctcttggccgtcgcgatcctgtcgctgtacagtgtgcatttgttgctgaagacagccaaggaagggggatcactcatctatgagaagctgggagaaaaggcctttggctggcctggtaagatcggcgcatttgtgagtataacaatgcaaaatattggagccatgtctagttatttgtttattataaagtacgagctgcccgaggtcattagggcttttatgggtctggaagagaacaccggtgagtggtacctgaatgggaattacctcattatctttgtcagtgtgggtatcatcttgccactgtcgctcctcaaaaatctgtag

SEQ ID NO: 55358 - DNA, 2728 bp, Artificial Sequence
  derived and/or modified sequence
actggggtgtgcgcagcgcctggagcatgagccgggtggtggcgtgcacggaggatcgcgggaggctgccgcctcgggacaccccactcacacagagctgacgcaagttggacagaaggaggtgttggggtgaggtggtggtgttgattggcttgtctcgttcactcccactggtctttaaatcaatgtctagatctctaaagtttcatataaatcaaagctgttacacgggtctgccattccaaacaagtcaggaaagcctgcacaggactggataaataattaagaacagagtgttctgaacatcaacacaaagtggaagaaccttaagctgaaggtacagtatattatttacactgaaggggcttgtgtgtggacaagaaagcgctgacagctcaaatggatcccatggaactgagaaatgtcaacatcgaaccagatgatgagagcagcagtggagaaagtgctccagatagctacatcgggataggaaattcagaaaaggcagcaatgagcagtcaatttgctaatgaagacactgaaagtcagaaattcctgacaaatggatttttggggaaaaagaagctggcagattatgctgatgaacaccatcccggaaccacttcctttggaatgtcttcatttaacctgagtaatgccatcatgggcagtgggatcctgggcttgtcctatgccatggccaacacagggatcatactttttataatcatgctgcttgctgtggcaatattatcactgtattcagttcaccttttattaaaaacagccaaggaaggagggtctttgatttatgaaaaattaggagaaaaggcatttggatggccgggaaaaattggagcttttgtttccattacaatgcagaacattggagcaatgtcaagctacctctttatcattaaatatgaactacctgaagtaatcagagcattcatgggacttgaagaaaatactggagaatggtacctcaatggcaactacctcatcatatttgtgtctgttggaattattcttccactttcgctccttaaaaatttaggttatcttggctataccagtggattttctcttacctgcatggtgttttttgttagtgtggtgatttacaagaaattccaaataccctgccctctacctgttttggatcacagtgttggaaatctgtcattcaacaacacgcttccaatgcatgtggtaatgttacccaacaactctgagagttctgatgtgaacttcatgatggattacacccaccgcaatcctgcagggctggatgagaaccaggccaagggctctcttcatgacagtggagtagaatatgaagctcatagtgatgacaagtgtgaacccaaatactttgtattcaactcccggacggcctatgcaattcctatcctagtatttgcttttgtatgccaccctgaggtccttcccatctacagtgaacttaaagatcggtcccggagaaaaatgcaaacggtgtcaaatatttccatcacggggatgcttgtcatgtacctgcttgccgccctctttggttacctaaccttctatggagaagttgaagatgaattacttcatgcctacagcaaagtgtatacattagacatcccccttctcatggttcgcctggcagtccttgtggcagtaacactaactgtgcccattgtcctcttcccaattcgtacatcagtgatcacactgttatttcccaaacgacccttcagctggatacgacatttcctgattgcagctgtgcttattgcacttaataatgttctggtcatccttgtgccaactataaaatacatcttcggattcataggggcttcttctgccactatgctgatttttattcttccagcagttttttatcttaaacttgtcaagaaagaaacttttaggtcaccccaaaaggtcggggctttaattttccttgtggttggaatattcttcatgattggaagcatggcactcattataattgactggatttatgatcctccaaattccaagcatcactaacacaaggaaaaatactttctttttctattggaaatggttacaagttatactccaaaagatatttgaattatcttgattggaatgttattcataggaaataacaggaagattccaaagacgtttaccagtaatatcaccaggcacctgcagaagaggaaaatcactgtttttgtcaaggatggttgtgtatgtgtttaaaataaaacctgtggtgcacatttctacccaggttttgctagagcagtgtgagatgatgaaggtgtatttttgctgctttacgagcagaataagggtaactgcatgtaacaatcatcagatagtactctttcccctgccgtctcctcatcctgcaccccctaaaaaagtaccaaacatttgcattctcagaacatcaaacaaaaatgccctggtggcaaagctatcaccatttaatgtcttctctcagtcttgcaccaaagtctctggtctgtttactaacagaggcaaaaggcatgtcttaggaactgtttctgtttctgtaaggtacatgaatggtcaaacaccagtctagagcatcttattgtcaacagcaaaataatattttgcccaccctgtttgtgacattgagttgtgacttctatattcaatagatttttgtaaatgttaaaacatctatatttaaatgttaaaacactaaatatagaga

SEQ ID NO: 55359 - DNA, 1729 bp, Artificial Sequence
  derived and/or modified sequence
gcagcgcctggagcatgagccgggtggtggcgtgcacggaggatcgcgggaggctgccgcctcgggacaccccactcacacagggcaaaaggatgtatacactccatcttcatttaaaacactggaggattggaaaggagaaaaggaacaggacagaaaaaaaaacagagtgttctgaacatcaacacaaagtggaagaaccttaagctgaaggtacagtatattatttacactgaaggggcttgtgtgtggacaagaaagcgctgacagctcaaatggatcccatggaactgagaaatgtcaacatcgaaccagatgatgagagcagcagtggagaaagtgctccagatagctacatcgggataggaaattcagaaaaggcagcaatgagcagtcaatttgctaatgaagacactgaaagtcagaaattcctgacaaatggatttttggggaaaaagaagctggcagattatgctgatgaacaccatcccggaaccacttcctttggaatgtcttcatttaacctgagtaatgccatcatgggcagtgggatcctgggcttgtcctatgccatggccaacacagggatcatactttttataatcatgctgcttgctgtggcaatattatcactgtattcagttcaccttttattaaaaacagccaaggaaggagggtctttgatttatgaaaaattaggagaaaaggcatttggatggccgggaaaaattggagcttttgtttccattacaatgcagaacattggagcaatgtcaagctacctctttatcattaaatatgaactacctgaagtaatcagagcattcatgggacttgaagaaaatactggagaatggtacctcaatggcaactacctcatcatatttgtgtctgttggaattattcttccactttcgctccttaaaaatttaggttatcttggctataccagtggattttctcttacctgcatggtgttttttgttagtgtgatgatctacaagaaaataagtttctttttgcaaatttttatcatactaaagttgttcttttaatttagcatatctaaaataggatttagttcagtttagctcacacaggtgtttgctgacattcattggccatttaatacagtgttgagtggttctctgtaaaagtataagtgctaacactacgaagaaatgcacacgatcattcttgctcacttctataacaaacttacataaaatggatttaaaaattcctactcacagcctaaaacttctggagttcactacctttttttcaaatcatagtaagatcacttgtgtattttatattttagtaaagccaattatgaagtacaagtatcatacacgtacttttgagctactattatttgaaaaaaatctgccaaatagcatctttaggatatatttacattttcactcatctaaaaagtatacaaaaataaaaagtggaaaaaggtatcttctgaatgttcaagagcatcctatagtgccaaataataaagcaccatttttttcttcataaccaggattaaaattcatatatactgcagggcagacatacatatgatagcttgtgctgattaatttaaccccatttgtaaacagatgaaaattttattttcttatttcatttataagatggctcaatgtattgggaggcttcttttttattacagaaagtgtatattggtatataataaatgaacttttcaaatgac

SEQ ID NO: 55360 - DNA, 3789 bp, Artificial Sequence
  derived and/or modified sequence
actggggtgtgcgcagcgcctggagcatgagccgggtggtggcgtgcacggaggatcgcgggaggctgccgcctcgggacaccccactcacacagaacagagtgttctgaacatcaacacaaagtggaagaaccttaagctgaaggtacagtatattatttacactgaaggggcttgtgtgtggacaagaaagcgctgacagctcaaatggatcccatggaactgagaaatgtcaacatcgaaccagatgatgagagcagcagtggagaaagtgctccagatagctacatcgggataggaaattcagaaaaggcagcaatgagcagtcaatttgctaatgaagacactgaaagtcagaaattcctgacaaatggatttttggggaaaaagaagctggcagattatgctgatgaacaccatcccggaaccacttcctttggaatgtcttcatttaacctgagtaatgccatcatgggcagtgggatcctgggcttgtcctatgccatggccaacacagggatcatactttttataatcatgctgcttgctgtggcaatattatcactgtattcagttcaccttttattaaaaacagccaaggaaggagggtctttgatttatgaaaaattaggagaaaaggcatttggatggccgggaaaaattggagcttttgtttccattacaatgcagaacattggagcaatgtcaagctacctctttatcattaaatatgaactacctgaagtaatcagagcattcatgggacttgaagaaaatactggagaatggtacctcaatggcaactacctcatcatatttgtgtctgttggaattattcttccactttcgctccttaaaaatttaggttatcttggctataccagtggattttctcttacctgcatggtgttttttgttagtgtggtgatttacaagaaattccaaataccctgccctctacctgttttggatcacagtgttggaaatctgtcattcaacaacacgcttccaatgcatgtggtaatgttacccaacaactctgagagttctgatgtgaacttcatgatggattacacccaccgcaatcctgcagggctggatgagaaccaggccaagggctctcttcatgacagtggagtagaatatgaagctcatagtgatgacaagtgtgaacccaaatactttgtattcaactcccggacggcctatgcaattcctatcctagtatttgcttttgtatgccaccctgaggtccttcccatctacagtgaacttaaagatcggtcccggagaaaaatgcaaacggtgtcaaatatttccatcacggggatgcttgtcatgtacctgcttgccgccctctttggttacctaaccttctatggagaagttgaagatgaattacttcatgcctacagcaaagtgtatacattagacatcccccttctcatggttcgcctggcagtccttgtggcagtaacactaactgtgcccattgtcctcttcccaattcgtacatcagtgatcacactgttatttcccaaacgacccttcagctggatacgacatttcctgattgcagctgtgcttattgcacttaataatgttctggtcatccttgtgccaactataaaatacatcttcggattcataggggcttcttctgccactatgctgatttttattcttccagcagttttttatcttaaacttgtcaagaaagaaacttttaggtcaccccaaaaggtcggggctttaattttccttgtggttggaatattcttcatgattggaagcatggcactcattataattgactggatttatgatcctccaaattccaagcatcactaacacaaggaaaaatactttctttttctattggaaatggttacaagttatactccaaaagatatttgaattatcttgattggaatgttattcataggaaataacaggaagattccaaagacgtttaccagtaatatcaccaggcacctgcagaagaggaaaatcactgtttttgtcaaggatggttgtgtatgtgtttaaaataaaacctgtggtgcacatttctacccaggttttgctagagcagtgtgagatgatgaaggtgtatttttgctgctttacgagcagaataagggtaactgcatgtaacaatcatcagatagtactctttcccctgccgtctcctcatcctgcaccccctaaaaaagtaccaaacatttgcattctcagaacatcaaacaaaaatgccctggtggcaaagctatcaccatttaatgtcttctctcagtcttgcaccaaagtctctggtctgtttactaacagaggcaaaaggcatgtcttaggaactgtttctgtttctgtaaggtacatgaatggtcaaacaccagtctagagcatcttattgtcaacagcaaaataatattttgcccaccctgtttgtgacattgagttgtgacttctatattcaatagatttttgtaaatgttaaaacatctatatttaaatgttaaaacactaaatatagagaggggctttatttcaatcatagagcaacaacaaaaataatgcttatagctaaactgcctgttctagaaagcatctgctttttcatgttattcctaaatcctcttgtcatacttttgtcattgaacaatgctctccctctcgtcttccatcctcattcagaatttttagaagaccacaatcgtggagatacactacccagtattgtttgatacatttttatttgataaacattcagtgcaggaaactgtgatttgctatatgtttatgtatataatcttattctgtagtcatcagaatgttaatgtaaggtacatttgatttttattttttacatgtgtagttttctttcttcacagtcaaagcatttatattattgggggtgggggcagggaattaagttggtgggctcgaaaatccattcatatgtatctgtctacaaatgtctggggataatttaaatttgaaacctaagttatatatagtttggcaatgctcttcttcaatatttacaataataggatgatctacaagaaaataagtttctttttgcaaatttttatcatactaaagttgttcttttaatttagcatatctaaaataggatttagttcagtttagctcacacaggtgtttgctgacattcattggccatttaatacagtgttgagtggttctctgtaaaagtataagtgctaacactacgaagaaatgcacacgatcattcttgctcacttctataacaaacttacataaaatggatttaaaaattcctactcacagcctaaaacttctggagttcactacctttttttcaaatcatagtaagatcacttgtgtattttatattttagtaaagccaattatgaagtacaagtatcatacacgtacttttgagctactattatttgaaaaaaatctgccaaatagcatctttaggatatatttacattttcactcatctaaaaagtatacaaaaataaaaagtggaaaaaggtatcttctgaatgttcaagagcatcctatagtgccaaataataaagcaccatttttttcttcataaccaggattaaaattcatatatactgcagggcagacatacatatgatagcttgtgctgattaatttaaccccatttgtaaacagatgaaaattttattttcttatttcatttataagatggctcaatgtattgggaggcttcttttttattacagaaagtgtatattggtatataataaatgaacttttcaaatg

SEQ ID NO: 55361 - DNA, 764 bp, Artificial Sequence
  derived and/or modified sequence
aaaagaaagaagggtctctccatccatccctttctgatactttccctgaatcccagtctggaaagggtagtaaaagaggcggagtgttctgaacatcaacacaaagtggaagaaccttaagctgaaggtacagtatattatttacactgaaggggcttgtgtgtggacaagaaagcgctgacagctcaaatggatcccatggaactgagaaatgtcaacatcgaaccagatgatgagagcagcagtggagaaagtgctccagatagctacatcgggataggaaattcagaaaaggcagcaatgagcagtcaatttgctaatgaagacactgaaagtcagaaattcctgacaaatggatttttggggaaaaagaagctggcagattatgctgatgaacaccatcccggaaccacttcctttggaatgtcttcatttaacctgagtaatgccatcatgggcagtgggatcctgggcttgtcctatgccatggccaacacagggatcatactttttataatcatgctgcttgctgtggcaatattatcactgtattcagttcaccttttattaaaaacagccaaggaaggagggtctttgatttatgaaaaattaggagaaaaggcatttggatggccgggaaaaattggagcttttgtttccattacaatgcagaacattggagcaatgtcaagctacctctttatcattaaatatgaactacctgaagtaatcagagcattcatgggacttgaagaaaatactgg

SEQ ID NO: 55362 - DNA, 933 bp, Artificial Sequence
  derived and/or modified sequence
gcagcgcctggagcatgagccgggtggtggcgtgcacggaggatcgcgggaggctgccgcctcgggacaccccactcacacagggcaaaaggatgtatacactccatcttcatttaaaacactggaggattggaaaggagaaaaggaacaggacagaaaaaaaaacagagtgttctgaacatcaacacaaagtggaagaaccttaagctgaaggtacagtatattatttacactgaaggggcttgtgtgtggacaagaaagcgctgacagctcaaatggatcccatggaactgagaaatgtcaacatcgaaccagatgatgagagcagcagtggagaaagtgctccagatagctacatcgggataggaaattcagaaaaggcagcaatgagcagtcaatttgctaatgaagacactgaaagtcagaaattcctgacaaatggatttttggggaaaaagaagctggcagattatgctgatgaacaccatcccggaaccacttcctttggaatgtcttcatttaacctgagtaatgccatcatgggcagtgggatcctgggcttgtcctatgccatggccaacacagggatcatactttttataatcatgctgcttgctgtggcaatattatcactgtattcagttcaccttttattaaaaacagccaaggaaggagggtctttgatttatgaaaaattaggagaaaaggcatttggatggccgggaaaaattggagcttttgtttccattacaatgcagaacattggagcaatgtcaagctacctctttatcattaaatatgaactacctgaagtaatcagagcattcatgggacttgaagaaaatactggagaatggtacctcaatggcaactacctcatcatatttgtgtctgttggaattattcttccactttcgctccttaaaaatttag

SEQ ID NO: 55363 - DNA, 1644 bp, Artificial Sequence
  derived and/or modified sequence
atggaccccatggagctgagaaacgtgaacatcgagcccgacgacgagagcagcagcggcgagagcgcccccgacagctacatcggcatcggcaacagcgagaaggccgccatgagcagccagttcgccaacgaggacaccgagagccagaagttcctgaccaacggcttcctgggcaagaagaagctggccgactacgccgacgagcaccaccccggcaccaccagcttcggcatgagcagcttcaacctgagcaacgccatcatgggcagcggcatcctgggcctgagctacgccatggccaacaccggcatcatcctgttcatcatcatgctgctggccgtggccatcctgagcctgtacagcgtgcacctgctgctgaagaccgccaaggagggcggcagcctgatctacgagaagctgggcgagaaggccttcggctggcccggcaagatcggcgccttcgtgagcatcaccatgcagaacatcggcgccatgagcagctacctgttcatcatcaagtacgagctgcccgaggtgatcagagccttcatgggcctggaggagaacaccggcgagtggtacctgaacggcaactacctgatcatcttcgtgagcgtgggcatcatcctgcccctgagcctgctgaagaacctgggctacctgggctacaccagcggcttcagcctgacctgcatggtgttcttcgtgagcgtggtgatctacaagaagttccagatcccctgccccctgcccgtgctggaccacagcgtgggcaacctgagcttcaacaacaccctgcccatgcacgtggtgatgctgcccaacaacagcgagagcagcgacgtgaacttcatgatggactacacccacagaaaccccgccggcctggacgagaaccaggccaagggcagcctgcacgacagcggcgtggagtacgaggcccacagcgacgacaagtgcgagcccaagtacttcgtgttcaacagcagaaccgcctacgccatccccatcctggtgttcgccttcgtgtgccaccccgaggtgctgcccatctacagcgagctgaaggacagaagcagaagaaagatgcagaccgtgagcaacatcagcatcaccggcatgctggtgatgtacctgctggccgccctgttcggctacctgaccttctacggcgaggtggaggacgagctgctgcacgcctacagcaaggtgtacaccctggacatccccctgctgatggtgagactggccgtgctggtggccgtgaccctgaccgtgcccatcgtgctgttccccatcagaaccagcgtgatcaccctgctgttccccaagagacccttcagctggatcagacacttcctgatcgccgccgtgctgatcgccctgaacaacgtgctggtgatcctggtgcccaccatcaagtacatcttcggcttcatcggcgccagcagcgccaccatgctgatcttcatcctgcccgccgtgttctacctgaagctggtgaagaaggagaccttcagaagcccccagaaggtgggcgccctgatcttcctggtggtgggcatcttcttcatgatcggcagcatggccctgatcatcatcgactggatctacgacccccccaacagcaagcaccactag

SEQ ID NO: 55364 - DNA, 780 bp, Artificial Sequence
  derived and/or modified sequence
atggaccccatggagctgagaaacgtgaacatcgagcccgacgacgagagcagcagcggcgagagcgcccccgacagctacatcggcatcggcaacagcgagaaggccgccatgagcagccagttcgccaacgaggacaccgagagccagaagttcctgaccaacggcttcctgggcaagaagaagctggccgactacgccgacgagcaccaccccggcaccaccagcttcggcatgagcagcttcaacctgagcaacgccatcatgggcagcggcatcctgggcctgagctacgccatggccaacaccggcatcatcctgttcatcatcatgctgctggccgtggccatcctgagcctgtacagcgtgcacctgctgctgaagaccgccaaggagggcggcagcctgatctacgagaagctgggcgagaaggccttcggctggcccggcaagatcggcgccttcgtgagcatcaccatgcagaacatcggcgccatgagcagctacctgttcatcatcaagtacgagctgcccgaggtgatcagagccttcatgggcctggaggagaacaccggcgagtggtacctgaacggcaactacctgatcatcttcgtgagcgtgggcatcatcctgcccctgagcctgctgaagaacctgggctacctgggctacaccagcggcttcagcctgacctgcatggtgttcttcgtgagcgtgatgatctacaagaagatcagcttcttcctgcagatcttcatcatcctgaagctgttcttctag

SEQ ID NO: 55365 - DNA, 579 bp, Artificial Sequence
  derived and/or modified sequence
atggaccccatggagctgagaaacgtgaacatcgagcccgacgacgagagcagcagcggcgagagcgcccccgacagctacatcggcatcggcaacagcgagaaggccgccatgagcagccagttcgccaacgaggacaccgagagccagaagttcctgaccaacggcttcctgggcaagaagaagctggccgactacgccgacgagcaccaccccggcaccaccagcttcggcatgagcagcttcaacctgagcaacgccatcatgggcagcggcatcctgggcctgagctacgccatggccaacaccggcatcatcctgttcatcatcatgctgctggccgtggccatcctgagcctgtacagcgtgcacctgctgctgaagaccgccaaggagggcggcagcctgatctacgagaagctgggcgagaaggccttcggctggcccggcaagatcggcgccttcgtgagcatcaccatgcagaacatcggcgccatgagcagctacctgttcatcatcaagtacgagctgcccgaggtgatcagagccttcatgggcctggaggagaacaccggctag

SEQ ID NO: 55366 - DNA, 660 bp, Artificial Sequence
  derived and/or modified sequence
atggaccccatggagctgagaaacgtgaacatcgagcccgacgacgagagcagcagcggcgagagcgcccccgacagctacatcggcatcggcaacagcgagaaggccgccatgagcagccagttcgccaacgaggacaccgagagccagaagttcctgaccaacggcttcctgggcaagaagaagctggccgactacgccgacgagcaccaccccggcaccaccagcttcggcatgagcagcttcaacctgagcaacgccatcatgggcagcggcatcctgggcctgagctacgccatggccaacaccggcatcatcctgttcatcatcatgctgctggccgtggccatcctgagcctgtacagcgtgcacctgctgctgaagaccgccaaggagggcggcagcctgatctacgagaagctgggcgagaaggccttcggctggcccggcaagatcggcgccttcgtgagcatcaccatgcagaacatcggcgccatgagcagctacctgttcatcatcaagtacgagctgcccgaggtgatcagagccttcatgggcctggaggagaacaccggcgagtggtacctgaacggcaactacctgatcatcttcgtgagcgtgggcatcatcctgcccctgagcctgctgaagaacctgtag

SEQ ID NO: 55367 - protein, 284 aa, Artificial Sequence
  derived and/or modified sequence
MAVNVYSTSITQETMSRHDIIAWVNDIVSLNYTKVEQLCSGAAYCQFMDMLFPGCISLKKVKFQAKLEHEYIHNFKLLQASFKRMNVDKVIPVEKLVKGRFQDNLDFIQWFKKFYDANYDGKEYDPVEARQGQDAIPPPDPGEQIFNLPKKSHHANSPTAGAAKSSPAAKPGSTPSRPSSAKRASSSGSASKSDKDLETQVIQLNEQVHSLKLALEGVEKERDFYFGKLREIELLCQEHGQENDDLVQRLMDILYASEEHEGHTEEPEAEEQAHEQQPPQQEEY

SEQ ID NO: 55368 - DNA, 855 bp, Artificial Sequence
  derived and/or modified sequence
atggccgtgaatgtctactcaacttcaattacccaagagaccatgtctagacacgatattatcgcatgggtaaacgatatcgtcagcctcaactacacgaaggtggaacagctgtgcagcggggccgcgtattgtcaattcatggacatgctgttccccgggtgtatctcattaaagaaggtgaaatttcaggctaaactagagcacgagtacattcataactttaagctgctgcaggcatcctttaagcgaatgaacgtcgacaaggtgattccagtcgaaaaactcgtaaaggggcgctttcaggataatctcgacttcatccagtggttcaaaaaattctatgacgccaactacgatgggaaggagtacgatcctgtcgaggctaggcagggccaggatgcaatcccccccccagacccaggcgagcagatttttaacctgccaaagaagtcgcaccacgctaactcgcccacggccggcgcagctaaatcctccccagcggcaaagcctggctcaactcctagtcgaccctcttcggccaaacgggcttcttcctcgggttctgcatcaaaatctgataaagatctggagactcaggttatccaacttaatgagcaagtgcacagtctgaaactcgcccttgagggcgtcgaaaaagaacgagatttctactttgggaaactgcgcgagatcgagctattgtgccaggagcatggacaggaaaacgacgacctggttcagagattgatggacattttatacgcttctgaggagcatgaggggcacacagaggagcccgaagcagaagaacaggcccacgagcaacaacctccgcagcaggaggaatactag

SEQ ID NO: 55369 - DNA, 855 bp, Artificial Sequence
  derived and/or modified sequence
atggctgtgaatgtgtacagcaccagcatcacccaggagaccatgagcagacatgacatcatcgcctgggtgaatgacatcgtgtccctgaactacaccaaggtggagcagctgtgcagcggggccgcctactgccagttcatggacatgctgtttcctggctgcatcagcctgaagaaggtgaagttccaggccaagctggagcacgagtacatccacaacttcaagctgctgcaggccagcttcaagaggatgaatgtggacaaggtgattcctgtggagaagctggtgaagggccgcttccaggacaacctggacttcatccagtggttcaagaagttctatgatgccaactatgatggcaaggagtatgaccctgtggaggcccggcagggccaggatgccatccccccaccagaccctggagagcagatcttcaacctgcccaagaagagccaccacgccaacagccccacagctggggccgccaagagcagccctgctgccaagccaggcagcacccccagccggcccagcagcgccaagagggccagcagcagcggcagcgccagcaagagtgacaaggacctggagacccaggtgatccagctgaatgagcaggtgcacagcctgaagctggccctggagggcgtggagaaggagcgggacttctactttgggaagctgcgggagattgagctgctgtgccaggagcacggccaggagaatgatgacctggtgcagaggctgatggacatcctgtatgccagcgaggagcacgagggccacacagaggagcctgaggccgaggagcaggcccacgagcagcagcccccccagcaggaggagtactag

SEQ ID NO: 55370 - DNA, 855 bp, Artificial Sequence
  derived and/or modified sequence
atggccgtgaacgtgtacagcaccagcatcacccaggagaccatgtcccggcatgatatcattgcctgggttaacgatattgtctctcttaattacacaaaagtagaacagctgtgctcaggagctgcgtattgtcagttcatggacatgctgtttcccggctgcatttccctgaagaaagtgaaatttcaggccaaactcgaacatgagtatatccacaactttaaactcttgcaggcgtcctttaagcgtatgaacgtggacaaggtcatcccggtagaaaagctggtcaagggcaggtttcaagacaacctcgacttcattcagtggttcaaaaaattttatgatgctaattatgacgggaaggagtacgatcccgtcgaggctaggcaggggcaagacgccatacccccacctgatcctggagaacagattttcaatctgccaaaaaagagccaccatgcaaactccccgaccgcaggggccgccaaaagttcacccgcagctaagcccgggagtaccccctccaggccctcgagcgccaaacgggcttccagttctggatccgcgtctaaatccgacaaggatctagaaacacaagtgatccagctaaacgaacaggtacacagtcttaagctggcccttgagggagtggagaaagagagggatttctattttggaaagctgagagagattgagcttctttgccaggaacatggtcaggagaacgacgacctggtacaaaggctcatggatatcctgtatgccagcgaggagcacgaaggacacaccgaggagccagaggccgaagagcaggcacacgaacagcagcctccacagcaggaggagtactag

SEQ ID NO: 55371 - DNA, 855 bp, Artificial Sequence
  derived and/or modified sequence
atggctgtaaacgtgtattcaacatccattactcaggaaaccatgtcacgccatgacattatcgcttgggtgaatgacatcgtttcgttaaattacacaaaggtggagcagctttgcagcggggctgcctactgtcagttcatggatatgctgtttcccggttgcatttcactgaaaaaagtcaaattccaagctaagctggagcacgagtatatccacaactttaagctgcttcaggcttcattcaagcggatgaacgttgataaggtgatccctgttgaaaagctcgtgaagggacgctttcaagataatttggattttatccagtggttcaagaagttttacgatgcaaactatgatggtaaagaatacgatcctgtcgaagccagacagggccaggacgcaattccccctcccgacccaggggaacagattttcaacctgccaaagaagagccaccacgcgaatagtccaacagccggtgccgctaagagttccccagcagcaaagcctggttccaccccctcccgtcctagcagtgccaaaagagcctcctcaagtggctccgcctcaaaatctgataaggatctggagacgcaggtgatccagctcaacgagcaggttcatagcttaaagctggctctggagggagtcgagaaagaacgggatttctactttgggaagttgagagaaatcgaactgctatgccaggagcacggtcaggagaacgacgatttggtgcagaggctcatggatatactgtacgcatcggaggagcacgaggggcatacagaagaacccgaagcagaggagcaggcccatgaacagcaaccgccacagcaggaagaatactag

SEQ ID NO: 55372 - DNA, 855 bp, Artificial Sequence
  derived and/or modified sequence
atggccgtgaacgtgtacagcaccagcatcacccaggagaccatgagcagacacgacatcatcgcctgggtgaacgacatcgtgagcctgaactacaccaaggtggagcagctgtgcagcggcgccgcctactgccagttcatggacatgctgttccccggctgcatcagcctgaagaaggtgaagttccaggccaagctggagcacgagtacatccacaacttcaagctgctgcaggccagcttcaagagaatgaacgtggacaaggtgatccccgtggagaagctggtgaagggcagattccaggacaacctggacttcatccagtggttcaagaagttctacgacgccaactacgacggcaaggagtacgaccccgtggaggccagacagggccaggacgccatccccccccccgaccccggcgagcagatcttcaacctgcccaagaagagccaccacgccaacagccccaccgccggcgccgccaagagcagccccgccgccaagcccggcagcacccccagcagacccagcagcgccaagagagccagcagcagcggcagcgccagcaagagcgacaaggacctggagacccaggtgatccagctgaacgagcaggtgcacagcctgaagctggccctggagggcgtggagaaggagagagacttctacttcggcaagctgagagagatcgagctgctgtgccaggagcacggccaggagaacgacgacctggtgcagagactgatggacatcctgtacgccagcgaggagcacgagggccacaccgaggagcccgaggccgaggagcaggcccacgagcagcagcccccccagcaggaggagtactag

SEQ ID NO: 55373 - protein, 315 aa, Artificial Sequence
  derived and/or modified sequence
MKQNRDQKCPVSQRNSSFQQPGRKPGCSSWGMAVNVYSTSITQETMSRHDIIAWVNDIVSLNYTKVEQLCSGAAYCQFMDMLFPGCISLKKVKFQAKLEHEYIHNFKLLQASFKRMNVDKVIPVEKLVKGRFQDNLDFIQWFKKFYDANYDGKEYDPVEARQGQDAIPPPDPGEQIFNLPKKSHHANSPTAGAAKSSPAAKPGSTPSRPSSAKRASSSGSASKSDKDLETQVIQLNEQVHSLKLALEGVEKERDFYFGKLREIELLCQEHGQENDDLVQRLMDILYASEEHEGHTEEPEAEEQAHEQQPPQQEEY

SEQ ID NO: 55374 - DNA, 948 bp, Artificial Sequence
  derived and/or modified sequence
atgaagcagaatcgggatcagaagtgccctgtgtctcaacggaactcttctttccaacagcccggcaggaagccaggttgttccagctggggcatggcggtaaacgtgtactctacttccatcacccaggaaacaatgtcgagacacgatatcatcgcgtgggtgaatgatatagtgtctctgaattacaccaaagtggaacaattatgcagcggagctgcctactgtcagttcatggacatgctctttcccggttgtatctcactgaagaaggtgaaattccaggcaaaactagaacatgagtacatccacaacttcaagctacttcaggccagcttcaagcgcatgaatgtagacaaagtgattccagtggagaaactcgtcaaaggccgattccaggataacttggatttcatacaatggtttaagaagttctatgatgcgaactacgatggaaaggagtacgacccggttgaggctcgccagggtcaggatgctatccctccccccgatcctggcgaacaaatattcaacttgccaaaaaagtcccaccacgcaaatagccccacagctggcgccgcaaagtcttctcctgctgccaaaccaggtagcacaccgagccgcccctctagtgccaagcgtgcctcgagctccggcagcgctagcaaatccgacaaggatctggagacccaggtgatccagctgaatgagcaggttcactccttgaagctggcgctggagggagtcgagaaagagcgggatttttacttcggtaagcttcgcgagatcgaactcctctgtcaggagcacggacaggaaaatgatgacttggttcagaggcttatggacattttgtacgcctccgaggagcacgaaggccatacggaagagcctgaggccgaggagcaggctcatgagcagcagcctccacagcaggaagaatattag

SEQ ID NO: 55375 - DNA, 948 bp, Artificial Sequence
  derived and/or modified sequence
atgaagcagaacagagaccagaagtgccctgtgtcccagaggaacagcagcttccagcagcccggcaggaagccaggctgcagctcctggggcatggctgtgaatgtgtacagcaccagcatcacccaggagaccatgagcagacatgacatcatcgcctgggtgaatgacatcgtgtccctgaactacaccaaggtggagcagctgtgcagcggggccgcctactgccagttcatggacatgctgtttcctggctgcatcagcctgaagaaggtgaagttccaggccaagctggagcacgagtacatccacaacttcaagctgctgcaggccagcttcaagaggatgaatgtggacaaggtgattcctgtggagaagctggtgaagggccgcttccaggacaacctggacttcatccagtggttcaagaagttctatgatgccaactatgatggcaaggagtatgaccctgtggaggcccggcagggccaggatgccatccccccaccagaccccggggagcagatcttcaacctgcccaagaagagccaccacgccaacagccccacagctggagctgccaagagcagccctgctgccaagccaggcagcacccccagccggcccagcagcgccaagagggccagcagcagcggcagcgccagcaagagtgacaaggacctggagacccaggtgatccagctgaatgagcaggtgcacagcctgaagctggccctggagggcgtggagaaggagcgggacttctactttgggaagctgcgggagattgagctgctgtgccaggagcacggccaggagaatgatgacctggtgcagaggctgatggacatcctgtatgccagcgaggagcacgagggccacacagaggagcctgaggccgaggagcaggcccacgagcagcagcccccccagcaggaggagtactag

SEQ ID NO: 55376 - DNA, 3267 bp, Artificial Sequence
  derived and/or modified sequence
gtagacccgctaggcaggaagaggtcactaaaaatactatcgtgctgtcaatgtagaatgaagggttaagcgctcaaacccgcgcccgcgcgcaccgaaacggaagaacttccttgattagcatagtatcgaccctggggccgcgctgcgaggcggaggttcggtcccagctggggtgaagtgtgcagaccggttgcgattgtggtcagacgcagcacctacttctaatctgaggacccgcgatttacacttttgctgaataggacactgtggaatgaaacagaacagagatcaaaagtgtcctgtttcccagaggaacagttcatttcaacagccagggagaaagcctggatgctcaagttggggaatggcggtcaatgtgtattctacctcgataacccaagagactatgagcagacatgacatcattgcatgggttaatgacatagtatctttaaactacacaaaagtggaacagctttgttcaggagcggcctattgccaattcatggacatgctcttccctggctgcattagtttgaagaaagtaaaatttcaagcaaagctggaacatgaatatattcacaattttaaacttctgcaagcatcatttaagcgaatgaacgttgataaggtaattccagtggagaagctagtgaaaggacgtttccaggacaacctggattttattcaatggtttaagaaattctatgatgctaactacgatgggaaggagtatgatcctgtagaggcacgacaagggcaagatgcaattcctcctcctgaccctggtgaacagatcttcaacctgccaaaaaagtctcaccatgcaaactcccccacagcaggtgcagctaaatcaagtccagcagctaaaccaggatccacaccttctcgaccctcatcagccaaaagggcttcttccagtggctcagcatccaaatccgataaagatttagaaacgcaggtcatacagcttaatgaacaggtacattcattaaaacttgcccttgaaggcgtggaaaaggaaagggatttctactttgggaagttgagagagatcgagctactctgccaagaacacgggcaggaaaatgatgacctcgtgcagagactaatggacatcctgtatgcttcagaagaacacgagggccacacagaagagccggaagcagaggagcaagcccacgaacagcagcccccgcagcaggaagagtactgacccaccccggctgctcttgacacttccattgtgtgtgggaacgtttcttctggagaattggaacatgtgtggccccaagctcaacagaaaccagttgttcccaatctgccgttaccatcaacgcactgttgcatatgccagccactgcgcttggttcccattttctttgccaaggtgtattagcggacggccctctggccacctacccgagagatcgtagggtcacatacatccaacttcaccacttggctgcttgagattggttctgctcttttcttcatttctttccagaacaactctttcccaccccaacaccactgccaccacccctctttttatcctggtgtgaaacaatggtaatttgatatatggtatttatattggcatttttcaacccagtgtcactagatgtcacacacatttgtggtgctttgatgtttgcaagtctaacctctgaacataaatttggtcaaataattggaacaaagggaaacagatacttgatatgaaagccataatgacggtgacttgtgtcgtgggggaaaacataaggtcattttctccctctactcacaatactaaagggaaaaaatggattcaaagctaggatttcagggcccagcagtgttcctccatcagcatgttagacaactacacagtatgttgttagttttgaaagacattcactcaaggaaaacaccatctcaactttgcccgctcaccatgtcccttgcccccatgtagcccatttcccaggttatgctcttttctttctcagggtcctctttggtgggcagccactccccgagatgttgccatcagttttctgcagtccaaagagggtatggttaggtacgggtcttcctgcctcattcctcttcctctttgtgtaggtttcagccacaaaactgtcattcactctaggggacccctactaaagggtaacttcaggtgtgcagccctgagctccaaggctctgcaccatgccacacacttgctgtaaggctagaagtgaagaccttattaataggagcataattgcgagggagaatcatggttctgcagtctggtgtagacactggaataacagcacagaaaaatctatgactcccaatatcttctagaataaagaattttccctctttaacacaagggccctccttgtcattgaccttagctaaaccatggcaattcataaatagaggaaacattaatgaattaaaagcattccttattttttaactaatatttgtacattttcttagtctctttccaagtctttgcctcttttttttctttatttttattttttcctttgacagatggtatcccttcctggatcattcatttcaccttggtttctaactttaggtttactttcacttgttatttgacttagcaggtgcaacaaaaacaagaaacaaatgtgcccaccccactttccgcttaactgaaaagcttaaaataaatttctgaattatgtatcctgaagctttgaaatttctttattaatcgatgaaatatgaattctaaattctagcattgaagcttttcaccaaaagaagtctctccaaaataaatcttttgcagcaaagtgatatttattgagttatgtggaaaagatggcttgtatttttcagattattacaacacactgtgcagaattagacagatgttccgtggtgtttggtttccctttcttctctctcctgctcactctgcattatagcagcagcttatttctctaaggctggacagcctggctctcggcagtgacgtcctcccacacctggtcacaagtagtagtggctgtgctatacccagcatcatgcttaacagcgtgttgcccttctgagcctgttgtactcactgatctctttaaaaacaaaaaatagctcttgtaaaaggtcacaataactctatgcacctgatactgcagtggttcctaggccattcttcatctgctctggacatctcagtcatacccaatgctcagtggatcatgaccaaactcctgtcatgtggatgcacgtgagtgggtagca

SEQ ID NO: 55377 - DNA, 948 bp, Artificial Sequence
  derived and/or modified sequence
atgaagcagaaccgggaccagaagtgccccgtgagccagcggaactcatcattccaacagccaggccgtaaacccggctgctcttcctggggtatggccgttaacgtatactcaacctcaatcacccaggaaacgatgtcacggcacgacattatcgcgtgggtgaatgatatcgtgagtttaaactatacaaaagtggaacagctgtgtagcggagcagcctattgtcagtttatggacatgctgttccccggttgtatttcactgaagaaggtaaaatttcaggccaaattggaacacgagtacatccacaattttaagttactgcaggccagctttaaaaggatgaacgtggataaggtgatcccagtggaaaaactggtgaaggggagatttcaggataatctggacttcatccaatggttcaagaagttttacgacgctaattacgatggcaaggaatatgatccagtggaggccagacagggccaagatgctattccgccaccagatcccggagaacagatcttcaaccttcccaaaaagtcccatcatgccaattcccctacggccggcgctgctaagtcctcccctgccgccaaacctggatctacgccgtcccgaccctcaagcgccaagagagcctcgtcatcggggagtgcgagcaaaagtgataaggatctagaaacgcaggtgatccagttgaatgagcaggtccatagtctgaagttggctctagaaggcgtagagaaggagcgtgacttctatttcgggaagctgcgtgagatcgaactgctctgtcaggaacacggacaggaaaacgacgatctggtccagcgtctcatggatattctgtatgcatcagaagaacacgaaggccataccgaagaacctgaggctgaggaacaggcccatgagcagcaaccaccacagcaggaggagtactag

SEQ ID NO: 55378 - DNA, 948 bp, Artificial Sequence
  derived and/or modified sequence
atgaaacagaaccgggatcagaaatgcccagtgtctcaacgaaattcctctttccaacagccagggaggaagcccggttgtagcagctggggaatggctgtcaacgtctactctacatcaataacccaagaaaccatgagtcgccatgatattattgcatgggtgaacgatatcgtgtccctgaactacactaaggtcgaacagctgtgctctggcgctgcgtactgccaattcatggatatgctattccccggatgcatttccttaaaaaaagtcaaatttcaggcaaagcttgagcacgaatatatccacaattttaagctgttgcaggcatcttttaagcggatgaatgtcgataaggtcatcccggtggaaaagctcgtgaaagggcgtttccaggacaatctggatttcattcagtggtttaaaaaattttatgacgcaaattacgacggcaaggagtacgatcctgtggaggctagacaggggcaggatgctatacctcccccagacccaggtgaacaaatcttcaacctccctaaaaaatctcatcacgcgaatagtccaactgctggggcagctaagtcgtctcctgccgcaaaacctggtagcacaccgtcccgacccagctccgccaagagagcttccagctccggctcagccagcaaatctgacaaggacttagagacccaggttatccagctgaacgaacaggtgcattcattgaaactggccctagagggcgtagagaaagagcgggatttttatttcggtaagcttcgggagattgagctcctgtgtcaggagcacggccaggagaacgacgacttggttcagagattgatggacatcctgtatgccagcgaagagcacgaaggacatacagaggagcccgaagctgaagagcaggcccatgagcaacagcccccacagcaggaggagtactag

SEQ ID NO: 55379 - DNA, 948 bp, Artificial Sequence
  derived and/or modified sequence
atgaagcagaacagagaccagaagtgccccgtgagccagagaaacagcagcttccagcagcccggcagaaagcccggctgcagcagctggggcatggccgtgaacgtgtacagcaccagcatcacccaggagaccatgagcagacacgacatcatcgcctgggtgaacgacatcgtgagcctgaactacaccaaggtggagcagctgtgcagcggcgccgcctactgccagttcatggacatgctgttccccggctgcatcagcctgaagaaggtgaagttccaggccaagctggagcacgagtacatccacaacttcaagctgctgcaggccagcttcaagagaatgaacgtggacaaggtgatccccgtggagaagctggtgaagggcagattccaggacaacctggacttcatccagtggttcaagaagttctacgacgccaactacgacggcaaggagtacgaccccgtggaggccagacagggccaggacgccatccccccccccgaccccggcgagcagatcttcaacctgcccaagaagagccaccacgccaacagccccaccgccggcgccgccaagagcagccccgccgccaagcccggcagcacccccagcagacccagcagcgccaagagagccagcagcagcggcagcgccagcaagagcgacaaggacctggagacccaggtgatccagctgaacgagcaggtgcacagcctgaagctggccctggagggcgtggagaaggagagagacttctacttcggcaagctgagagagatcgagctgctgtgccaggagcacggccaggagaacgacgacctggtgcagagactgatggacatcctgtacgccagcgaggagcacgagggccacaccgaggagcccgaggccgaggagcaggcccacgagcagcagcccccccagcaggaggagtactag

SEQ ID NO: 55380 - protein, 302 aa, Artificial Sequence
  derived and/or modified sequence
MPDTNSTINLSLSTRVTLAFFMSLVAFAIMLGNALVILAFVVDKNLRHRSSYFFLNLAISDFFVVSESWKDEGSECEPGFFSEWYILAITSFLEFVIPVILVAYFNMNIYWSLWKRDHLSRCQSHPGLTAVSSNICGHSFRGRLSSRRSLSASTEVPASFHSERQRRKSSLMFSSRTKMNSNTIASKMGSFSQSDSVALHQREHVELLRARRLAKSLAILLGVFAVCWAPYSLFTIVLSFYSSATGPKSVWYRIAFWLQWFNSFVNPLLYPLCHKRFQKAFLKIFCIKKQPLPSQHSRSVSS

SEQ ID NO: 55381 - DNA, 909 bp, Artificial Sequence
  derived and/or modified sequence
atgcccgacacaaattctaccatcaatctgagcctgagtacaagagtcactctcgcattttttatgtccttggtggccttcgctatcatgctcggtaacgcactggttattctggcattcgttgtggacaagaatctgcgacatagatcaagttacttcttcctgaacctggccataagcgatttctttgtcgtaagcgagtcttggaaggacgagggatcagagtgtgaacccggatttttttccgagtggtacattctcgctattactagttttctggagtttgttattccagtgatcctcgtggcctattttaacatgaatatttactggtctctttggaagcgggatcacttatctaggtgtcagtcccatcccgggcttacagcagtttcctcaaacatctgcggacacagcttcaggggcagactgtcctctcgccgatctctaagtgctagtaccgaggtgccagccagcttccattccgaaagacagaggagaaagtcaagtctgatgttcagctctagaacgaagatgaatagtaatacgatagcttcaaaaatggggagttttagtcaatcagacagcgtagccctgcaccaacgtgagcacgtcgagctgctgcgagctcggcgactggcaaaatctctcgcaatcctgctgggcgtgtttgcagtctgctgggccccctattcactttttaccatagtgctttcgttctactctagcgcgaccggaccgaagtcggtgtggtatcgtatcgcgttctggctccaatggttcaatagctttgtgaaccctctgctgtaccctctctgccacaagagattccagaaggctttcctaaagatattctgcattaaaaagcagcctctcccaagtcagcactcccgttctgtaagttcctag

SEQ ID NO: 55382 - DNA, 3403 bp, Artificial Sequence
  derived and/or modified sequence
ggaagactacacattttaggtatgtgattagaaaacatacttgtcagaattgtctggctggattaatttgctaatttgaccttcttcatcatttgatgtgatgccagatactaatagcacaatcaatttatcactaagcactcgtgttactttagcattttttatgtccttagtagcttttgctataatgctaggaaatgctttggtcattttagcttttgtggtggacaaaaaccttagacatcgaagtagttatttttttcttaacttggccatctctgacttctttgtggtttcagagtcttggaaggatgaaggtagtgaatgtgaacctggatttttttcggaatggtacatccttgccatcacatcattcttggaattcgtgatcccagtcatcttagtcgcttatttcaacatgaatatttattggagcctgtggaagcgtgatcatctcagtaggtgccaaagccatcctggactgactgctgtctcttccaacatctgtggacactcattcagaggtagactatcttcaaggagatctctttctgcatcgacagaagttcctgcatcctttcattcagagagacagaggagaaagagtagtctcatgttttcctcaagaaccaagatgaatagcaatacaattgcttccaaaatgggttccttctcccaatcagattctgtagctcttcaccaaagggaacatgttgaactgcttagagccaggagattagccaagtcactggccattctcttaggggtttttgctgtttgctgggctccatattctctgttcacaattgtcctttcattttattcctcagcaacaggtcctaaatcagtttggtatagaattgcattttggcttcagtggttcaattcctttgtcaatcctcttttgtatccattgtgtcacaagcgctttcaaaaggctttcttgaaaatattttgtataaaaaagcaacctctaccatcacaacacagtcggtcagtatcttcttaaagacaattttctcacctctgtaaattttagtctcaatctcacctaaatgaatcaggtctgccctttatcttgcccttttcattctaccaacagatctgcactttgaagtcaatggtaaattactccagtgaataatagcagtataatatgacttgataatatttttgtaaacttgtagtcataatagtactatattcttcttagtcctcacctcttccttgtcttttagatcttaatttcatgctgattacaaaaatccagttttgttttctttctatgttccatgcataatacagtcttaagtgaatttctcttttttaattttatcgtaatagaaacttatccagtttgaaaatcattccctaaagcatgcaataggaaaaagaacctcctggctgggactgcccaactctgttctgatcagtgggtgggtgaggtagggtttgagttggcaagagcagggaacgggcatgtgcccaggtgagctcctgtgtgtgtccagattttatattcctaatcccagtaaggaagaaagcgtagtgtgggagaggagagagctgatgactgcagttctcaaaggtcctcagtgaagttattttggaggccctggtggtcacaggatcagaaggcaagggataggcagtggtcaccaatggttgaaagtatggcttgtcccatttcttcctgttctctttttctagcttccacatcagcttccttttttgagaacatatagaagaagaaggctaagagatggtgaagagactgcatgattaaactagatagacctggtatacagtcactgaactagtagatgtcaataattattatttttaaaaatttttatttgttggccgggcatggtggctcacgcctgaaatcccagcactttgggaggccaaggtgggcggatcatgaggtcaggagatcgagaccatcctggccaacatggtgaaaccccatctgtactaaaatacaaacaagtagctggttgtggcgccgcatgcctgtagtcccagctactcgggaggctgaggcaggggaattgcttgaacccgggaggcggagtttgccagcctggcaacagaacaagactctgtctaaaaagaaaaaaaaatttttttgtttaagacagcatcttgctctgtctcccaggctggagcgtagtaatgcaatcatagctcactgcagcctggaactccttggctcaagcaatcctgctgccttggcctcccaagtatgtaggactacaggtactcgccaccacacctggataattaaaaaattatttctgtagagatgaagtctcactgtgttgcccagcctgggtgtcaataattattttttaaaaaaaatttttaaaaaggttttttgagacagattcttgctctgtcacccaggctggagtgcagtagcatgatcagggatcactgcaacctctgcctcctgggttcaagcgattcttgtgcctaagccacctgagcagctgggattacaggtgcatgccaccatgcctggctaattttggtatttttagtagagatgaggttttgccattttggtcaggctggaatttttttttttttaattttgataagacagggtattgccgtgttggccagactggtctcaaactcctgggctgaaacaatcctcccgccttggcctcccaaagtgctgggattataggcacaagacaccacaataattattgcctgtatgtcaattattattttaaaatattgttgtatttacttaatgtctttaatgcatttgcccaatattttacattgtactgctcagaggtattcctttattatgtggttagcataggttatactttgctgacgattcacattttattagtttggttatgttttgtccttttaaaacattttcttttgagatgggggtcttgctctgttgcccacgcaggagtgcagtggcatgctctcagctcactgcagccctgactgcctaggctccagcaatcttcttacgtcagcctccagagtagctgggaccgcaggcacttgccaccacgccccactaaaaattttttaaattgttgcctttcttgaagtgttctctgcctgtctttgtcacaaaatttcatttttctcatagttaatttcatctctccggtaagattttattggtgtttcttttataactttgcagttcttacaccgtttggtgattttcatgtttcttagaaactttaaacctttaacttcaaacattaaaatacaagtcttttaagtacatgagtgcttagaaatgtacataatgtttatatacacttatgccttacattaaagtccaatatgagaaatacatgtttaacattcaataataattttaaaaatttgagaaataaactctcataaatgc

SEQ ID NO: 55383 - DNA, 909 bp, Artificial Sequence
  derived and/or modified sequence
atgccagacaccaacagcaccatcaacctgagcctgagcaccagggtgaccctggccttcttcatgagcctggtggcctttgccatcatgctgggcaatgccctggtgatcctggcctttgtggtggacaagaacctgcggcacaggagcagctacttcttcctgaacctggccatcagtgacttctttgtggtgtctgagagctggaaggatgagggctctgaatgtgagcccggcttcttcagcgagtggtacatcctggccatcaccagcttcctggagtttgtgattcctgtgatcctggtggcctacttcaacatgaacatctactggagcctgtggaagagggaccacctgagccgctgccagagccaccctggcctgacagctgtgagcagcaacatctgtggccacagcttccggggccgcctgagcagcagaagaagcctgagcgccagcacagaggtgcctgccagcttccacagcgagcggcagaggaggaagagcagcctgatgttcagcagcaggaccaagatgaacagcaacaccatcgccagcaagatgggcagcttcagccagagcgacagcgtggccctgcaccagcgggagcacgtggagctgctgcgggcccggcggctggccaagagcctggccatcctgctgggcgtgtttgctgtgtgctgggccccctacagcctcttcaccatcgtgctgtccttctacagcagcgccaccggccccaagtctgtgtggtaccgcatcgccttctggctgcagtggttcaacagctttgtgaaccccctgctgtaccccctgtgccacaagcgcttccagaaggccttcctgaagatcttctgcatcaagaagcagcccctgcccagccagcacagccgctctgtgagcagctag

SEQ ID NO: 55384 - DNA, 909 bp, Artificial Sequence
  derived and/or modified sequence
atgcccgacaccaacagcaccatcaacctgagcctgagcacccgggtcactctcgcctttttcatgagcctggtcgcatttgctattatgctggggaacgccctcgtgatcctggcctttgtagtggacaaaaatctcagacatagatcctcgtatttttttctgaacttggctatctcagactttttcgtcgtgtctgagtcttggaaagacgaggggtctgaatgcgagcccggcttttttagcgaatggtacattctggccatcacatctttcctggagtttgtgatccccgtgatcctcgtggcttactttaatatgaatatctattggagtttatggaaacgggatcacttgtcaaggtgccagtcgcaccccgggctgacggcggtgagctctaacatttgcggacattcttttcggggcaggctctctagccggcggtccctgagcgcttctactgaggtgcctgctagtttccacagcgaaagacagaggagaaagtcgtccctgatgttctcatcaaggacaaagatgaacagtaataccatcgcatccaagatggggtccttcagccaatctgactccgtggccctgcaccagagggaacatgtggagctgttgcgcgcacggcggctggcgaaaagtttggcgattttactcggcgtatttgccgtatgctgggcaccctacagcctgttcaccatcgttctgtcattctactccagcgccaccgggccaaaatccgtgtggtaccgaatagcattttggctgcagtggtttaatagttttgttaatcctttactgtatcccctgtgtcataagcggtttcagaaagcctttctgaagatcttttgtatcaagaagcagcctcttccatctcagcacagccgttccgtgtcaagctag

SEQ ID NO: 55385 - DNA, 909 bp, Artificial Sequence
  derived and/or modified sequence
atgcccgatacaaacagcactataaacctgtctctcagtacaagggtgacactggccttttttatgagtctagttgcctttgcgatcatgctgggaaatgcactggtgatcctcgcatttgtggttgacaaaaacctgcgccataggagtagctactttttcctaaacctcgccatctctgacttcttcgtggtctcagaaagctggaaggacgaggggtcagagtgtgagccaggtttcttcagtgaatggtacatattggctatcacctcattcctggagttcgttattcctgttattcttgtggcgtacttcaacatgaatatttactggagcctctggaagcgcgaccacctgagccggtgtcagtctcatccaggcctgacagctgtgtcttctaatatctgtggtcacagctttcgcggaaggctgagctctcggaggagtctgagcgccagcaccgaagtacctgcttcatttcactccgagcggcagaggaggaagtcttcacttatgttctctagccggaccaagatgaacagcaataccatcgctagcaagatgggttcattctcacagagtgacagcgttgctcttcaccagcgtgagcacgtggagctgctccgtgccaggcgcttggctaagtccctggcgattttgctcggcgtctttgccgtctgctgggctccctacagcctgtttactattgtgctgagtttttattcttccgccaccggacctaagagtgtctggtaccgaatcgctttctggcttcaatggttcaactcctttgtcaaccctctgctgtacccgttgtgccacaaacggttccagaaggcctttttaaagatcttttgcataaagaagcaaccgctgcctagccagcactccagatcagtaagtagctag

SEQ ID NO: 55386 - DNA, 909 bp, Artificial Sequence
  derived and/or modified sequence
atgcccgacaccaacagcaccatcaacctgagcctgagcaccagagtgaccctggccttcttcatgagcctggtggccttcgccatcatgctgggcaacgccctggtgatcctggccttcgtggtggacaagaacctgagacacagaagcagctacttcttcctgaacctggccatcagcgacttcttcgtggtgagcgagagctggaaggacgagggcagcgagtgcgagcccggcttcttcagcgagtggtacatcctggccatcaccagcttcctggagttcgtgatccccgtgatcctggtggcctacttcaacatgaacatctactggagcctgtggaagagagaccacctgagcagatgccagagccaccccggcctgaccgccgtgagcagcaacatctgcggccacagcttcagaggcagactgagcagcagaagaagcctgagcgccagcaccgaggtgcccgccagcttccacagcgagagacagagaagaaagagcagcctgatgttcagcagcagaaccaagatgaacagcaacaccatcgccagcaagatgggcagcttcagccagagcgacagcgtggccctgcaccagagagagcacgtggagctgctgagagccagaagactggccaagagcctggccatcctgctgggcgtgttcgccgtgtgctgggccccctacagcctgttcaccatcgtgctgagcttctacagcagcgccaccggccccaagagcgtgtggtacagaatcgccttctggctgcagtggttcaacagcttcgtgaaccccctgctgtaccccctgtgccacaagagattccagaaggccttcctgaagatcttctgcatcaagaagcagcccctgcccagccagcacagcagaagcgtgagcagctag

SEQ ID NO: 55387 - protein, 335 aa, Artificial Sequence
  derived and/or modified sequence
MTTVTVTTEIPPRDKMEDNSALYESTSAHIIEETEYVKKIRTTLQKIRTQMFKDEIRHDSTNHKLDAKHCGNLQQGSDSEMDPSCCSLDLLMKKIKGKDLQLLEMNKENEVLKIKLQASREAGAAALRNVAQRLFENYQTQSEEVRKKQEDSKQLLQVNKLEKEQKLKQHVENLNQVAEKLEEKHSQITELENLVQRMEKEKRTLLERKLSLENKLLQLKSSATYGKSCQDLQREISILQEQISHLQFVIHSQHQNLRSVIQEMEGLKNNLKEQDKRIENLREKVNILEAQNKELKTQVALSSETPRTKVSKAVSTSELKTEGVSPYLMLIRLRK

SEQ ID NO: 55388 - DNA, 1008 bp, Artificial Sequence
  derived and/or modified sequence
atgaccaccgtgaccgtgaccaccgagatcccccccagagacaagatggaggacaacagcgccctgtacgagagcaccagcgcccacatcatcgaggagaccgagtacgtgaagaagatcagaaccaccctgcagaagatcagaacccagatgttcaaggacgagatcagacacgacagcaccaaccacaagctggacgccaagcactgcggcaacctgcagcagggcagcgacagcgagatggaccccagctgctgcagcctggacctgctgatgaagaagatcaagggcaaggacctgcagctgctggagatgaacaaggagaacgaggtgctgaagatcaagctgcaggccagcagagaggccggcgccgccgccctgagaaacgtggcccagagactgttcgagaactaccagacccagagcgaggaggtgagaaagaagcaggaggacagcaagcagctgctgcaggtgaacaagctggagaaggagcagaagctgaagcagcacgtggagaacctgaaccaggtggccgagaagctggaggagaagcacagccagatcaccgagctggagaacctggtgcagagaatggagaaggagaagagaaccctgctggagagaaagctgagcctggagaacaagctgctgcagctgaagagcagcgccacctacggcaagagctgccaggacctgcagagagagatcagcatcctgcaggagcagatcagccacctgcagttcgtgatccacagccagcaccagaacctgagaagcgtgatccaggagatggagggcctgaagaacaacctgaaggagcaggacaagagaatcgagaacctgagagagaaggtgaacatcctggaggcccagaacaaggagctgaagacccaggtggccctgagcagcgagacccccagaaccaaggtgagcaaggccgtgagcaccagcgagctgaagaccgagggcgtgagcccctacctgatgctgatcagactgagaaagtag

SEQ ID NO: 55389 - DNA, 4132 bp, Artificial Sequence
  derived and/or modified sequence
ggggcctcaccggcgccggactctgccctgggcgcgccccgcggggcggagccaagcctgcgggcggtggcggctgcactcgcagggccctggcagccgaccctggccccaaggtccgatcgcccaggggaggagcagcaccgggaccccgcgtcggctgggcgccccacaagggaagccagtcttaatatgatggaaacatctctgaacttctaaaagaccaaggttggcgttttagctctattaattttacttcgtcttggccagaattcacaatgacaacagtgacagtgaccacagaaattcccccaagggataagatggaagataattctgccttgtatgagtctacgtccgctcacattattgaagaaaccgagtatgtgaaaaagattcgaactactctgcaaaagatcaggacccagatgtttaaagatgaaataagacatgacagtacaaatcacaaactagatgcaaagcactgtggaaaccttcaacagggctctgattctgaaatggatccttcttgttgcagtttggatttgcttatgaaaaagataaaaggaaaagacctacagctcttagaaatgaacaaagagaatgaagtattgaaaatcaagctgcaagcctccagagaagcaggagcagcagctctgagaaacgtggcccagagattatttgaaaactaccaaacgcaatctgaagaagtgagaaagaagcaggaggacagtaaacaattactccaggttaacaagcttgaaaaagaacagaaattgaaacaacatgttgaaaatctgaatcaagttgctgaaaaacttgaagaaaaacacagtcaaattacagaattggagaaccttgtacagagaatggaaaaggaaaagagaacactactagaaagaaaactgtctttggaaaacaagctactgcaactcaaatccagtgctacatatggaaaaagttgccaggatcttcagagggagatttccattctccaggagcagatctctcatctgcagtttgtgattcactcccaacatcagaacctgcgcagtgtcatccaggagatggaaggattaaaaaataatttaaaagaacaagacaaaagaattgaaaatctcagagaaaaggttaacatacttgaagcccagaataaagaactaaaaacccaggtagcactttcatctgaaactcctaggacaaaggtatctaaggctgtctctacaagtgaattgaagaccgaaggtgtttccccttatttaatgttgattaggttacggaaatgaactggctggatgaagatctgatttagaaagactgcgtgagtcttatttattctctgaaacacagcccaagtttcatgttaaaatggcaaaatgccattatttaaatggaacttattacataccaatggctttgcaagaagatgacatttcagaaaatcaaacaaatctatatttaatggatggactcttcaaaacttaccaaatagttgaagaaaccaggtgccttctcatgatggaagacagattctgctttaaattaaaaaaaaaaaaaaatctgaatcttgttttcagatttttttttctactgggattgttttaagattgtcaattctgacttttttatagtggtttttaagagtataaatagaagggagagtgtatatgtgtatgaatgaacatacatttcctgcatatatatgtatgaagggcatgtatatgtatgaatgagcaaacatatttgaaagttaacttttggatgataggaaagatcgtacagtgacataagttcatctcctgatccattgtttgtgggagaattatacttgactgaattatgggcaggagaaagagcagattccttttagctaattccccaacccatatgcccctctgaagttgagaatcatggctgcctcaccacacatcagagaatgactgttcttcttagttctgggattaaaaattggtttctagaggtaacctgtacacacaaacgcacagggatgcacatggtttcctctgcctttgtgactaattttcttcttgatagttattaatagtatctaaataaaatattggggggatagaaaaataatgctgttagctcatacttccatgaaaatgtatatattataggctcaaaggaataatgactgctgtctgcagccagaaagaatctgaatttatgaattggaaagatatatatagtgtatttgtgaaagtttgcttaaattctgatacatgccttctttgtaggtggagtttgtgattgcagtgaatagaacaaattctgacttgcagaaatgcagacatacagtcaggaaagaacaaacttcaattaaatgtataatgagagaccttggtccccctaaaggatgaatttcctttaggcctttgatcttcctctctagtgtataactttaaatatttgctcagaaaagatgctgactctttcattatggaatgtgaaatatcagtgttgtctataaatatttgaaggtatataaaaatgagatgatgtaatgtatttataaatttatccaagtactgtaatccttgaattgttgtgtaactgtgtgtgagttttacgcttcatggtatttttggaaacatttttattgcttgcttattttgaaggtatatttatctgttaacatttagggcatagttaccttataccagcaacaagtctaagcactttacttgtattaatttattttatcttccccaaggccctcagaagcagattattcctgttttacagagaaagatactgagagtggttgagtaatttgcccagctgctaactgtgaagcaaaaatttgaaccttttgacttggctattgatattcattctacttgctcacatggtggtctaagaaatttcccagctatagaaatctctctatttttgccactttaatcaacacatagcttcctggatgactgcctgtgttattttgtggatgacagtaagaaacaacaaatactgataaaatcaatattttgctgaaatgagttgatctttcaccagctggactaccattgtgagaactcagttcagacaaacttccctgctaaaaatctgtttatcatacatttattatttatgactttatgtcacattgaagaatttcttcatgatacattttcaggcacacttgtaggaaaattaggatcatgagtcctgctttaagtatttgcagtgtagtaagagaatccatcttttactaggagaccagattccttttatacctcattcatcatgctggattgtaataaatttcagattttggaatgggcttatttaactgacctgacaatcttgatgatttccattagaataacttattctaaggtcaaaagtggaaagacactgttggtttttattttgatttcactatactcatttttgaacatggaaatacagtggtgaaaccacctatgcaaaaatgataacagtgaggaaattatgacagtgaaagagatctgacctaactatctatcttgcctcgaaactgcccttggtcgttcctgagtgtgggccaagctaactttgggagaaatttactttataggttaaattataatagcccttcccaaaactaaacgattctcctgcctcagcctcccgagtagctgtctttataataccatcagccttatcatttattcgtcatgtatggattgtttcctatatccactatcataaaattatcatttgaaatatttttttatgaaaaaaaaaacacttctcagtgaaaaaacaagattacaagggggaataatatttattcagctaaaatagtacttcacaggaaatataggaaaagaaacactagttcagttttattccaaataatgtacttctaattatactcttgaatttattggataagaaggtctgaggtgggtctgaaattcatacatgaagtcaggaaaagaaaagaaacttagttctaccttgattacatatgttgttacaaattatcattataaaatgtttaaacaattagtatagtatatcttttgaataattgcttataatatgccttaccataaagaaaattgatgctacattgtgtgaattgtttggttttctttttatattaaaattatgcataaatgaa

SEQ ID NO: 55390 - DNA, 4023 bp, Artificial Sequence
  derived and/or modified sequence
gttgctattttgtgaattactgataggcatgttatttgttagcttatttgtttacagtatgctcaacattgaaggtgagttgtaatccaaattttggccaaagctaaaaaattcaaaacagtctgttttgcttagctgatttatgttttcctaaagccagaattcacaatgacaacagtgacagtgaccacagaaattcccccaagggataagatggaagataattctgccttgtatgagtctacgtccgctcacattattgaagaaaccgagtatgtgaaaaagattcgaactactctgcaaaagatcaggacccagatgtttaaagatgaaataagacatgacagtacaaatcacaaactagatgcaaagcactgtggaaaccttcaacagggctctgattctgaaatggatccttcttgttgcagtttggatttgcttatgaaaaagataaaaggaaaagacctacagctcttagaaatgaacaaagagaatgaagtattgaaaatcaagctgcaagcctccagagaagcaggagcagcagctctgagaaacgtggcccagagattatttgaaaactaccaaacgcaatctgaagaagtgagaaagaagcaggaggacagtaaacaattactccaggttaacaagcttgaaaaagaacagaaattgaaacaacatgttgaaaatctgaatcaagttgctgaaaaacttgaagaaaaacacagtcaaattacagaattggagaaccttgtacagagaatggaaaaggaaaagagaacactactagaaagaaaactgtctttggaaaacaagctactgcaactcaaatccagtgctacatatggaaaaagttgccaggatcttcagagggagatttccattctccaggagcagatctctcatctgcagtttgtgattcactcccaacatcagaacctgcgcagtgtcatccaggagatggaaggattaaaaaataatttaaaagaacaagacaaaagaattgaaaatctcagagaaaaggttaacatacttgaagcccagaataaagaactaaaaacccaggtagcactttcatctgaaactcctaggacaaaggtatctaaggctgtctctacaagtgaattgaagaccgaaggtgtttccccttatttaatgttgattaggttacggaaatgaactggctggatgaagatctgatttagaaagactgcgtgagtcttatttattctctgaaacacagcccaagtttcatgttaaaatggcaaaatgccattatttaaatggaacttattacataccaatggctttgcaagaagatgacatttcagaaaatcaaacaaatctatatttaatggatggactcttcaaaacttaccaaatagttgaagaaaccaggtgccttctcatgatggaagacagattctgctttaaattaaaaaaaaaaaaaaatctgaatcttgttttcagatttttttttctactgggattgttttaagattgtcaattctgacttttttatagtggtttttaagagtataaatagaagggagagtgtatatgtgtatgaatgaacatacatttcctgcatatatatgtatgaagggcatgtatatgtatgaatgagcaaacatatttgaaagttaacttttggatgataggaaagatcgtacagtgacataagttcatctcctgatccattgtttgtgggagaattatacttgactgaattatgggcaggagaaagagcagattccttttagctaattccccaacccatatgcccctctgaagttgagaatcatggctgcctcaccacacatcagagaatgactgttcttcttagttctgggattaaaaattggtttctagaggtaacctgtacacacaaacgcacagggatgcacatggtttcctctgcctttgtgactaattttcttcttgatagttattaatagtatctaaataaaatattggggggatagaaaaataatgctgttagctcatacttccatgaaaatgtatatattataggctcaaaggaataatgactgctgtctgcagccagaaagaatctgaatttatgaattggaaagatatatatagtgtatttgtgaaagtttgcttaaattctgatacatgccttctttgtaggtggagtttgtgattgcagtgaatagaacaaattctgacttgcagaaatgcagacatacagtcaggaaagaacaaacttcaattaaatgtataatgagagaccttggtccccctaaaggatgaatttcctttaggcctttgatcttcctctctagtgtataactttaaatatttgctcagaaaagatgctgactctttcattatggaatgtgaaatatcagtgttgtctataaatatttgaaggtatataaaaatgagatgatgtaatgtatttataaatttatccaagtactgtaatccttgaattgttgtgtaactgtgtgtgagttttacgcttcatggtatttttggaaacatttttattgcttgcttattttgaaggtatatttatctgttaacatttagggcatagttaccttataccagcaacaagtctaagcactttacttgtattaatttattttatcttccccaaggccctcagaagcagattattcctgttttacagagaaagatactgagagtggttgagtaatttgcccagctgctaactgtgaagcaaaaatttgaaccttttgacttggctattgatattcattctacttgctcacatggtggtctaagaaatttcccagctatagaaatctctctatttttgccactttaatcaacacatagcttcctggatgactgcctgtgttattttgtggatgacagtaagaaacaacaaatactgataaaatcaatattttgctgaaatgagttgatctttcaccagctggactaccattgtgagaactcagttcagacaaacttccctgctaaaaatctgtttatcatacatttattatttatgactttatgtcacattgaagaatttcttcatgatacattttcaggcacacttgtaggaaaattaggatcatgagtcctgctttaagtatttgcagtgtagtaagagaatccatcttttactaggagaccagattccttttatacctcattcatcatgctggattgtaataaatttcagattttggaatgggcttatttaactgacctgacaatcttgatgatttccattagaataacttattctaaggtcaaaagtggaaagacactgttggtttttattttgatttcactatactcatttttgaacatggaaatacagtggtgaaaccacctatgcaaaaatgataacagtgaggaaattatgacagtgaaagagatctgacctaactatctatcttgcctcgaaactgcccttggtcgttcctgagtgtgggccaagctaactttgggagaaatttactttataggttaaattataatagcccttcccaaaactaaacgattctcctgcctcagcctcccgagtagctgtctttataataccatcagccttatcatttattcgtcatgtatggattgtttcctatatccactatcataaaattatcatttgaaatatttttttatgaaaaaaaaaacacttctcagtgaaaaaacaagattacaagggggaataatatttattcagctaaaatagtacttcacaggaaatataggaaaagaaacactagttcagttttattccaaataatgtacttctaattatactcttgaatttattggataagaaggtctgaggtgggtctgaaattcatacatgaagtcaggaaaagaaaagaaacttagttctaccttgattacatatgttgttacaaattatcattataaaatgtttaaacaattagtatagtatatcttttgaataattgcttataatatgccttaccataaagaaaattgatgctacattgtgtgaattgtttggttttctttttatattaaaattatgcataaatg

SEQ ID NO: 55391 - DNA, 1008 bp, Artificial Sequence
  derived and/or modified sequence
atgaccaccgtcaccgtgaccaccgagatccccccaagggacaagatggaagacaacagcgctctgtatgaatctaccagtgcgcatatcatagaggagacggagtacgtgaaaaagatccgcacgactcttcagaagatacggacccagatgtttaaggacgaaatacgacatgatagtacaaatcacaagctggatgccaagcactgtggaaatctgcagcaaggatctgattccgagatggatcctagctgttgctctttggacctgctgatgaaaaaaattaaaggcaaggatctgcagctgttagaaatgaataaggaaaatgaagtcctgaaaattaagctgcaggcatcaagggaagccggtgcagccgcactgagaaatgtggcccagagactgtttgagaactaccagacacagagtgaagaagtgcgtaaaaagcaggaggactcaaaacagttgctgcaggtgaataaattagagaaagaacagaagttaaaacaacacgtggaaaatcttaatcaggtggcagaaaaactggaagagaaacactcccagatcactgaactggaaaacctggtgcagcggatggaaaaggagaaaagaaccctgctcgaacgcaagctcagcctcgagaacaagctgctgcagttgaagtctagcgccacatatggaaaatcctgccaggatttgcagagagagatttccatcctccaggagcagattagccatctgcagttcgtcattcattctcaacaccaaaacttgcgttccgtcatacaggagatggaaggtctgaagaacaatctcaaagagcaagacaaacggatcgaaaacctacgcgagaaagtgaacattctcgaggcccagaataaagaactgaaaactcaggtggccctcagctctgaaacacctcgaaccaaggtttctaaagccgtcagcacctcagaacttaagacagagggagtatcaccttatttgatgcttatcagattgcgcaagtag

SEQ ID NO: 55392 - DNA, 1008 bp, Artificial Sequence
  derived and/or modified sequence
atgacaacagtgactgtgaccacagaaattccccctagagataaaatggaggacaactcagcactgtacgaatctacctcagctcacatcattgaagaaaccgagtacgtcaagaaaatacgaacaaccctgcagaaaatcaggacacaaatgtttaaagacgagattaggcacgattctaccaaccataagctggatgctaaacactgcgggaaccttcagcaggggtccgattcagagatggacccaagctgctgtagcctggacttgctgatgaaaaagatcaaggggaaggatctgcagctcctagagatgaataaggagaacgaggtgttaaaaatcaaactgcaggcaagtcgggaagccggagcagcagctttgcggaacgtggcccagcggctgtttgaaaattaccagacccagtccgaggaggtgcggaagaagcaggaggatagtaagcagttgttacaggtcaataaactggagaaagaacaaaaacttaagcagcacgtcgagaacctgaatcaggtggccgagaaactcgaagaaaaacattcgcagataacggaactagagaacttggtacagcggatggaaaaagagaagcgaaccttgctggagagaaaactgagcctggagaataagctgttgcagttgaaatcctctgcgacctatggcaaaagttgccaagacctgcagagggaaattagcatcctgcaggagcagattagccacttacagttcgtgattcacagtcagcaccagaatctccggagtgtgattcaggaaatggaggggctgaagaacaacctgaaggaacaggacaaacggatagagaatttgcgggaaaaggtgaacatcctggaggcccagaacaaggaactcaaaacccaggtagcgctttcatccgaaactccaagaaccaaagtatctaaagcagtgtccacttcagagctgaagaccgagggggtgtccccctacctgatgctgatccggcttcgaaagtag

SEQ ID NO: 55393 - DNA, 1008 bp, Artificial Sequence
  derived and/or modified sequence
atgactactgtgacggttaccactgaaatcccacccagggacaaaatggaagacaacagcgctctgtatgagagcacgtccgctcacatcatcgaggagacagagtatgtgaagaaaatcaggactacactgcagaaaatacgcacacagatgttcaaggacgagatccgtcacgactccaccaatcacaaactcgatgctaagcattgcggaaaccttcagcaaggttccgattccgaaatggatcccagctgttgtagcctggacctgcttatgaaaaagattaagggcaaagatctccagctcctggaaatgaataaagagaacgaggtgcttaagatcaaactgcaggcatcaagagaagccggcgctgccgccttacgtaacgtggctcagagactgttcgaaaactaccagacgcaatcggaggaggtcaggaagaagcaggaggatagcaagcaattgctccaggttaacaagcttgagaaggagcaaaaactcaaacaacacgttgaaaatctgaatcaggttgcggagaaactggaggaaaaacattctcagatcacagaactggagaacctggttcaacgcatggagaaggaaaagcgtacactgctggaacgaaaattgtcacttgagaacaaactactgcagctcaagagctctgctacctacggcaaatcttgtcaggacctgcagcgtgaaatctctattcttcaggagcagatatcacatttgcagtttgttatccatagtcagcatcagaaccttagatctgtgattcaagagatggagggcttaaaaaataatctaaaggaacaagacaaacgcattgagaatctccgggagaaggtcaacatcttagaggctcaaaacaaggagcttaagacccaggtcgctctctcttccgagactcctagaacaaaagtatccaaggccgtcagtacctccgagttaaagaccgaaggtgtgtcaccgtatctgatgctgattcgactcaggaagtag

SEQ ID NO: 55394 - DNA, 1008 bp, Artificial Sequence
  derived and/or modified sequence
atgaccaccgtgacagtgaccacagagatccccccccgggacaagatggaggacaacagcgccctgtatgagagcaccagcgcccacatcatcgaggagacagaatatgtgaagaagatccgcaccaccctgcagaagatccgcacccagatgttcaaggatgagatcagacatgacagcaccaaccacaagctggatgccaagcactgcggcaacctgcagcagggcagtgacagcgagatggaccccagctgctgcagcctggacctgctgatgaagaagatcaagggcaaggacctgcagctgctggagatgaacaaggaaaatgaggtgctgaagatcaagctgcaggccagccgggaggccggggctgctgccctgagaaatgtggcccagaggctgtttgagaactaccagacccagagcgaggaggtgaggaagaagcaggaggacagcaagcagctgctgcaggtgaacaagctggagaaggagcagaagctgaagcagcacgtggagaacctgaaccaggtggccgagaagctggaggagaagcacagccagatcacagagctggagaacctggtgcagaggatggagaaggagaagaggaccctgctggagaggaagctgagcctggagaacaagctgctgcagctgaagagcagcgccacctacggcaagagctgccaggacctgcagcgggagatcagcatcctgcaggagcagatcagccacctgcagtttgtgatccacagccagcaccagaacctgcggagcgtcatccaggagatggagggcctgaagaacaacctgaaggagcaggacaagagaattgagaacctgcgggagaaggtgaacatcctggaggcccagaacaaggagctgaagacccaggtggccctgagcagcgagacccccaggaccaaggtgtccaaggctgtgtccaccagcgagctgaagacagaaggagtgagcccctacctgatgctgatccggctgaggaagtag

SEQ ID NO: 55395 - DNA, 1008 bp, Artificial Sequence
  derived and/or modified sequence
atgaccaccgtgaccgtgaccaccgagatccccccccgggacaagatggaagacaattccgccctgtacgagagtacttcagcccatatcatagaggaaacagaatacgtgaagaaaatccgaacaactctccagaagattagaacccaaatgtttaaagatgagataagacacgacagcacaaaccacaagcttgacgctaaacactgcggaaatcttcaacaggggtccgacagtgaaatggaccccagttgttgttccttagacttgttgatgaaaaaaatcaaaggtaaggatctccaactactcgagatgaacaaggagaacgaggtcctgaagattaaactgcaggcatctcgagaggcaggcgctgcggcccttcggaatgtcgcacagcgcttgttcgaaaattaccagacgcagagcgaggaggtgcggaaaaaacaggaagacagtaaacagctgctgcaggtgaacaagctggagaaggaacagaagctcaagcagcatgttgagaatctgaaccaggtggccgaaaaattagaggaaaagcacagtcagattacagagttagagaacctagtccaaaggatggaaaaagagaagagaaccctcctggaaaggaaattgtccttagagaataaacttcttcagttgaaaagtagcgccacctatggcaagagttgtcaggatctccaaagggagataagcattctccaagaacaaatctctcacttacaatttgtgattcacagccagcatcagaatctgcgatcagtcatccaggagatggagggactcaagaacaatctgaaagagcaggacaagaggattgaaaacttacgggaaaaggtcaatattctagaggcacaaaacaaggaactgaaaacacaagtggcgctgagctccgagaccccccgcacaaaagttagtaaggcggtgagtacttccgaactgaagacagaaggggtcagtccctatctgatgctgatccggctgaggaaatag

SEQ ID NO: 55396 - DNA, 1008 bp, Artificial Sequence
  derived and/or modified sequence
atgaccaccgtgaccgtgaccaccgagatccccccccgggacaagatggaggacaactcagctttgtatgaatctacaagtgctcacataattgaggagaccgagtatgtaaagaagatcagaaccacattgcagaaaatacggactcagatgttcaaggatgagattcgtcacgacagcacaaatcataaactcgacgccaagcactgtgggaacctgcagcagggtagtgacagcgagatggatcctagttgctgctctctagacttgctcatgaaaaagattaaaggaaaggacctgcagttgttggaaatgaacaaagagaacgaggtgctcaaaatcaagctgcaggcttcaagagaggctggggccgccgccctcaggaacgtagcccaacgcctttttgagaactaccagacccagtccgaggaggtccgaaaaaaacaggaggactccaaacagctccttcaggtcaataagcttgagaaagagcagaagctaaagcagcacgtcgagaacttaaatcaggttgctgagaagttggaggaaaaacattcgcagataaccgagctggaaaacttagtacaacgaatggaaaaggaaaagaggactctcttggagcgcaaattgagcctggaaaacaagttgctgcagctaaagagctcagccacatacgggaagtcctgccaagacctgcagcgagagataagcattcttcaggagcaaatctctcacctgcaattcgtcatacacagtcagcatcaaaatttgcggagcgtgattcaagaaatggagggcctaaagaataacctgaaagaacaggacaaacggatcgagaaccttcgggaaaaagtcaacatccttgaagctcagaacaaggagttgaagacacaggtggccctttcgtctgaaacaccacggacaaaagtgtctaaagccgtgagcacctctgagctgaagaccgaaggtgtgagtccttacctgatgctgattcgactgcggaaatag

SEQ ID NO: 55397 - DNA, 1008 bp, Artificial Sequence
  derived and/or modified sequence
atgaccaccgtgaccgtgaccaccgagatccccccccgggacaagatggaggacaacagtgcactgtatgagtcaacgtctgcacatatcattgaggagacggagtacgtcaagaaaatccggaccacactccaaaagattcggactcagatgtttaaggatgagatccgacatgactctactaatcacaaattggacgctaagcactgcgggaatctgcagcagggcagcgacagtgagatggatcccagctgctgttccctggaccttctgatgaagaaaattaaaggcaaagatttacaactgctcgaaatgaacaaggaaaacgaggtgctgaagatcaagctccaggcctcacgcgaagctggggcagccgcgctgagaaatgtagcccagcggctgtttgaaaattatcagacgcaaagtgaagaggtgaggaaaaaacaagaggacagcaagcaattactgcaggttaataagctagagaaagaacagaaattgaagcagcatgtcgagaatctgaatcaggtcgctgagaaactggaagagaagcattcccagatcactgagctggagaacctggtgcagcgaatggagaaggaaaagcgcactctactggagaggaaactttctttagagaacaaattgctccagctaaagtcttcagccacatatgggaaatcctgtcaggatctccagcgcgagatctctatcctccaggaacaaatttcccacctgcagtttgttatccactctcagcaccagaacctgcggtctgtgattcaggagatggaaggcctgaagaataaccttaaagaacaggacaaaagaatcgaaaaccttcgtgaaaaggtcaacatactcgaagctcaaaataaagagttgaagacccaggtcgccctgagttctgaaactccaagaacaaaagttagcaaggccgttagcaccagcgagctcaaaacggaaggcgtgtctccctacctcatgctgatcagattgcggaaatag

SEQ ID NO: 55398 - DNA, 1008 bp, Artificial Sequence
  derived and/or modified sequence
atgacaacggttactgtgaccacggagatccctcccagagacaagatggaagacaactcagccctctacgagtcaaccagtgctcatattattgaagagactgaatatgttaagaaaatacgaactacgctacagaagatccgcactcagatgttcaaggatgaaatccggcacgacagtaccaatcacaaactcgatgccaagcactgtggcaacctccagcaagggtcggactcggagatggacccctcttgctgtagtctggacctgctgatgaagaagattaaagggaaggaccttcagctgctggagatgaataaagagaatgaagtgctgaaaataaagttacaggcttcgcgcgaagccggagccgctgcgctgaggaatgtggcccagagattgtttgaaaattaccaaacacagtcggaggaggtcaggaaaaagcaggaggactccaagcaactgctccaggtgaataaactcgagaaagaacaaaagctgaaacaacacgtggaaaatctgaatcaagtggcagagaagctggaggaaaagcacagccaaatcacggaactcgaaaacttagttcaacggatggagaaggagaagcgtacgttgctggaacggaagctatccctagaaaataagcttctgcaacttaaatcgtccgcgacctatggcaagagctgccaggatctgcagagagaaatctctattttacaggagcagattagccatctgcagttcgtcatccatagccagcaccaaaacctccggagtgtcatccaggagatggagggtttgaaaaataaccttaaggaacaggacaaacggatagaaaatctacgagaaaaggtgaacatcctggaagcacagaacaaggagctaaagacccaggtagccctgtcaagcgaaacgccccgaaccaaagtgagcaaggcagtttccacatccgaattgaaaactgagggagtttccccctatctcatgttaatccggctcagaaagtag

SEQ ID NO: 55399 - DNA, 1008 bp, Artificial Sequence
  derived and/or modified sequence
atgaccaccgtgactgtgacaacggagattccacctagggataaaatggaagacaattcggcactctacgaatctaccagcgcgcacatcatcgaggaaactgagtacgtgaagaagattcggacaacactgcagaaaatcagaacacagatgttcaaagacgaaatccgacatgacagtacgaaccacaagctagatgctaaacactgtggtaatctgcagcagggatctgacagcgagatggacccttcttgttgctcactggatttgttgatgaaaaaaattaagggaaaggatctgcagctgctggaaatgaacaaagaaaatgaagttttgaagattaaattgcaggcttccagagaagcaggagctgctgccctacggaatgtcgcccagcggctgtttgaaaattaccagacacagagcgaagaggtgcgtaaaaaacaagaggattccaagcagttgctgcaggttaacaaactggaaaaagaacaaaagctgaagcagcacgtggagaaccttaatcaagttgcagagaagctggaggagaagcactctcagattaccgaactggagaacttagtccagaggatggagaaagaaaaacggactctactggagaggaagctctcactcgaaaacaagctgcttcagcttaagtcatccgcaacctatgggaagagctgccaagatttgcagcgcgagatctctatcctgcaggagcagattagccacctgcagttcgttatccactcccagcaccaaaacctcagatctgtgatccaggagatggaagggctgaaaaataatctaaaggagcaggataagaggatagaaaatctccgggagaaagtcaatatcctggaagctcagaacaaagaattaaaaacccaagtggctctgtctagtgagactcccagaacaaaagtttctaaagctgtgagcactagcgagctgaagacggagggggtttccccttatctgatgctgattcgtctccgaaaatag

SEQ ID NO: 55400 - DNA, 1008 bp, Artificial Sequence
  derived and/or modified sequence
atgacgactgtgacagtcaccactgagattccaccccgtgataagatggaagacaattctgctctttatgagagcacaagtgcccacatcattgaagagactgagtatgtcaaaaaaatcaggacgacacttcaaaagatccgaacacagatgttcaaggacgagatcagacatgattcaactaatcataaactggatgccaaacattgcggcaacctgcagcagggtagcgactccgagatggatcccagctgctgcagtttagatctcctgatgaagaagatcaaagggaaagacctgcagctgttggaaatgaataaggaaaatgaagtactaaaaattaagctccaggcctcacgagaagctggcgctgcagcgctcaggaatgtcgcccagaggctgttcgaaaattaccagacacagtctgaggaggtgagaaaaaaacaagaggattccaagcagcttttacaagtgaataagttggaaaaggaacagaagttgaagcaacatgttgagaacctgaatcaggtggcggaaaagttagaagagaagcatagtcaaatcaccgagctagagaatttggttcagcggatggagaaggagaaacggaccctgctggagaggaaactatcattagagaataaactccttcagctgaaaagttccgcaacgtatggtaaaagttgccaggacctgcagagagagattagcatcctgcaagagcagatctcacatctacagttcgtgatccactctcaacaccagaacctgaggtcagtgatccaggagatggaaggccttaagaataacctgaaggaacaggataagaggatcgagaaccttcgggagaaagtgaacatcctcgaggcccaaaacaaagagttaaagacacaggtggcattgtcgagcgagacccctcgcaccaaagtttcgaaggccgtttcgacatctgaattgaaaaccgagggggtgagcccctatttgatgctcatccggctccggaagtag

SEQ ID NO: 55401 - protein, 313 aa, Artificial Sequence
  derived and/or modified sequence
MCTALSPKVRSGPGLSDMHQYSQWLASRHEANLLPMKEDLALWLTNLLGKEITAETFMEKLDNGALLCQLAETMQEKFKESMDANKPTKNLPLKKIPCKTSAPSGSFFARDNTANFLSWCRDLGVDETCLFESEGLVLHKQPREVCLCLLELGRIAARYGVEPPGLIKLEKEIEQEETLSAPSPSPSPSSKSSGKKSTGNLLDDAVKRISEDPPCKCPNKFCVERLSQGRYRVGEKILFIRMLHNKHVMVRVGGGWETFAGYLLKHDPCRMLQISRVDGKTSPIQSKSPTLKDMNPDNYLVVSASYKAKKEIK

SEQ ID NO: 55402 - DNA, 942 bp, Artificial Sequence
  derived and/or modified sequence
atgtgtactgctctcagccctaaggtgcgctccggccctggactcagcgacatgcatcagtatagccagtggttagctagtcgccatgaggctaacctcctgcctatgaaagaggacctggctctatggctaacgaatctgctcgggaaagaaattactgcggagaccttcatggaaaaacttgacaatggagcactgctgtgccaactggccgaaactatgcaggaaaagttcaaggagagcatggacgctaataagcccaccaagaacctgccactcaaaaagattccctgcaaaactagtgccccctccgggagttttttcgcaagagacaacaccgctaacttccttagttggtgtagagacttgggggtggatgaaacctgcctcttcgagtcagaaggcctcgtcctgcataaacagcctcgcgaggtctgcctgtgtctcctggagctgggacgtatagcagcccgctacggggtggagcctcccggacttatcaagctggagaaggagatcgagcaagaggagaccctgtcagcgcccagcccatctccctcccctagcagcaaatcatctggtaaaaagtcgacaggtaatctcctggacgatgctgtaaaacgtatctccgaggaccctccttgtaaatgccccaataaattttgcgtggagaggctgagtcagggacgttaccgggtcggtgaaaagatcctcttcattaggatgctccacaacaaacatgtgatggtgagagtgggagggggctgggagacatttgccggctatctcttaaaacacgatccttgcagaatgctgcagattagccgggtcgatggcaagacctcacctatccagagcaagtcccctaccttgaaggacatgaatccagacaactaccttgtggtgtccgccagctacaaggccaaaaaggaaatcaaatag

SEQ ID NO: 55403 - DNA, 942 bp, Artificial Sequence
  derived and/or modified sequence
atgtgcacagcgctctcaccaaaggtcagatccgggccaggactgtcagatatgcaccaatatagccagtggctagcctcgagacacgaggcaaatttgctgccaatgaaggaggatctggccctgtggcttacgaacctcctggggaaggagatcacagctgagacctttatggagaagctcgacaacggggccctgctgtgccagctggcagagacaatgcaagagaaattcaaagagtctatggatgctaacaaaccgacaaagaatctccctctgaagaagatcccatgtaaaacttctgcacccagcggatcattctttgcaagggacaacacagcaaactttttgtcatggtgtagggacttgggcgtcgacgaaacttgtctgttcgagagcgagggactggtcctgcataagcagcccagagaagtgtgcctgtgcctacttgagctgggccgcatcgccgcgcgttacggcgtggaacccccaggtctgattaaacttgaaaaagagatagaacaggaggaaactttgtctgcccccagcccatctccctccccttctagcaagagctctgggaaaaaatcgactgggaatctgctcgatgacgcagttaaacggatatctgaagatccaccctgtaaatgccccaacaaattctgcgtggagaggttatcacaaggccggtatagagtaggggagaagatcctttttatccgcatgctccacaacaaacatgtcatggtgcgcgtggggggcggatgggagacttttgcggggtatctgctcaaacacgatccctgccgcatgctgcagatatctcgggtagatggcaagacatctccaatccaaagcaaaagcccaaccctcaaagatatgaacccggacaactacctggtggtgtccgcctcctataaggctaaaaaggagataaagtag

SEQ ID NO: 55404 - DNA, 942 bp, Artificial Sequence
  derived and/or modified sequence
atgtgcactgctctgtccccaaaggtgagatcaggccccggcctgtcggacatgcatcagtactctcaatggctggcctctaggcatgaggccaacctactccccatgaaagaggatctggctctctggctgacaaatctgctggggaaagagatcaccgccgagacattcatggagaagctggacaatggtgcacttttatgtcaattagcagaaacaatgcaggagaaattcaaggagagtatggatgctaataagcccactaagaacctgccactcaagaaaattccctgtaagacctcggccccttccgggtctttttttgcgcgagataacacagctaatttcctgtcttggtgccgtgacctgggagtggatgagacatgcttgttcgaatctgaaggattagtcttgcacaaacagcctagagaggtatgcctgtgccttctcgagcttggtcgcatcgccgccagatacggggtggaacccccaggccttataaaactcgagaaagaaatcgagcaagaagagactttatccgccccttcccccagccctagtccaagctccaagagttccggcaagaaatccacaggcaatctcctggatgacgccgtaaaaaggatctcggaagacccgccttgtaagtgtcctaataagttttgtgtggagaggctttcccaagggagatatcgagtaggagagaagatcttgtttatccgtatgctccataacaaacatgtcatggtccgggttggtggtgggtgggaaaccttcgctggctatctgttgaaacacgatccctgccgcatgctgcagatcagcagagtcgacggcaagacttcacctattcagtcgaaatcccctactctcaaggacatgaaccccgacaactatcttgtcgtcagtgcctcttataaagcaaaaaaggagattaagtag

SEQ ID NO: 55405 - DNA, 2170 bp, Artificial Sequence
  derived and/or modified sequence
gagattcacagaggcaaggcagagaacaagacctgtgcttctttactccaaactcttagcagtgtggacactgattaactgcagctggggtctgatttgcccagcctgtctttgatattgatcaatgaactccttctcaaggaatgctttcctctaactgcggtgaaggtggtggctctggtggttctctccaacatgggtgtctgggttttgactgcctaagagaaggtattacaagtggataaataatgtgcactgctctgagcccaaaggtacgcagtggacctggcctctctgatatgcatcagtatagccaatggctagccagcagacatgaagctaatttgctaccaatgaaagaagatctggccttgtggttaaccaatctattagggaaggagattacagcagaaacttttatggagaagttggacaatggtgccttgctctgtcaacttgcagaaactatgcaggagaaattcaaggagagcatggatgctaacaagcccacaaagaatctaccgttgaagaagatcccatgcaaaaccagtgcaccctcgggctccttttttgccagagacaatacagcaaatttcttatcctggtgccgagatttaggggtggatgaaacgtgtctatttgaatcggaaggtttggtcctccacaagcaacccagagaagtgtgtctctgtctgctagagcttggccggattgcagccaggtatggtgtggagcctcctggtttgataaagctggaaaaagagattgaacaagaagaaacactttctgccccttctccttcaccttctccttcatcaaagtcttctggaaaaaagagtacaggaaacttactggatgatgcagtgaaacgaatttctgaagatcctccttgcaaatgcccaaacaagttctgtgtggagcggctctcccaaggaagataccgagtgggagaaaagatcctcttcattaggatgctgcacaacaaacatgtcatggtccgtgtgggaggaggctgggaaacttttgcagggtatttgttgaaacacgacccctgccgaatgctgcagatctcccgtgtggatggcaaaacatcccctatccaaagcaaatctccaactctaaaggacatgaatccagataactacttggtggtctctgccagttataaggctaagaaggaaattaagtgaaacaaattggtcatgacaaggggaccctcataatggcctgtatccacttctccagtatagtcagtttagttcatatgttctgaaaactgttttggagaaagatagacagaaaaatgtcatcatattgaaaaatgttcaaagagtagcactatttatttttaatgcttctgtagaatatgacctattaaaagaaaatctaaactcaaatttaaattatccaaattttaggcaaattattatttctcaatatgcgaacacagtatttagaacacaatattagaaacacaattctaactaaagataaataaggagaaaacatttaggatttgcagataagtcaacagaaagtgcctgctttacactcatgagtaaaagcactccagacatttttataattgcaagatttttatgcttttttttttttttttttacaaaatgatgattagtgtgataatgtgctgcaaaaaatatccaacagcactacacataagtacagagtattcacaatagtaatatgttactggaaaggccacttccgaaaagtttacattcacttggaaggctgccttaaagtatatctcttatctatgaccaaatatctggggtacttttagaagttttcagtacacccccttagagaatagcttatgagttatttcacacattcctgagcacatggctgtgtttagaatgatctagtgtaattcatacatgagctgacatacgttgatactttgacgagtaaattgtacagtcaaatgttcattgatttcatgttatttcaaagcattttcttattaaaaatatatctttagttaatcctattttgctatgctttctagtaaagtaaattcactgtagctaatgatgttacagacttacgtatacccttgtatacctgggacagggctgttttataccaataaacagcaaaatattgtccttactcattcaagaattaaaaggataaattttaaaaa

SEQ ID NO: 55406 - DNA, 2014 bp, Artificial Sequence
  derived and/or modified sequence
cattataatgtcatgatgacaacattttgtgagagaagtctgtataaaaagcaattgctcttttgtttccaaaacaggtattacaagtggataaataatgtgcactgctctgagcccaaaggtacgcagtggacctggcctctctgatatgcatcagtatagccaatggctagccagcagacatgaagctaatttgctaccaatgaaagaagatctggccttgtggttaaccaatctattagggaaggagattacagcagaaacttttatggagaagttggacaatggtgccttgctctgtcaacttgcagaaactatgcaggagaaattcaaggagagcatggatgctaacaagcccacaaagaatctaccgttgaagaagatcccatgcaaaaccagtgcaccctcgggctccttttttgccagagacaatacagcaaatttcttatcctggtgccgagatttaggggtggatgaaacgtgtctatttgaatcggaaggtttggtcctccacaagcaacccagagaagtgtgtctctgtctgctagagcttggccggattgcagccaggtatggtgtggagcctcctggtttgataaagctggaaaaagagattgaacaagaagaaacactttctgccccttctccttcaccttctccttcatcaaagtcttctggaaaaaagagtacaggaaacttactggatgatgcagtgaaacgaatttctgaagatcctccttgcaaatgcccaaacaagttctgtgtggagcggctctcccaaggaagataccgagtgggagaaaagatcctcttcattaggatgctgcacaacaaacatgtcatggtccgtgtgggaggaggctgggaaacttttgcagggtatttgttgaaacacgacccctgccgaatgctgcagatctcccgtgtggatggcaaaacatcccctatccaaagcaaatctccaactctaaaggacatgaatccagataactacttggtggtctctgccagttataaggctaagaaggaaattaagtgaaacaaattggtcatgacaaggggaccctcataatggcctgtatccacttctccagtatagtcagtttagttcatatgttctgaaaactgttttggagaaagatagacagaaaaatgtcatcatattgaaaaatgttcaaagagtagcactatttatttttaatgcttctgtagaatatgacctattaaaagaaaatctaaactcaaatttaaattatccaaattttaggcaaattattatttctcaatatgcgaacacagtatttagaacacaatattagaaacacaattctaactaaagataaataaggagaaaacatttaggatttgcagataagtcaacagaaagtgcctgctttacactcatgagtaaaagcactccagacatttttataattgcaagatttttatgcttttttttttttttttttacaaaatgatgattagtgtgataatgtgctgcaaaaaatatccaacagcactacacataagtacagagtattcacaatagtaatatgttactggaaaggccacttccgaaaagtttacattcacttggaaggctgccttaaagtatatctcttatctatgaccaaatatctggggtacttttagaagttttcagtacacccccttagagaatagcttatgagttatttcacacattcctgagcacatggctgtgtttagaatgatctagtgtaattcatacatgagctgacatacgttgatactttgacgagtaaattgtacagtcaaatgttcattgatttcatgttatttcaaagcattttcttattaaaaatatatctttagttaatcctattttgctatgctttctagtaaagtaaattcactgtagctaatgatgttacagacttacgtatacccttgtatacctgggacagggctgttttataccaataaacagcaaaatattgtccttactcattcaagaattaaaaggataaatttt

SEQ ID NO: 55407 - DNA, 2286 bp, Artificial Sequence
  derived and/or modified sequence
ttttacttccgctcggtctatgaggactgatgaaatgtaggaaatctgtttctggcagggagaaaaaatcgttttcccaaacagcactaaaaggagccatcagagaagtatgaagaggggtagtgcggctgtagctgctgccgctgccgccaggctggtggggtgcggggagcggctgctgcaggacctgtgcctggagggggccggccccgagaagctgcaggagcccagcccggagcccaagcgcctctgagagccgccagcagcccagctcgggacgcgggggtattacaagtggataaataatgtgcactgctctgagcccaaaggtacgcagtggacctggcctctctgatatgcatcagtatagccaatggctagccagcagacatgaagctaatttgctaccaatgaaagaagatctggccttgtggttaaccaatctattagggaaggagattacagcagaaacttttatggagaagttggacaatggtgccttgctctgtcaacttgcagaaactatgcaggagaaattcaaggagagcatggatgctaacaagcccacaaagaatctaccgttgaagaagatcccatgcaaaaccagtgcaccctcgggctccttttttgccagagacaatacagcaaatttcttatcctggtgccgagatttaggggtggatgaaacgtgtctatttgaatcggaaggtttggtcctccacaagcaacccagagaagtgtgtctctgtctgctagagcttggccggattgcagccaggtatggtgtggagcctcctggtttgataaagctggaaaaagagattgaacaagaagaaacactttctgccccttctccttcaccttctccttcatcaaagtcttctggaaaaaagagtacaggaaacttactggatgatgcagtgaaacgaatttctgaagatcctccttgcaaatgcccaaacaagttctgtgtggagcggctctcccaaggaagataccgagtgggagaaaagatcctcttcattaggatgctgcacaacaaacatgtcatggtccgtgtgggaggaggctgggaaacttttgcagggtatttgttgaaacacgacccctgccgaatgctgcagatctcccgtgtggatggcaaaacatcccctatccaaagcaaatctccaactctaaaggacatgaatccagataactacttggtggtctctgccagttataaggctaagaaggaaattaagtgaaacaaattggtcatgacaaggggaccctcataatggcctgtatccacttctccagtatagtcagtttagttcatatgttctgaaaactgttttggagaaagatagacagaaaaatgtcatcatattgaaaaatgttcaaagagtagcactatttatttttaatgcttctgtagaatatgacctattaaaagaaaatctaaactcaaatttaaattatccaaattttaggcaaattattatttctcaatatgcgaacacagtatttagaacacaatattagaaacacaattctaactaaagataaataaggagaaaacatttaggatttgcagataagtcaacagaaagtgcctgctttacactcatgagtaaaagcactccagacatttttataattgcaagatttttatgcttttttttttttttttttacaaaatgatgattagtgtgataatgtgctgcaaaaaatatccaacagcactacacataagtacagagtattcacaatagtaatatgttactggaaaggccacttccgaaaagtttacattcacttggaaggctgccttaaagtatatctcttatctatgaccaaatatctggggtacttttagaagttttcagtacacccccttagagaatagcttatgagttatttcacacattcctgagcacatggctgtgtttagaatgatctagtgtaattcatacatgagctgacatacgttgatactttgacgagtaaattgtacagtcaaatgttcattgatttcatgttatttcaaagcattttcttattaaaaatatatctttagttaatcctattttgctatgctttctagtaaagtaaattcactgtagctaatgatgttacagacttacgtatacccttgtatacctgggacagggctgttttataccaataaacagcaaaatattgtccttactcattcaagaattaaaaggataaattttaaaaatgttatctgtctctaaatcaatgcctcattctgaaatcaagttaattttcaaatggcaa

SEQ ID NO: 55408 - DNA, 942 bp, Artificial Sequence
  derived and/or modified sequence
atgtgcacagccctgagccccaaggtgcgcagcggccctggcctgagtgacatgcaccagtacagccagtggctggccagcagacatgaggccaacctgctgcccatgaaggaggacctggccctgtggctgaccaacctgctgggcaaggagatcacagctgagaccttcatggagaagctggacaatggagccctgctgtgccagctggccgagaccatgcaggagaagttcaaggagagcatggatgccaacaagcccaccaagaacctgcccctgaagaagatcccctgcaagaccagcgcccccagcggcagcttctttgcccgggacaacacagccaacttcctgtcctggtgccgggacctgggcgtggatgagacctgcctgtttgaaagtgagggcctggtgctgcacaagcagccccgggaggtgtgcctgtgcctgctggagctgggcagaattgctgcccgctatggagtggagcccccaggcctcatcaagctggagaaggagattgagcaggaggagaccctgagcgcccccagccccagccccagccccagcagcaagagcagcggcaagaagagcacaggcaacctgctggatgatgctgtgaagaggatcagtgaagatcctccctgcaagtgccccaacaagttctgtgtggagcggctgagccagggccgctacagagtgggggagaagatcctcttcatccgcatgctgcacaacaagcacgtgatggtgcgggtgggcggcggctgggagacctttgctggctacctgctgaagcatgacccctgcaggatgctgcagatcagccgggtggatggcaagaccagccccatccagagcaagagccccaccctgaaggacatgaacccagacaactacctggtggtgtctgccagctacaaggccaagaaggagatcaagtag

SEQ ID NO: 55409 - DNA, 942 bp, Artificial Sequence
  derived and/or modified sequence
atgtgcaccgccctgagccccaaggtgcggagcggccccggcctgtcagacatgcaccagtactcccaatggcttgctagtagacatgaggccaacctgctgcccatgaaggaggacttggcactgtggcttaccaacctgttaggtaaggaaatcacagcagaaacattcatggaaaaattggacaacggagccctgttgtgtcaattagcagagacaatgcaagagaagttcaaggagtccatggatgccaacaagcctaccaaaaaccttccattgaaaaaaattccctgcaagacatcggcgccttctgggagtttctttgccagagataacaccgcaaatttcctgagttggtgcagggatctcggtgttgacgaaacgtgcctgtttgaaagcgaagggctggtactgcacaagcagccccgtgaggtttgcttatgcttgttggaattgggaaggatagctgccaggtacggcgttgagcctccaggcttaatcaagctggaaaaggagattgaacaggaagaaactctgagtgctccttctccaagtccctcaccctcgtctaagtcttctggcaagaagtctacaggtaatttgttggatgatgctgttaaacggataagtgaagaccctccatgcaagtgtccaaataagttctgcgtcgagcgattgtcgcagggacggtaccgtgtgggagaaaaaatacttttcatacggatgctgcataataaacacgttatggtgcgcgttggagggggatgggaaacttttgccggttacctcctgaagcacgatccttgtcgaatgctccagattagccgcgtagacggaaagacctctcccatccagtctaagtccccaacactcaaggatatgaatcctgataattacctggttgtgtctgccagctacaaagccaagaaagaaatcaagtag

SEQ ID NO: 55410 - DNA, 942 bp, Artificial Sequence
  derived and/or modified sequence
atgtgcaccgccctgagccccaaggtgcggagcggccccggcctgtccgatatgcaccagtactctcaatggctagcctctagacatgaggcaaaccttctgcctatgaaggaggatctggccctgtggcttaccaacttattaggcaaggaaatcacagcagagacctttatggaaaagctggataacggcgccttgctctgccagctggccgaaactatgcaggagaagtttaaggaatctatggacgctaacaagccaacaaaaaatctgcccctaaaaaagattccctgcaagacctcggcccccagcgggtcctttttcgcccgggataacactgccaatttcctgagttggtgtagagatcttggtgttgacgagacctgtttattcgagtccgagggcctcgtgcttcacaagcagcctcgagaagtgtgtctgtgcttgctggagctaggccggattgccgcccgttacggtgttgaaccaccagggttgatcaaactcgaaaaggagatcgagcaggaggagactctgtcagcaccatcaccttccccctcaccctcttctaaaagtagcggcaaaaagtccacagggaatctcctggatgacgcggtaaaaagaatttccgaggatcccccatgtaagtgtcccaataagttctgtgtggagcgactctcgcagggacggtaccgcgttggagaaaaaatcttgttcattaggatgctgcacaacaaacacgtgatggtaagggttggaggcggatgggagacgtttgctggatacttgctcaagcatgatccctgccgcatgctacagatctctagagttgacggtaaaacatccccaatccagtccaaaagccctactctaaaggacatgaatccagataactatcttgtggtttctgccagctataaagcgaaaaaggaaattaaatag

SEQ ID NO: 55411 - DNA, 942 bp, Artificial Sequence
  derived and/or modified sequence
atgtgcaccgccctgagccccaaggtgcggagcggccccggcctgtctgacatgcaccagtactcccagtggctggcctctcgccacgaagctaacttgcttcctatgaaggaagatctggcattatggctgaccaacctgctgggcaaggaaataaccgctgagacctttatggagaaactcgataatggcgccctgctatgccagctggctgaaaccatgcaggaaaagtttaaggagtctatggatgccaacaaaccaaccaaaaatcttccgctgaaaaagattccttgtaagacctccgccccgagcgggtctttctttgcccgagataatacggccaactttctgtcctggtgtagagatcttggagtagacgaaacttgcctgtttgaaagcgaggggcttgtgctgcataagcagccacgcgaggtctgtctgtgcctgctggagcttggaaggatcgccgccagatacggagtagaacccccaggactgatcaagctcgagaaagaaatagagcaggaggaaactttatcagctccaagcccatcaccatcacctagctcaaagtcctctggcaaaaagtccaccggcaacctgcttgacgatgcagtgaaaaggatctctgaggatccaccatgcaaatgcccaaacaagttttgcgtcgaacggctttcacaaggacgctatagagttggtgaaaagatcctcttcattaggatgctgcataataaacacgtaatggtgagggtgggaggcggatgggagacctttgccggttatctcctgaagcacgacccttgccggatgctccagatcagtagggttgatggtaaaaccagcccaatccaatccaagtctcccaccctcaaagacatgaacccagacaactatttggtggtcagcgcttcttacaaggccaagaaggaaattaaatag

SEQ ID NO: 55412 - DNA, 942 bp, Artificial Sequence
  derived and/or modified sequence
atgtgcacagctttatccccaaaagtgcgatccggacccggtctgtctgacatgcatcagtattctcagtggctggcttctagacacgaggccaacctgttgccgatgaaggaagatctggccctgtggctgaccaacctgttggggaaggaaatcacagctgaaacctttatggaaaaactcgataatggtgcccttctctgtcagctggccgaaaccatgcaagaaaagttcaaagaatccatggacgccaacaagcccacaaagaacctgcccctcaagaagatcccttgtaaaacttctgccccatccggatcatttttcgccagagacaacaccgccaattttctgtcgtggtgtcgggatctgggcgtggatgagacctgtctgttcgagtctgaaggcttggttctgcataaacagcctagagaggtctgcctctgcctgctggaactcggcagaatcgcggctaggtacggcgttgagcctcctgggctcatcaagctggaaaaggagatcgaacaggaggaaacactctcagctccttctccctcaccaagcccaagctctaaatcttccggcaaaaagagcacaggaaatctgcttgatgacgcagttaaacggatctcagaagaccctccttgcaagtgtcccaataaattctgtgtggaacggctttctcaaggtcggtaccgagtgggcgagaaaatcctcttcatcaggatgctacacaacaaacatgtgatggtgagagtcggagggggatgggagacattcgccggttacttgctcaagcacgacccttgccggatgctacaaattagtcgcgtggatgggaagacctccccaatccagtctaagtccccaaccctgaaggacatgaatcctgataactatttagtggtcagtgccagttacaaagccaaaaaggaaatcaagtag

SEQ ID NO: 55413 - DNA, 942 bp, Artificial Sequence
  derived and/or modified sequence
atgtgcacagctttgtctcctaaagtgcgcagtggccctggactttcagatatgcatcagtactctcagtggctcgcgtctcgtcatgaagcaaatttactgcctatgaaggaggatttagccctatggctgaccaatctgctcggcaaggagatcaccgccgagacattcatggaaaaactggacaatggggcactgctgtgccagctggctgagactatgcaggagaaattcaaagagtctatggatgcaaacaagcctaccaaaaaccttccattgaagaagatcccatgcaagacatccgcaccatccgggtcattcttcgccagagataacacagcaaatttcctctcttggtgtcgtgatctgggggtggacgagacttgcctatttgagagcgagggtctggtgcttcacaagcagcctagagaagtctgcctatgcttgctggaattggggaggatcgccgctcgctacggggtggagccccctggcctaatcaagcttgaaaaagaaattgagcaggaggagacactgtcagcgccatctcccagcccgtctccttcttcaaagagcagtggtaaaaagtctactggcaatctgctggacgacgctgttaaacgcatcagcgaggaccctccgtgcaagtgtccaaacaagttttgtgtagaacgcctgtcccagggcagatatagggttggggagaagatcctcttcattcggatgctgcacaataagcatgtgatggttcgcgtcggagggggttgggagactttcgctggctacttgctcaaacatgatccctgtagaatgctgcaaattagccgggtcgacgggaagaccagtcccatccaatcaaagtccccaacccttaaggatatgaatcctgataactacctcgtcgtgtcagcctcgtataaggctaagaaagaaattaagtag

SEQ ID NO: 55414 - DNA, 942 bp, Artificial Sequence
  derived and/or modified sequence
atgtgtaccgcactctcgcccaaggtgcggtccggccctgggctgagcgacatgcaccagtatagtcagtggctggccagtcggcacgaggctaatctgcttccaatgaaggaggatctggccttgtggctgacaaacttgctcggtaaagaaataacagccgagacatttatggagaaattagataacggggctttgctctgtcagctggccgaaacgatgcaggagaaattcaaagaaagtatggatgcgaacaaaccaacaaaaaatctaccattgaagaagatcccctgtaagaccagcgccccatccggtagcttttttgcacgggacaataccgctaatttcctcagctggtgtcgggatctgggtgttgacgaaacttgcctttttgaatcggagggactggtattgcacaagcagcccagggaggtctgcctgtgccttcttgagctcggtcgcatcgcagcccgttacggcgtggagccgcctggactcattaagctagaaaaagagatcgagcaggaggaaactctcagtgctccatcaccgtcgccgagtccatcaagtaaatcgtcaggtaagaagagtaccggcaatctgttggatgacgcagtcaagcggatttctgaagacccaccgtgtaagtgtccaaacaagttctgcgtcgaaagactttctcagggtagataccgcgtgggtgagaaaattctgttcattcggatgctgcacaacaagcatgtcatggtgcgggtgggaggaggatgggagacattcgcaggttatctgcttaagcacgatccttgcagaatgcttcagatctcacgggtggacgggaagacaagcccgattcagtctaagtcgcctaccttaaaagacatgaacccagataactatctcgtggtctctgcctcatacaaagctaagaaagagatcaagtag

SEQ ID NO: 55415 - DNA, 942 bp, Artificial Sequence
  derived and/or modified sequence
atgtgcaccgccctgagccccaaggtgagaagcggccccggcctgagcgacatgcaccagtacagccagtggctggccagcagacacgaggccaacctgctgcccatgaaggaggacctggccctgtggctgaccaacctgctgggcaaggagatcaccgccgagaccttcatggagaagctggacaacggcgccctgctgtgccagctggccgagaccatgcaggagaagttcaaggagagcatggacgccaacaagcccaccaagaacctgcccctgaagaagatcccctgcaagaccagcgcccccagcggcagcttcttcgccagagacaacaccgccaacttcctgagctggtgcagagacctgggcgtggacgagacctgcctgttcgagagcgagggcctggtgctgcacaagcagcccagagaggtgtgcctgtgcctgctggagctgggcagaatcgccgccagatacggcgtggagccccccggcctgatcaagctggagaaggagatcgagcaggaggagaccctgagcgcccccagccccagccccagccccagcagcaagagcagcggcaagaagagcaccggcaacctgctggacgacgccgtgaagagaatcagcgaggaccccccctgcaagtgccccaacaagttctgcgtggagagactgagccagggcagatacagagtgggcgagaagatcctgttcatcagaatgctgcacaacaagcacgtgatggtgagagtgggcggcggctgggagaccttcgccggctacctgctgaagcacgacccctgcagaatgctgcagatcagcagagtggacggcaagaccagccccatccagagcaagagccccaccctgaaggacatgaaccccgacaactacctggtggtgagcgccagctacaaggccaagaaggagatcaagtag

SEQ ID NO: 55416 - protein, 168 aa, Artificial Sequence
  derived and/or modified sequence
MHPSLATMGKLASKLQLDLSVVKIWFKNQRAKWKRQQRQQMQTRPSLGPANQTTSVKKEETPSAITTANIRPVSPGISDANDHDLREPSGIKNPGGASASARVSSWDSQSYDIEQICLGASNPPWASTLFEIDEFVKIYDLPGEDDTSSLNQYLFPVCLEYDQLQSSV

SEQ ID NO: 55417 - protein, 182 aa, Artificial Sequence
  derived and/or modified sequence
  misc_feature (1)..(1): Xaa can be any naturally occurring amino acid
XAHGFQPHASVEPACQAGTWNLKQLSQEGPRRYRRPRTRFLSKQLTALRELLEKTMHPSLATMGKLASKLQLDLSVVKIWFKNQRAKWKRQQRQQMQTRPSLGPANQTTSVKKEETPSAITTANIRPVSPGISDANDHDLREPSGIKNPGGASASARVSSWDSQSYDIEQICLGASNPPWAS

SEQ ID NO: 55418 - DNA, 507 bp, Artificial Sequence
  derived and/or modified sequence
atgcaccccagcctggccaccatgggcaagctggccagcaagctgcagctggacctgagcgtggtgaagatctggttcaagaaccagagagccaagtggaagagacagcagagacagcagatgcagaccagacccagcctgggccccgccaaccagaccaccagcgtgaagaaggaggagacccccagcgccatcaccaccgccaacatcagacccgtgagccccggcatcagcgacgccaacgaccacgacctgagagagcccagcggcatcaagaaccccggcggcgccagcgccagcgccagagtgagcagctgggacagccagagctacgacatcgagcagatctgcctgggcgccagcaaccccccctgggccagcaccctgttcgagatcgacgagttcgtgaagatctacgacctgcccggcgaggacgacaccagcagcctgaaccagtacctgttccccgtgtgcctggagtacgaccagctgcagagcagcgtgtag

SEQ ID NO: 55419 - DNA, 549 bp, Artificial Sequence
  derived and/or modified sequence
tgagcccacggcttccagccccacgccagcgtggagcccgcctgccaggccggcacctggaacctgaagcagctgagccaggagggccccagaagatacagaagacccagaaccagattcctgagcaagcagctgaccgccctgagagagctgctggagaagaccatgcaccccagcctggccaccatgggcaagctggccagcaagctgcagctggacctgagcgtggtgaagatctggttcaagaaccagagagccaagtggaagagacagcagagacagcagatgcagaccagacccagcctgggccccgccaaccagaccaccagcgtgaagaaggaggagacccccagcgccatcaccaccgccaacatcagacccgtgagccccggcatcagcgacgccaacgaccacgacctgagagagcccagcggcatcaagaaccccggcggcgccagcgccagcgccagagtgagcagctgggacagccagagctacgacatcgagcagatctgcctgggcgccagcaaccccccctgggccagctag

SEQ ID NO: 55420 - DNA, 507 bp, Artificial Sequence
  derived and/or modified sequence
atgcacccaagcttggctactatgggaaagctggcatctaagctacagcttgatctctccgttgtgaagatctggttcaagaatcagagggctaagtggaaacggcagcagcgccagcagatgcagacacggccgtcacttggaccagccaaccagacaacaagtgtgaagaaggaggaaactccatctgcaatcactaccgccaacattcgacctgtgtctccagggatatcggacgccaacgaccatgatctgcgcgagccgagcggcattaagaatccaggtggcgctagcgcatcggcccgagtgtcaagttgggactcccagagctatgatatcgagcagatctgtttgggcgcatctaacccaccctgggcctctacactgttcgaaatcgatgaattcgtgaaaatttacgatcttcctggcgaagacgacacgtcctctctcaaccaatacctgtttcccgtgtgcctcgagtacgaccagctccagtcgtctgtctag

SEQ ID NO: 55421 - DNA, 549 bp, Artificial Sequence
  derived and/or modified sequence
taggcccatggcttccagcctcacgcaagtgtcgaacccgcatgccaggccggcacatggaatttgaaacagctatctcaggaggggccacggaggtaccgccggccacgtacacgctttctcagcaaacagctcacggcccttcgcgaactgctggagaaaaccatgcacccaagcctagccacaatggggaaactggcatccaagctgcagctcgacctcagcgtagtgaagatttggtttaagaatcagagggccaaatggaaacgtcagcagagacagcagatgcagactagaccaagtctcggaccagcgaaccagacaacgagtgtcaaaaaagaggagaccccatccgcaataacaacagctaacatccgacctgtgtccccaggcatcagcgacgccaacgaccacgatctgagagaaccttctggtatcaagaacccaggcggggctagcgcatctgctcgggtgtcctcttgggactcacagtcctacgacatagaacagatttgcctgggcgcatccaaccctccctgggcgtcttag

SEQ ID NO: 55422 - DNA, 507 bp, Artificial Sequence
  derived and/or modified sequence
atgcaccccagcctggccaccatgggcaagctggccagcaagctgcagctggacctgtctgtggtgaagatctggttcaagaaccagagggccaagtggaagaggcagcagaggcagcagatgcagacccggcccagcctgggccctgccaaccagaccacctctgtgaagaaggaggagaccccatctgccatcaccacagccaacatccggcctgtgtccccaggcatcagtgatgccaatgaccatgacctgcgggagcccagcggcatcaagaaccctgggggcgccagcgccagcgcccgggtgtcctcctgggacagccagagctatgacatcgagcagatctgcctgggcgccagcaaccccccctgggccagcaccctgtttgaaattgatgaatttgtgaagatctatgacctgcccggggaggatgacaccagcagcctgaaccagtacctgtttcctgtgtgcctggagtatgaccagctgcagagctctgtgtag

SEQ ID NO: 55423 - DNA, 549 bp, Artificial Sequence
  derived and/or modified sequence
tgagcccacggcttccagccccacgcctctgtggagcccgcctgccaggccggcacctggaacctgaagcagctgagccaggagggcccccggcgctaccgccggcccaggacccgcttcctgagcaagcagctgacagccctgcgggagctgctggagaagaccatgcaccccagcctggccaccatgggcaagctggccagcaagctgcagctggacctgtctgtggtgaagatctggttcaagaaccagagggccaagtggaagaggcagcagaggcagcagatgcagacccggcccagcctgggccctgccaaccagaccacctctgtgaagaaggaggagacccccagcgccatcaccacagccaacatccggcctgtgtccccaggcatcagtgatgccaatgaccatgacctgcgggagcccagcggcatcaagaaccctggaggagccagcgccagcgcccgggtgtcctcctgggacagccagagctatgacatcgagcagatctgcctgggcgccagcaaccccccctgggccagctag

SEQ ID NO: 55424 - DNA, 672 bp, Artificial Sequence
  derived and/or modified sequence
actgcacacggttttcagcctcatgcctccgtggaacctgcctgtcaggcgggcacctggaatctcaagcaactttctcaagaagggccaaggcgttatcgtcggccacgcacaagatttctctccaaacaactcacagcattgagagaattgcttgaaaagaccatgcacccaagtttggctacaatggggaaactggcttcaaagctacaacttgatctatccgtagtaaagatctggttcaagaaccagcgtgccaaatggaagaggcagcagcggcagcaaatgcagacacggccatcactagggccagcaaaccagacaacttcagtgaagaaggaggagactccctcagccataactactgcaaacattcgtccagtaagtcctggaatctctgatgcaaatgaccatgatctacgtgagccttctggtatcaagaatcctggaggagccagcgcctctgcgagggtttcatcctgggattctcagtcatatgacattgaacagatatgtctgggggcttcaaatcctccttgggcctccactctctttgaaatagatgaatttgtaaagatctatgacttgccaggggaagatgacaccagcagcctaaatcaatatctttttccagtatgccttgagtatgaccagctccaatcttcagtgtaa

SEQ ID NO: 55425 - DNA, 544 bp, Artificial Sequence
  derived and/or modified sequence
ctgcacacggttttcagcctcatgcctccgtggaacctgcctgtcaggcgggcacctggaatctcaagcaactttctcaagaagggccaaggcgttatcgtcggccacgcacaagatttctctccaaacaactcacagcattgagagaattgcttgaaaagaccatgcacccaagtttggctacaatggggaaactggcttcaaagctacaacttgatctatccgtagtaaagatctggttcaagaaccagcgtgccaaatggaagaggcagcagcggcagcaaatgcagacacggccatcactagggccagcaaaccagacaacttcagtgaagaaggaggagactccctcagccataactactgcaaacattcgtccagtaagtcctggaatctctgatgcaaatgaccatgatctacgtgagccttctggtatcaagaatcctggaggagccagcgcctctgcgagggtttcatcctgggattctcagtcatatgacattgaacagatatgtctgggggcttcaaatcctccttgggcctc

SEQ ID NO: 55426 - DNA, 507 bp, Artificial Sequence
  derived and/or modified sequence
atgcaccccagcctggccaccatgggcaagctggccagcaagctgcaattggatcttagcgtcgtgaaaatctggtttaagaaccagagagccaaatggaaaaggcagcagcgacagcaaatgcagacccgtccatctctaggtcctgccaatcagaccacttccgtaaaaaaagaagagaccccatcagccataacaaccgccaacattagaccagtttccccaggaatctcggacgctaacgatcacgatcttcgcgagcctagtgggattaagaatcccgggggagccagcgcttcagcccgggtgtctagctgggactcacagagctacgatatcgagcagatctgccttggcgcgtctaacccaccttgggcgagtacactgtttgaaatcgatgagttcgtcaaaatctatgacctccccggggaggacgacacatctagtctcaatcagtatctctttccagtatgcctggaatacgatcagttgcagtccagcgtctag

SEQ ID NO: 55427 - DNA, 549 bp, Artificial Sequence
  derived and/or modified sequence
tgagcccacggcttccagccccacgccagcgtggagcccgcctgccaagctggcacctggaacctcaaacagctgtcgcaggaagggccacggcgataccgaaggcccagaactaggtttttgagcaagcagctgactgctctgcgtgaacttctggaaaagactatgcacccctccctcgccaccatgggcaaactcgcctcaaaattgcagctcgacctctccgtggtgaaaatatggtttaaaaaccagagagccaagtggaagagacaacagaggcagcagatgcagactaggcctagtctggggcctgccaaccagaccacctccgtgaagaaagaggagaccccaagtgccatcacaaccgccaacatcagacctgtgtcaccagggatttccgatgcaaacgaccacgacttgagagagcctagcgggataaaaaatccaggcggagcctccgcttcggctagagtcagtagctgggactcccagtcatacgacatcgaacagatttgcctgggcgcgtccaaccccccttgggccagttag

SEQ ID NO: 55428 - DNA, 507 bp, Artificial Sequence
  derived and/or modified sequence
atgcaccccagtttggccacaatgggcaaactggcctctaaacttcagctggacctgtccgtggtgaaaatctggtttaaaaatcagcgcgctaaatggaaaaggcaacagcgacaacaaatgcagactcgcccttctcttggcccagccaatcagacaacttctgttaaaaaggaggagaccccttctgcaataacaactgccaacattcgaccagtcagtcccggaatctccgatgctaatgaccatgacctgcgggaaccctctgggattaaaaaccccggtggtgccagtgcctcagcacgggtttctagctgggatagtcaatcttacgacatcgagcaaatttgcctgggcgcaagtaatccaccctgggctagcacactgttcgagattgacgagtttgtgaaaatctacgatcttccaggtgaagacgacacgagctctctgaaccagtatttgttccccgtgtgccttgagtacgatcagcttcaatcatcggtgtag

SEQ ID NO: 55429 - DNA, 549 bp, Artificial Sequence
  derived and/or modified sequence
tgagcacacgggttccagccccatgctagcgtggaacccgcatgccaagcaggaacctggaacctcaagcagctgtctcaggaaggccctagacgttacagacgccctcgtactcgtttcttaagcaagcagctaacagctttgagggagctgctggagaagaccatgcatccatcccttgctactatggggaaactcgcaagtaagctacagctcgacctttcggtagttaaaatctggtttaaaaatcaaagggcaaaatggaaaaggcagcagaggcagcagatgcagacccggccatctctgggcccagccaatcagaccacctcggtgaagaaagaggagacaccaagcgctataacaaccgccaacattagacccgtgtcgcccggaatttcagatgccaatgaccatgatctcagagaacccagcggaatcaagaatcctggaggcgcaagcgcctccgctagagtgtcttcatgggattcccaatcatacgatatcgagcagatctgtctgggagccagcaacccaccatgggccagctag

SEQ ID NO: 55430 - protein, 1299 aa, Artificial Sequence [sequence omitted]

SEQ ID NO: 55431 - protein, 538 aa, Artificial Sequence
  derived and/or modified sequence
MAVSWRSWLANEGVKHLCLFIWLSMNVLLFWKTFLLYNQGPEYHYLHQMLGLGLCLSRASASVLNLNCSLILLPMCRTLLAYLRGSQKVPSRRTRRLLDKSRTFHITCGVTICIFSGVHVAAHLVNALNFSVNYSEDFVELNAARYRDEDPRKLLFTTVPGLTGVCMVVVLFLMITASTYAIRVSNYDIFWYTHNLFFVFYMLLTLHVSGGLLKYQTNLDTHPPGCISLNRTSSQNISLPEYFSEHFHEPFPEGFSKPAEFTQHKFVKICMEEPRFQANFPQTWLWISGPLCLYCAERLYRYIRSNKPVTIISVMSHPSDVMEIRMVKENFKARPGQYITLHCPSVSALENHPFTLTMCPTETKATFGVHLKIVGDWTERFRDLLLPPSSQDSEILPFIQSRNYPKDDWKPYKLRRLYFIWVCRDIQSFRWFADLLCMLHNKFWQENRPDYVNIQLYLSQTDGIQKIIGEKYHALNSRLFIGRPRWKLLFDEIAKYNRGKTVGVFCCGPNSLSKTLHKLSNQNNSYGTRFEYNKESFS

SEQ ID NO: 55432 - DNA, 165 bp, Artificial Sequence
  derived and/or modified sequence
atggccgtatcctggcgctcctggctcgcaaatgaaggcgtgaagcatttatgtctttttatttggctaagtatgaatgtgttgttgttttggaagacctttttgctctataaccaggggccagagtaccattacttgcatcaaatgctgggggaactcagctag

SEQ ID NO: 55433 - DNA, 1617 bp, Artificial Sequence
  derived and/or modified sequence
atggccgtgagctggagaagttggctcgcgaacgagggcgtgaagcacctgtgcctctttatttggctgtccatgaatgtacttctcttctggaagacctttctgctttacaatcagggcccggagtatcactatctacatcagatgctgggcctgggtctgtgtttatctagggcaagcgcgagtgtcctgaaccttaactgttccttgattttgctaccaatgtgccgtacactgctggcctacctgagaggtagtcagaaggtgcctagtcggcggacccggaggctcctggataagtccagaacctttcatattacgtgtggcgtaaccatttgcatcttctctggcgtgcatgtcgccgcacatctcgtcaacgctctgaatttttccgtcaactactccgaggactttgttgaactaaatgccgcccgataccgggatgaggacccacgtaaactgttattcactaccgtgccaggcttaacgggagtatgcatggtcgttgtgctattcctgatgattactgcgtccacatacgccataagggtgagcaactacgacatcttttggtatacacataacctgttctttgttttctatatgctccttactctacacgtgtctgggggcctgttgaaatatcaaaccaatcttgacacacatcctcccggatgcatctcattaaatcggaccagctctcaaaatatttcactgcctgaatatttttcagagcattttcatgagccattcccggaaggtttcagcaagcccgccgagtttacacagcacaagttcgtgaaaatctgcatggaagagcctcgattccaggctaactttccgcagacgtggctctggatctctggaccactttgcctctattgtgctgagagactgtacagatacattagatctaataagcctgtcacaattatctccgtcatgtcacatccttcagatgtgatggagattaggatggtgaaagaaaactttaaagcccgccctggtcaatacatcacgttacactgtccatcggtatcagccctagaaaaccaccccttcaccctcacaatgtgccccaccgaaacgaaagctacatttggagtccacctcaaaatcgtcggcgactggactgagaggtttcgcgaccttctgctgccccccagctctcaggactctgagattttacctttcatacagagccgcaattatccaaaagacgattggaagccctacaagctgagacggctctacttcatttgggtgtgtagggacatccagagcttcagatggtttgcggacctgctgtgtatgctgcacaacaaattttggcaagagaatcgcccggactatgtgaacatccagctttatctatctcagaccgatggaattcagaaaatcattggcgagaaataccatgcgctgaacagtaggctttttatcggccgtcctaggtggaagctactgtttgatgagatcgccaagtataatagaggaaaaacagtcggagtgttctgttgcggtcccaacagcttgtctaagactctgcacaagctcagcaaccaaaacaactcctatgggacaaggtttgagtataacaaggaaagctttagttag

SEQ ID NO: 55434 - DNA, 165 bp, Artificial Sequence
  derived and/or modified sequence
atggctgtgtcctggaggtcctggctggccaatgaaggagtgaagcacctgtgcctcttcatctggctgtccatgaatgtgctgctcttctggaagaccttcctgctgtacaaccagggccctgagtaccactacctgcaccagatgctgggggagctgtcctag

SEQ ID NO: 55435 - DNA, 1617 bp, Artificial Sequence
  derived and/or modified sequence
atggctgtgtcctggaggtcctggctggccaatgaaggagtgaagcacctgtgcctcttcatctggctgtccatgaatgtgctgctcttctggaagaccttcctgctgtacaaccagggccctgagtaccactacctgcaccagatgctgggcctgggcctgtgcctgagccgggccagcgcctctgtgctgaacctgaactgcagcctcatcctgctgcccatgtgcaggaccctgctggcctacctgcggggcagccagaaggtgcccagcaggaggacccggcggctgctggacaagagcaggaccttccacatcacctgtggggtgaccatctgcatcttcagcggcgtgcacgtggccgcccacctggtgaatgccctgaacttctctgtgaactacagcgaggactttgtggagctgaatgctgcccgctacagagatgaggaccccaggaagctgctcttcaccaccgtgcccggcctgactggagtgtgcatggtggtggtgctcttcctgatgatcacagccagcacctacgccatccgggtgagcaactatgacatcttctggtacacccacaacctcttctttgtgttctacatgctgctgaccctgcacgtgtctgggggcctgctgaagtaccagaccaacctggacacccaccccccaggctgcatcagcctgaacagaaccagcagccagaacatcagcctgcctgagtacttcagcgagcacttccacgagcccttccctgagggcttcagcaagccagctgagttcacccagcacaagtttgtgaagatctgcatggaggagccccgcttccaggccaacttcccccagacctggctgtggatcagcggccccctgtgcctgtactgtgccgagcggctgtaccgctacatccgcagcaacaagcctgtgaccatcatctctgtgatgagccaccccagtgatgtgatggagatccgcatggtgaaggagaacttcaaggcccggcccggccagtacatcaccctgcactgccccagcgtgtctgccctggagaaccaccccttcaccctgaccatgtgccccacagagaccaaggccacctttggagtgcacctgaagatcgtgggggactggacagagcgcttccgggacctgctgctgccccccagcagccaggacagcgagatcctgcccttcatccagagcaggaactaccccaaggatgactggaagccctacaagctgcggcggctgtacttcatctgggtgtgccgggacatccagagcttccgctggtttgctgacctgctgtgcatgctgcacaacaagttctggcaggagaacagaccagactatgtgaacatccagctgtacctgagccagacagatggcatccagaagatcatcggggagaagtaccacgccctgaacagccgcctcttcatcggccggccccgctggaagctgctgtttgatgaaattgccaagtacaacagaggcaagacagtgggcgtcttctgctgcggccccaacagcctgagcaagaccctgcacaagctgagcaaccagaacaacagctatggcaccaggtttgagtacaacaaggagagcttctcctag

SEQ ID NO: 55436 - DNA, 560 bp, Artificial Sequence
  derived and/or modified sequence
cctagacaaaggggccggcgcggcggagcagactggtgcagcctgggccgcgcgctcagagcgctgggcgtctgggcagctgagtgggcagagctgacccggtgcgggtgggagtcagggcgcccggaaaacccggctctgggtagcagaccccgcccgggctggctcggcgccgggccttcgggcttccactcagtctttgaccctcggtcctcgctcagcggcccggcaggccgcacaactgtaaccgctgccccggccgccgcccgctccttctcggtccggcgggcacagagcgcagcgcggcggggccggcggcatggctgtgtcctggaggagctggctcgccaacgaaggggttaaacacctctgcctgttcatctggctctccatgaatgtcctgcttttctggaaaaccttcttgctgtataaccaagggccagagtatcactacctccaccagatgttgggggaactgtcttgaaacctatacatttcagatgggcacccagagagtaagacctcacctcgcccctcaagttgcttacaatataatggaa

SEQ ID NO: 55437 - DNA, 2156 bp, Artificial Sequence
  derived and/or modified sequence
acaactgtaaccgctgccccggccgccgcccgctccttctcggtccggcgggcacagagcgcagcgcggcggggccggcggcatggctgtgtcctggaggagctggctcgccaacgaaggggttaaacacctctgcctgttcatctggctctccatgaatgtcctgcttttctggaaaaccttcttgctgtataaccaagggccagagtatcactacctccaccagatgttggggctaggattgtgtctaagcagagcctcagcatctgttcttaacctcaactgcagccttatccttttacccatgtgccgaacactcttggcttacctccgaggatcacagaaggttccaagcaggagaaccaggagattgttggataaaagcagaacattccatattacctgtggtgttactatctgtattttctcaggcgtgcatgtggctgcccatctggtgaatgccctcaacttctcagtgaattacagtgaagactttgttgaactgaatgcagcaagataccgagatgaggatcctagaaaacttctcttcacaactgttcctggcctgacaggggtctgcatggtggtggtgctattcctcatgatcacagcctctacatatgcaataagagtttctaactatgatatcttctggtatactcataacctcttctttgtcttctacatgctgctgacgttgcatgtttcaggagggctgctgaagtatcaaactaatttagatacccaccctcccggctgcatcagtcttaaccgaaccagctctcagaatatttccttaccagagtatttctcagaacattttcatgaacctttccctgaaggattttcaaaaccggcagagtttacccagcacaaatttgtgaagatttgtatggaagagcccagattccaagctaattttccacagacttggctttggatttctggacctttgtgcctgtactgtgccgaaagactttacaggtatatccggagcaataagccagtcaccatcatttcggtcatgagtcatccctcagatgtcatggaaatccgaatggtcaaagaaaattttaaagcaagacctggtcagtatattactctacattgtcccagtgtatctgcattagaaaatcatccatttaccctcacaatgtgtccaactgaaaccaaagcaacatttggggttcatcttaaaatagtaggagactggacagaacgatttcgagatttactactgcctccatctagtcaagactccgaaattctgcccttcattcaatctagaaattatcccaaggatgactggaaaccatacaagcttagaagactatactttatttgggtatgcagagatatccagtccttccgttggtttgcagatttactctgtatgttgcataacaagttttggcaagagaacagacctgactatgtcaacatccagctgtacctcagtcaaacagatgggatacagaagataattggagaaaaatatcatgcactgaattcaagactgtttataggacgtcctcggtggaaacttttgtttgatgaaatagcaaaatataacagaggaaaaacagttggtgttttctgttgtggacccaattcactatccaagactcttcataaactgagtaaccagaacaactcatatgggacaagatttgaatacaataaagagtctttcagctgaaaacttttgccatgaagcaggactctaaagaaggaatgagtgcaatttctaagactttgaaactcagcggaatcaatcagctgtgttatgccaaagaatagtaaggttttcttatttatgattatttaaaatggaaatgtgagaatgtggcaagatgaccgtcacattacatgtttaatctggaaaccaaagagaccctgaagaatatttgatgtgatgattcacttttcagttctcaaattaaaagaaaactgttagatgcacactgttgattttcatggtggattcaagaactccctagtgaggagctgaacttgctcaatctaaggctgattgtcgtgttcctctttaaattgtttttggttgaacaaatgcaagattgaacaaaattaaaaattcattgaagctgaaattccattttctgtgttgtgtataaacagagtagctttaatttgca

SEQ ID NO: 55438 - DNA, 165 bp, Artificial Sequence
  derived and/or modified sequence
atggccgtgagctggcggagctggctggccaacgagggcgtgaagcatctgtgtctgtttatctggctctccatgaatgttttactcttttggaagacttttttactgtacaaccaaggcccggaatatcattacctccatcaaatgctgggcgagctgagctag

SEQ ID NO: 55439 - DNA, 1617 bp, Artificial Sequence
  derived and/or modified sequence
atggccgtgagctggcggagctggctggccaacgagggcgtgaagcatctgtgtctgttcatttggctttcaatgaacgtcctcctgttctggaaaacatttctgttgtataatcaaggcccggagtaccattatctacaccaaatgcttggcttgggcctttgtctgtcaagagcctctgcatcggtactgaaccttaattgctctcttatcctgctccctatgtgcagaaccctgctagcttacctacggggctctcagaaggtacccagtagacgaacacggcgcctattggacaagagtcgtaccttccacatcacttgcggcgtgactatctgtattttttccggtgtgcacgtggcggcccacttggtgaatgcccttaatttctccgtaaattattcggaagatttcgtagaattaaatgctgccagatacagggatgaagatcctcggaaactgttgttcaccaccgtgcccggactgaccggcgtgtgcatggtcgtggtgctgttcctcatgatcacagcttcaacatatgcaattcgtgtgagcaattacgacatcttctggtacacgcacaacctgttctttgttttttacatgctgttgaccttgcacgtcagcgggggcctcctcaagtatcagactaacctggatacccacccgccgggatgtattagcctcaaccgcacctctagccaaaatatctctctccccgagtatttctcagagcactttcatgagccatttccagagggatttagcaagcccgcagaattcacgcagcataaattcgtgaagatctgtatggaagaacccagatttcaggccaacttcccacagacttggctgtggatatccgggccattgtgcctgtattgcgctgagaggctctacagatatatccggagcaataagccagtgactattatcagcgtgatgagtcacccttccgacgtaatggagataagaatggttaaagagaacttcaaggcccgtcccggtcagtatattaccttacattgccctagtgtgtcagcccttgaaaaccatccattcactttaactatgtgccctacagagaccaaggccacttttggcgtgcacctgaagattgtgggtgattggaccgagaggtttcgagacctgctcctgcctcccagctctcaagacagtgaaatcctaccattcatccagagtcggaattacccaaaagacgattggaaaccttacaaattgcgccgactgtatttcatttgggtgtgtagagacatccagtctttcagatggttcgcagacctgctctgcatgctccataacaaattctggcaggaaaataggcccgactacgtgaacattcagctttacctgtctcagaccgatggcatccagaagataatcggggagaaatatcatgctctgaatagtagactgttcatagggcggcccagatggaagttgctttttgacgagatagcaaagtacaataggggtaagacggttggtgtcttctgttgcggccccaattccctttctaagacactacacaagctgagtaatcagaataattcctatggcacgcggttcgagtacaataaggaaagcttctcttag

SEQ ID NO: 55440 - DNA, 165 bp, Artificial Sequence
  derived and/or modified sequence
atggcagtgagttggcggagctggcttgccaatgaaggcgtcaaacatttgtgcctcttcatttggctaagtatgaatgtcttgctgttctggaagacctttttactgtacaaccaggggcctgagtatcattatctgcatcagatgcttggagaactcagctag

SEQ ID NO: 55441 - DNA, 1617 bp, Artificial Sequence
  derived and/or modified sequence
atggctgtgagctggaggtcgtggctggctaacgagggggtgaaacatctgtgtctctttatttggctgtctatgaacgtccttctgttctggaaaacgtttctgctctataaccaagggcctgaatatcactacctgcaccaaatgttgggtctgggactctgtctgtctcgggcaagcgcctctgtgttgaaccttaattgtagcctcatcctgctcccaatgtgtcgaacgcttctcgcctatcttaggggcagtcaaaaggtcccttcccgcaggaccaggagacttttggacaaatccaggacttttcatatcacttgcggggtgacgatatgcattttttcgggcgttcatgttgcggctcacctggtaaatgccttaaatttcagtgtgaactactccgaggactttgttgagctgaatgccgcacggtaccgtgacgaggatcctaggaaattgctgttcacaaccgtacccggtctgacaggagtgtgtatggtcgtggtgttattcctcatgattacagcatccacctacgcaatccgcgtatctaattacgatattttttggtacactcacaacctgttttttgttttttacatgttattaacacttcacgtgagcggcggtttgctaaaataccagaccaatctcgatacccacccgccaggatgcatttctctcaacagaacttccagccaaaacatctcactgcccgagtacttttcagagcacttccacgagcccttcccagagggtttttctaagcctgccgaatttactcagcacaagtttgtcaagatatgtatggaggagcctcgattccaggccaattttcctcaaacctggttatggatcagcggtcctttgtgcttatactgtgctgaaagactgtatcggtacatccggagcaataagcctgtgactattattagtgtgatgagccatccgtccgatgtaatggagattcgtatggtgaaggagaacttcaaggctaggcctggccagtacatcacgttgcactgtccaagcgtctcagcacttgagaaccatccatttactctgaccatgtgcccaaccgaaacgaaagccaccttcggagtgcatctgaaaatcgtgggcgattggacagagcgattccgcgacctccttctacctccctcctcgcaggatagcgagattcttcccttcattcagtcaagaaactatcctaaggacgactggaaaccttacaagcttcggagattatactttatttgggtgtgccgtgacatacagagcttcagatggttcgccgatctgttgtgcatgttacacaacaaattctggcaggagaacaggcccgactatgtgaacatccagctgtacctttcacagactgatggcatccagaagattatcggagagaagtatcacgccttgaattccagactctttatcggtcggccacggtggaagctgctgttcgacgaaatcgccaaatacaatcgtgggaaaaccgtgggggttttttgctgtggccctaattctttaagcaaaaccctacacaaacttagtaaccagaataatagctatggcactcgctttgagtataacaaagaatccttctcgtag

SEQ ID NO: 55442 - DNA, 165 bp, Artificial Sequence
  derived and/or modified sequence
atggccgtgagctggagaagctggctggccaacgagggcgtgaagcacctgtgcctgttcatctggctgagcatgaacgtgctgctgttctggaagaccttcctgctgtacaaccagggccccgagtaccactacctgcaccagatgctgggcgagctgagctag

SEQ ID NO: 55443 - DNA, 1617 bp, Artificial Sequence
  derived and/or modified sequence
atggccgtgagctggagaagctggctggccaacgagggcgtgaagcacctgtgcctgttcatctggctgagcatgaacgtgctgctgttctggaagaccttcctgctgtacaaccagggccccgagtaccactacctgcaccagatgctgggcctgggcctgtgcctgagcagagccagcgccagcgtgctgaacctgaactgcagcctgatcctgctgcccatgtgcagaaccctgctggcctacctgagaggcagccagaaggtgcccagcagaagaaccagaagactgctggacaagagcagaaccttccacatcacctgcggcgtgaccatctgcatcttcagcggcgtgcacgtggccgcccacctggtgaacgccctgaacttcagcgtgaactacagcgaggacttcgtggagctgaacgccgccagatacagagacgaggaccccagaaagctgctgttcaccaccgtgcccggcctgaccggcgtgtgcatggtggtggtgctgttcctgatgatcaccgccagcacctacgccatcagagtgagcaactacgacatcttctggtacacccacaacctgttcttcgtgttctacatgctgctgaccctgcacgtgagcggcggcctgctgaagtaccagaccaacctggacacccacccccccggctgcatcagcctgaacagaaccagcagccagaacatcagcctgcccgagtacttcagcgagcacttccacgagcccttccccgagggcttcagcaagcccgccgagttcacccagcacaagttcgtgaagatctgcatggaggagcccagattccaggccaacttcccccagacctggctgtggatcagcggccccctgtgcctgtactgcgccgagagactgtacagatacatcagaagcaacaagcccgtgaccatcatcagcgtgatgagccaccccagcgacgtgatggagatcagaatggtgaaggagaacttcaaggccagacccggccagtacatcaccctgcactgccccagcgtgagcgccctggagaaccaccccttcaccctgaccatgtgccccaccgagaccaaggccaccttcggcgtgcacctgaagatcgtgggcgactggaccgagagattcagagacctgctgctgccccccagcagccaggacagcgagatcctgcccttcatccagagcagaaactaccccaaggacgactggaagccctacaagctgagaagactgtacttcatctgggtgtgcagagacatccagagcttcagatggttcgccgacctgctgtgcatgctgcacaacaagttctggcaggagaacagacccgactacgtgaacatccagctgtacctgagccagaccgacggcatccagaagatcatcggcgagaagtaccacgccctgaacagcagactgttcatcggcagacccagatggaagctgctgttcgacgagatcgccaagtacaacagaggcaagaccgtgggcgtgttctgctgcggccccaacagcctgagcaagaccctgcacaagctgagcaaccagaacaacagctacggcaccagattcgagtacaacaaggagagcttcagctag

SEQ ID NO: 55444 - protein, 522 aa, Artificial Sequence
  derived and/or modified sequence
MASALSYVSKFKSFVILFVTPLLLLPLVILMPAKFVRCAYVIILMAIYWCTEVIPLAVTSLMPVLLFPLFQILDSRQVCVQYMKDTNMLFLGGLIVAVAVERWNLHKRIALRTLLWVGAKPARLMLGFMGVTALLSMWISNTATTAMMVPIVEAILQQMEATSAATEAGLELVDKGKAKELPGSQVIFEGPTLGQQEDQERKRLCKAMTLCICYAASIGGTATLTGTGPNVVLLGQMNELFPDSKDLVNFASWFAFAFPNMLVMLLFAWLWLQFVYMRFNFKKSWGCGLESKKNEKAALKVLQEEYRKLGPLSFAEINVLICFFLLVILWFSRDPGFMPGWLTVAWVEGETKYVSDATVAIFVATLLFIVPSQKPKFNFRSQTEEERKTPFYPPPLLDWKVTQEKVPWGIVLLLGGGFALAKGSEASGLSVWMGKQMEPLHAVPPAAITLILSLLVAVFTECTSNVATTTLFLPIFASMVKTGVIMNIIGVFCVFLAVNTWGRAIFDLDHFPDWANVTHIET

SEQ ID NO: 55445 - DNA, 1569 bp, Artificial Sequence
  derived and/or modified sequence
atggcctccgctcttagttacgtatccaaatttaagtcatttgtgattttatttgtaacgccattgttgctgctgccactagtcattctgatgccggccaaattcgtcagatgtgcgtacgtcattattctaatggccatctattggtgcactgaggttattccattagccgttacttctctcatgcctgtgctgctgtttcccttattccagattttggatagtcgccaggtctgtgtacagtatatgaaggatacaaacatgctgtttctgggcggtcttatcgtcgcggtggcggtcgagcgctggaatctgcacaaacgaatagccctcaggaccttgctctgggtgggagccaagcccgctcgcctcatgctgggctttatgggagtgaccgccttgctgtccatgtggatctcaaacactgcaaccacagcaatgatggtacccatagtggaagccattcttcagcaaatggaggcaacatcagctgccacagaggccggactggaactggtggataaaggtaaagccaaagagctgcctggctcacaggttatttttgagggccccactctcgggcaacaggaggaccaggagcgcaaaagactgtgcaaagccatgacactctgtatttgctacgcagcttccatcggaggcactgctactttgaccggaacagggcccaatgtggtgctgcttgggcagatgaatgagttgtttccggactctaaggacctcgtcaatttcgcatcttggttcgccttcgcctttcctaacatgttagtgatgctgttgttcgcatggttatggctgcagttcgtttatatgcgtttcaactttaaaaagagctggggctgcggcttggagagtaagaagaatgagaaggcggcactcaaagtcctgcaggaggaataccggaagctgggcccactcagctttgccgagattaatgtgctgatctgcttcttcctgcttgttatcctttggttttcacgcgatcctgggtttatgccaggctggctgacagttgcgtgggtcgaaggggaaacgaagtacgttagcgatgccaccgtcgccatcttcgtcgccacactccttttcatcgtaccttcccaaaagcctaaatttaactttcggagccagaccgaggaggagcgcaagactccattctatccaccacctttactggactggaaagtgacacaagaaaaagttccttggggaatagtgttgcttctggggggcggatttgccctggccaaggggtcagaggcgagcgggctctctgtatggatggggaaacagatggagccactccacgccgttccaccagcagcaatcactctgattttatcacttcttgtggcggtctttacagaatgtacgagtaacgtcgcaacaaccacgttgttcttgcctatttttgcatccatggtaaagaccggagtgattatgaatataatcggcgtgttctgcgtgttcctggctgttaatacatggggcagggccattttcgacctggaccattttcctgattgggccaacgtaacccacatcgagacctag

SEQ ID NO: 55446 - DNA, 1569 bp, Artificial Sequence
  derived and/or modified sequence
atggccagcgctttgtcatatgtatcgaaattcaagagcttcgttattctgtttgtcactcctctcctgttgcttcctttggttatcttgatgcccgcaaagttcgtgagatgtgcatacgtgattatcttaatggccatctactggtgcactgaggtcatcccgctggccgtcacatccctcatgcccgtgttgttgttccccctgttccagatcttggatagtcgccaagtatgcgtgcagtatatgaaggacaccaatatgctatttctaggaggactgatcgtcgccgttgccgtagagcggtggaacctgcacaagcgcatagccctgagaaccctgttgtgggtgggggcaaagcctgctagactaatgctcggttttatgggcgtgacagctctgctctctatgtggatttctaatactgccacaactgcgatgatggtcccgattgtcgaagccatccttcagcagatggaggccacctccgcagccactgaagcggggctggagttagtggacaaaggtaaagcaaaagagctgccagggtcacaggtcatatttgaaggccccacactaggacagcaggaggatcaggaaagaaagcgcctctgcaaggcaatgaccctgtgcatttgctacgccgcctctattggcggaacagccaccctgacaggtacgggtccaaatgttgttttgttagggcagatgaatgagctgttccccgattcaaaggatcttgtgaattttgcaagctggttcgcctttgccttcccgaatatgctggtaatgctgctcttcgcctggctgtggttacagttcgtgtacatgcggttcaattttaagaaatcgtggggctgcgggctggagtcaaaaaagaacgagaaggctgcactcaaggtgctgcaagaggagtatcggaagctgggtccgctgtcatttgcagagatcaacgtgctgatctgcttcttcctcctcgttattctgtggttttccagagatcccgggtttatgcccgggtggctcacagtagcttgggtggaaggcgagaccaagtatgtaagcgatgccacagtcgcaatttttgtggccaccctgctttttatcgtgcccagccagaaacccaaatttaactttcggagccagactgaggaggagcggaaaacaccgttttaccctccccccctcttagactggaaggtgactcaggaaaaagtgccttggggtatcgttttgctcctgggtggcggcttcgctctggcaaaagggagcgaggctagtgggctatccgtttggatggggaaacagatggaacctttgcatgctgtgccaccagctgccattacactgatattgtctcttttagtggccgtttttaccgagtgtacttccaatgtggctacgaccacactgtttttaccaatcttcgcctccatggtgaagacaggggtgattatgaacatcatcggagtcttttgtgtgttcctcgctgtcaatacctggggccgagcaatcttcgatctagatcatttccccgactgggctaacgttacacatatagagacgtag

SEQ ID NO: 55447 - DNA, 1569 bp, Artificial Sequence
  derived and/or modified sequence
atggccagcgccctgtcctatgtgtccaagttcaagagctttgtgatcctgtttgtgacccccctgctgctgctgcccctggtgatcctgatgcctgccaagtttgtgcgctgtgcctacgtgatcatcctgatggccatctactggtgcacagaggtgatccccctggccgtgaccagcctgatgcctgtgctgctcttccccctcttccagatcctggacagccggcaggtgtgtgtgcagtacatgaaggacaccaacatgctgttcctgggcggcctgattgtggccgtggccgtggagcgctggaacctgcacaagagaattgccctgcggaccctgctgtgggtgggcgccaagccagcccggctgatgctgggcttcatgggcgtgacagccctgctgtccatgtggatcagcaacacagccaccacagccatgatggtgcccatcgtggaggccatcctgcagcagatggaggccaccagcgctgccacagaggccggcctggagctggtggacaagggcaaggccaaggagctgcccggcagccaggtgatctttgagggccccaccctgggccagcaggaggaccaggagaggaagaggctgtgcaaggccatgaccctgtgcatctgctatgctgccagcatcggcggcacagccaccctgactggaacaggccccaacgtggtgctgctgggccagatgaatgagctgttcccagacagcaaggacctggtgaactttgcctcctggtttgcctttgccttccccaacatgctggtgatgctgctgtttgcctggctgtggctgcagtttgtgtacatgaggttcaacttcaagaagtcctggggctgcggcctggagagcaagaagaatgagaaggccgccctgaaggtgctgcaggaggagtacaggaagctgggccccctgagctttgctgagatcaacgtgctgatctgcttcttcctgctggtgatcctgtggttcagccgggaccccggcttcatgcctggctggctgactgtggcctgggtggagggggagaccaagtatgtgtctgatgccaccgtggccatctttgtggccaccctgctcttcatcgtgcccagccagaagcccaagttcaacttccgcagccagacagaggaggagaggaagacccccttctaccccccacccctgctggactggaaggtgacccaggagaaggtgccctggggcatcgtgctgctgctgggcggcggctttgccctggccaagggcagcgaggccagcggcctgtctgtgtggatgggcaagcagatggagcccctgcatgctgtgcccccagctgccatcaccctcatcctgagcctgctggtggccgtgttcacagaatgtaccagcaatgtggccaccaccaccctcttcctgcccatctttgcctccatggtgaagacaggagtcatcatgaacatcattggagtcttctgtgtgttcctggccgtgaacacctggggccgggccatctttgacctggaccacttcccagactgggccaacgtgacccacatcgagacctag

SEQ ID NO: 55448 - DNA, 1569 bp, Artificial Sequence
  derived and/or modified sequence
atggccagcgccctgagctacgtgagcaagttcaagagcttcgtgattctgttcgtaacacctctccttcttttgccacttgtaatcctgatgcctgccaagtttgtgcggtgtgcctacgtgatcatcctcatggcgatctattggtgcactgaggttatcccactcgcagtcaccagcctcatgcctgtcctcctattcccactgtttcagattcttgatagtcgacaggtgtgcgtgcagtacatgaaggacactaacatgctgttcctcgggggcttgattgttgccgttgcggtagagcggtggaatctccacaagagaattgcactgaggactctgctgtgggtaggggccaaacccgctaggttaatgttagggtttatgggcgtcacagcactactctctatgtggatttctaacaccgctaccacagccatgatggttcctatagttgaagcaattctgcagcagatggaagccacctccgccgctactgaggccgggctcgaactggtagacaaggggaaggctaaagaactcccaggctcccaggtcatcttcgagggacctactctgggccagcaagaggaccaagagcgcaaacgcctctgcaaagctatgacactttgcatctgctatgccgcaagcattggcgggactgccacactgacaggtacaggaccaaacgttgtgctgctggggcagatgaatgaactcttccctgatagcaaagacctcgtaaacttcgcttcctggtttgcctttgcatttcccaacatgctcgtgatgctcctgtttgcctggctctggctacaatttgtgtacatgcgcttcaattttaaaaagtcctggggttgcggacttgagtcaaagaaaaatgagaaagccgctctaaaagtgttacaggaggaatatcggaagctggggccactttcctttgcagagattaacgtgctaatatgtttttttctgcttgtcatcctttggtttagtcgcgaccccggctttatgcccggatggttgacagtcgcttgggtcgagggagaaacgaagtacgtgtccgatgctacggtcgcaatcttcgtcgcaacattgctgtttatcgtcccttcacagaagcccaagttcaatttcaggagtcaaacagaggaagaaaggaaaacccctttttatccccccccactcctggattggaaagtgacacaggaaaaggtcccgtggggcattgtgcttctacttggaggcggctttgcgctggctaaggggtcggaggccagcggcctgtcagtgtggatgggcaaacaaatggaaccactgcatgcagttccccctgccgccatcacgctgatcttgagcctcctcgtggccgttttcacagaatgcacatccaacgtcgccacaacaacactgttcctccccattttcgctagcatggttaagactggcgtgatcatgaatataataggtgtattctgtgtgtttcttgctgtgaacacgtgggggcgagctatcttcgacttggatcatttcccagattgggcaaatgtaactcatattgaaacatag

SEQ ID NO: 55449 - DNA, 1569 bp, Artificial Sequence
  derived and/or modified sequence
atggccagcgccctgagctacgtgagcaagttcaagagcttcgtgatactattcgtgaccccactgctcctgctgcctttagtgatactgatgcccgctaagtttgttagatgcgcctatgttatcatcttgatggccatttattggtgcactgaggtcatacccctggcggtgacctctttgatgccggtgctgctcttccctctgttccagatactggatagccgccaagtgtgtgtgcaatacatgaaggacaccaatatgctctttctcggcggactgatcgtggcagtggcggtggagcggtggaacctgcacaagcggatagcgctgcgtaccttgttgtgggtgggagctaagccggctcgcctgatgttgggttttatgggcgttaccgccctcctgagcatgtggataagtaataccgccacaaccgccatgatggtgcccattgtggaggctatccttcaacaaatggaggcaacttctgctgcaaccgaggctggattggaactggtcgataaaggaaaagcaaaggaactgccagggtcccaggttatttttgagggacctacacttgggcagcaggaagaccaggaaaggaaaaggctgtgtaaagccatgacactgtgtatctgctatgctgcttctatcgggggaaccgctaccctcactggcaccggacccaacgtggtcctgcttgggcagatgaatgaactgttccccgactcaaaggacctagtgaatttcgcatcttggttcgcatttgccttccccaacatgctggttatgcttttgtttgcatggttatggctccagtttgtctatatgcggttcaattttaagaagtcgtggggctgcggcctggaaagtaaaaagaatgagaaggcagcccttaaagtcctgcaggaggagtaccggaaattaggtccccttagcttcgcagaaatcaacgttctgatctgtttcttcctgctggtcatcctctggttctcgcgggaccccggtttcatgccgggatggttgaccgtagcttgggtggagggagagactaaatatgtttctgacgccacagtggctatcttcgtcgctacgctactgtttatagtcccatcccagaagccgaagtttaacttccgaagccagaccgaagaggagcgtaagacccccttttatccaccccctctgctcgactggaaagttactcaggagaaggtcccatggggcatagtgctgttgctggggggcgggttcgcactcgctaaaggaagtgaagcatcggggctgtctgtatggatgggcaaacaaatggagccactccacgcggttccgcctgctgcgattactcttatcctcagtttactggtggccgttttcaccgagtgcacgagtaacgtcgctacaaccacactctttctacctatcttcgcttccatggtcaagacaggcgtgatcatgaatataatcggggtgttttgtgtgtttttagccgtgaatacctggggaagagctatctttgacttggaccacttcccagattgggcgaatgttacccacattgagacgtag

SEQ ID NO: 55450 - DNA, 1569 bp, Artificial Sequence
  derived and/or modified sequence
atggcctccgcactgagttacgtgtctaagtttaaaagctttgtgattctcttcgttacacctctcctcctgttgccactggtcatcttgatgcctgccaaattcgtgcgctgcgcgtatgtgattattttaatggctatttactggtgcactgaggtgattccacttgcagttaccagcctcatgccggtcttacttttccccttattccagattctcgattctcgacaagtttgcgtgcaatatatgaaagacactaatatgctgtttttagggggactgatcgtggctgtggccgtagagagatggaatctgcacaagcgtatcgccctgcgcaccctgttgtgggtgggtgctaagccagcccgtcttatgctgggatttatgggtgtcacagcccttctgtctatgtggatatcaaacactgccacgactgccatgatggttccaatcgtggaggctatcctgcagcagatggaggctaccagcgcagcaactgaagccggactggagcttgtcgataaaggtaaagccaaggagctccccggttcccaggtcatcttcgaaggaccaacgctgggccagcaggaagaccaggaacggaaaaggctgtgtaaggcgatgacactgtgcatttgctacgctgcatccattggcggaacagccaccctgacaggcacgggtcccaatgtggtgttgctggggcaaatgaacgaactgttccctgacagcaaagacttggtcaatttcgccagctggttcgcatttgcatttcccaacatgctggtaatgctcctgtttgcctggctgtggctgcagtttgtttacatgcggtttaacttcaaaaagtcctggggctgtggcctggaaagcaagaaaaacgaaaaggctgcgttaaaagtgctgcaagaggaataccgcaaattggggccactgtcctttgctgagattaacgttctgatctgtttttttttgctcgtgattctctggttttcaagagaccccggattcatgccgggttggctcacggtggcctgggtcgaaggagaaaccaaatacgtgagtgatgccacagtcgccatttttgtcgccactttgttatttattgtccctagccagaaacctaagtttaatttcagatcccaaacggaggaggagagaaagacacctttctaccccccaccactgctggattggaaagtgacacaggagaaagttccatggggcatcgtccttctgctgggcggaggctttgcactggccaagggctcagaagcgtctggactttcagtctggatggggaaacagatggaacctctgcacgctgtgccgcctgcggcaatcactcttattctatcactgctagtcgctgtgttcacagaatgtactagcaacgtcgcaacaacaacacttttcttgcccattttcgccagcatggtgaaaactggagttatcatgaacatcatcggcgtattttgcgtgtttttggctgtgaatacctggggccgtgccatcttcgatctggatcacttccctgactgggctaacgtcacacatatcgagacctag

SEQ ID NO: 55451 - DNA, 1569 bp, Artificial Sequence
  derived and/or modified sequence
atggcctccgcattgtcctatgtcagcaagttcaagtccttcgtcatcttattcgtcactcccctgctgttgctacccctggtcattttgatgcccgctaagttcgtccgttgtgcatacgtgatcattctgatggcaatctactggtgtacagaagtgattcccttagctgttacgtccctgatgcccgtccttctcttcccattatttcagatcctggatagccgccaggtctgtgttcagtacatgaaggacaccaacatgttgttccttggagggctgatcgtagccgtagctgtggagagatggaacctgcacaaaaggatcgccctgagaacactgctttgggtgggggctaaaccagcgagattgatgctcgggtttatgggggttacagcactgctgtcaatgtggatctcaaataccgcgaccactgcaatgatggtccccatcgttgaggctatcctccagcagatggaggcaacatcggccgcaaccgaagcagggctggagctggtggataaaggaaaagcaaaagagctgcccggatcgcaagtgatattcgagggacctactttaggtcaacaggaagaccaggagcgtaaacggctgtgcaaagctatgactttgtgtatctgttacgcagccagtattggcggtaccgcgaccctgaccgggaccggccctaatgtggttctgctgggccaaatgaacgaactattcccagattctaaggatcttgtgaactttgcttcgtggtttgccttcgccttcccaaatatgctcgtgatgcttttattcgcttggctatggttacagtttgtgtacatgcggtttaattttaagaaatcctggggctgcggtctggagtccaagaagaacgagaaggcagcacttaaggttctgcaggaagaatatagaaaactgggaccactgtccttcgccgagatcaacgtactgatctgttttttcctcctagttatcctgtggttctccagggacccaggattcatgcctggctggttaactgtcgcctgggtcgaaggcgaaacgaaatatgtctcagatgccaccgtagcaatctttgtggccaccctcctattcatagtaccatctcagaaaccgaaatttaatttcaggagccagacagaggaggagcggaagacacctttttatcctccccctctgctggactggaaagtcacgcaggagaaggtgccttgggggattgtgctgctccttggaggagggttcgctctcgcaaagggctctgaagcctccggcttgagtgtgtggatgggcaagcagatggaaccccttcatgccgtccctccagcagctatcacgcttatcctgagcctcctggtagctgtgttcacagagtgcaccagtaatgtggccactacaactttgtttctgcctattttcgcctcgatggttaaaactggggtcattatgaacatcatcggtgtgttttgtgtgtttctggcagtgaatacatggggccgagctatcttcgatttagaccacttcccagactgggctaacgtcactcacattgagacctag

SEQ ID NO: 55452 - DNA, 1723 bp, Artificial Sequence
  derived and/or modified sequence
agctgcccctcactcgtctcgcccgccagtctccctcccgcgcgatggcctcggcgctgagctatgtctccaagttcaagtccttcgtgatcttgttcgtcaccccgctcctgctgctgccactcgtcattctgatgcccgccaagtttgtcaggtgtgcctacgtcatcatcctcatggccatttactggtgcacagaagtcatccctctggctgtcacctctctcatgcctgtcttgcttttcccactcttccagattctggactccaggcaggtgtgtgtccagtacatgaaggacaccaacatgctgttcctgggcggcctcatcgtggccgtggctgtggagcgctggaacctgcacaagaggatcgccctgcgcacgctcctctgggtgggggccaagcctgcacggctgatgctgggcttcatgggcgtcacagccctcctgtccatgtggatcagtaacacggcaaccacggccatgatggtgcccatcgtggaggccatattgcagcagatggaagccacaagcgcagccaccgaggccggcctggagctggtggacaagggcaaggccaaggagctgccagggagtcaagtgatttttgaaggccccactctggggcagcaggaagaccaagagcggaagaggttgtgtaaggccatgaccctgtgcatctgctacgcggccagcatcgggggcaccgccaccctgaccgggacgggacccaacgtggtgctcctgggccagatgaacgagttgtttcctgacagcaaggacctcgtgaactttgcttcctggtttgcatttgcctttcccaacatgctggtgatgctgctgttcgcctggctgtggctccagtttgtttacatgagattcaattttaaaaagtcctggggctgcgggctagagagcaagaaaaacgagaaggctgccctcaaggtgctgcaggaggagtaccggaagctggggcccttgtccttcgcggagatcaacgtgctgatctgcttcttcctgctggtcatcctgtggttctcccgagaccccggcttcatgcccggctggctgactgttgcctgggtggagggtgagacaaagtatgtctccgatgccactgtggccatctttgtggccaccctgctattcattgtgccttcacagaagcccaagtttaacttccgcagccagactgaggaagaaaggaaaactccattttatccccctcccctgctggattggaaggtaacccaggagaaagtgccctggggcatcgtgctgctactagggggcggatttgctctggctaaaggatccgaggcctcggggctgtccgtgtggatggggaagcagatggagcccttgcacgcagtgcccccggcagccatcaccttgatcttgtccttgctcgttgccgtgttcactgagtgcacaagcaacgtggccaccaccaccttgttcctgcccatctttgcctccatggtgaaaacaggagtcataatgaacataattggagtcttctgtgtgtttttggctgtcaacacctggggacgggccatatttgacttggatcatttccctgactgggctaatgtgacacatattgagacttaggaagagccacaagaccacacacacagcccttaccctcctcaggactaccgaaccttctggcacaccttgtacagagttttggggttcacaccccaaaatgacccaacgat

SEQ ID NO: 55453 - DNA, 3145 bp, Artificial Sequence
  derived and/or modified sequence
aatccccggggactgtggccccttcttaagcccgcggcgcctctagctgcccctcactcgtctcgcccgccagtctccctcccgcgcgatggcctcggcgctgagctatgtctccaagttcaagtccttcgtgatcttgttcgtcaccccgctcctgctgctgccactcgtcattctgatgcccgccaagtttgtcaggtgtgcctacgtcatcatcctcatggccatttactggtgcacagaagtcatccctctggctgtcacctctctcatgcctgtcttgcttttcccactcttccagattctggactccaggcaggtgtgtgtccagtacatgaaggacaccaacatgctgttcctgggcggcctcatcgtggccgtggctgtggagcgctggaacctgcacaagaggatcgccctgcgcacgctcctctgggtgggggccaagcctgcacggctgatgctgggcttcatgggcgtcacagccctcctgtccatgtggatcagtaacacggcaaccacggccatgatggtgcccatcgtggaggccatattgcagcagatggaagccacaagcgcagccaccgaggccggcctggagctggtggacaagggcaaggccaaggagctgccagggagtcaagtgatttttgaaggccccactctggggcagcaggaagaccaagagcggaagaggttgtgtaaggccatgaccctgtgcatctgctacgcggccagcatcgggggcaccgccaccctgaccgggacgggacccaacgtggtgctcctgggccagatgaacgagttgtttcctgacagcaaggacctcgtgaactttgcttcctggtttgcatttgcctttcccaacatgctggtgatgctgctgttcgcctggctgtggctccagtttgtttacatgagattcaattttaaaaagtcctggggctgcgggctagagagcaagaaaaacgagaaggctgccctcaaggtgctgcaggaggagtaccggaagctggggcccttgtccttcgcggagatcaacgtgctgatctgcttcttcctgctggtcatcctgtggttctcccgagaccccggcttcatgcccggctggctgactgttgcctgggtggagggtgagacaaagtatgtctccgatgccactgtggccatctttgtggccaccctgctattcattgtgccttcacagaagcccaagtttaacttccgcagccagactgaggaagaaaggaaaactccattttatccccctcccctgctggattggaaggtaacccaggagaaagtgccctggggcatcgtgctgctactagggggcggatttgctctggctaaaggatccgaggcctcggggctgtccgtgtggatggggaagcagatggagcccttgcacgcagtgcccccggcagccatcaccttgatcttgtccttgctcgttgccgtgttcactgagtgcacaagcaacgtggccaccaccaccttgttcctgcccatctttgcctccatggtgaaaacaggagtcataatgaacataattggagtcttctgtgtgtttttggctgtcaacacctggggacgggccatatttgacttggatcatttccctgactgggctaatgtgacacatattgagacttaggaagagccacaagaccacacacacagcccttaccctcctcaggactaccgaaccttctggcacaccttgtacagagttttggggttcacaccccaaaatgacccaacgatgtccacacaccaccaaaacccagccaatgggccacctcttcctccaagcccagatgcagagatggtcatgggcagctggagggtaggctcagaaatgaagggaacccctcagtgggctgctggacccatctttcccaagccttgccattatctctgtgagggaggccaggtagccgagggatcaggatgcaggctgctgtacccgctctgcctcaagcatcccccacacagggctctggttttcactcgcttcgtcctagatagtttaaatgggaatcggatcccctggttgagagctaagacaaccacctaccagtgcccatgtcccttccagctcaccttgagcagcctcagatcatctctgtcactctggaagggacaccccagccagggacggaatgcctggtcttgagcaacctcccactgctggagtgcgagtgggaatcagagcctcctgaagcctctgggaactcctcctgtggccaccaccaaaggatgaggaatctgagttgccaacttcaggacgacacctggcttgccacccacagtgcaccacaggccaacctacgcccttcatcacttggttctgttttaatcgactggccccctgtcccacctctccagtgagcctccttcaactccttggtcccctgttgtctgggtcaacatttgccgagacgccttggctggcaccctctggggtcccccttttctcccaggcaggtcatcttttctgggagatgcttcccctgccatccccaaatagctaggatcacactccaagtatgggcagtgatggcgctctgggggccacagtgggctatctaggccctccctcacctgaggcccagagtggacacagctgttaatttccactggctatgccacttcagagtctttcatgccagcgtttgagctcctctgggtaaaatcttccctttgttgactggccttcacagccatggctggtgacaacagaggatcgttgagattgagcagcgcttggtgatctctcagcaaacaacccctgcccgtgggccaatctacttgaagttactcggacaaagaccccaaagtggggcaacaactccagagaggctgtgggaatcttcagaacccccctgtaagagacagacatgagagacaagcatcttctttcccccgcaagtccattttatttccttcttgtgctgctctggaagagaggcagtagcaaagagatgagctcctggatggcattttccagggcaggagaaagtatgagagcctcaggaaaccccatcaaggaccgagtatgtgtctggttccttgggtgggacgattcctgaccacactgtccagctcttgctctcattaaatgctctgtctcccgcggaaa

SEQ ID NO: 55454 - DNA, 1569 bp, Artificial Sequence
  derived and/or modified sequence
atggccagcgccctgagctacgtgagcaagttcaagagcttcgtgatcctgttcgtgacccccctgctgctgctgcccctggtgatcctgatgcccgccaagttcgtgagatgcgcctacgtgatcatcctgatggccatctactggtgcaccgaggtgatccccctggccgtgaccagcctgatgcccgtgctgctgttccccctgttccagatcctggacagcagacaggtgtgcgtgcagtacatgaaggacaccaacatgctgttcctgggcggcctgatcgtggccgtggccgtggagagatggaacctgcacaagagaatcgccctgagaaccctgctgtgggtgggcgccaagcccgccagactgatgctgggcttcatgggcgtgaccgccctgctgagcatgtggatcagcaacaccgccaccaccgccatgatggtgcccatcgtggaggccatcctgcagcagatggaggccaccagcgccgccaccgaggccggcctggagctggtggacaagggcaaggccaaggagctgcccggcagccaggtgatcttcgagggccccaccctgggccagcaggaggaccaggagagaaagagactgtgcaaggccatgaccctgtgcatctgctacgccgccagcatcggcggcaccgccaccctgaccggcaccggccccaacgtggtgctgctgggccagatgaacgagctgttccccgacagcaaggacctggtgaacttcgccagctggttcgccttcgccttccccaacatgctggtgatgctgctgttcgcctggctgtggctgcagttcgtgtacatgagattcaacttcaagaagagctggggctgcggcctggagagcaagaagaacgagaaggccgccctgaaggtgctgcaggaggagtacagaaagctgggccccctgagcttcgccgagatcaacgtgctgatctgcttcttcctgctggtgatcctgtggttcagcagagaccccggcttcatgcccggctggctgaccgtggcctgggtggagggcgagaccaagtacgtgagcgacgccaccgtggccatcttcgtggccaccctgctgttcatcgtgcccagccagaagcccaagttcaacttcagaagccagaccgaggaggagagaaagacccccttctaccccccccccctgctggactggaaggtgacccaggagaaggtgccctggggcatcgtgctgctgctgggcggcggcttcgccctggccaagggcagcgaggccagcggcctgagcgtgtggatgggcaagcagatggagcccctgcacgccgtgccccccgccgccatcaccctgatcctgagcctgctggtggccgtgttcaccgagtgcaccagcaacgtggccaccaccaccctgttcctgcccatcttcgccagcatggtgaagaccggcgtgatcatgaacatcatcggcgtgttctgcgtgttcctggccgtgaacacctggggcagagccatcttcgacctggaccacttccccgactgggccaacgtgacccacatcgagacctag

SEQ ID NO: 55455 - protein, 685 aa, Artificial Sequence
  derived and/or modified sequence
MVLVLHHILIAVVQFLRRGQQVFLKPDEPPPPPQPCADSLQDALLSLGSVIDISGLQRAVKEALSAVLPRVETVYTYLLDGESQLVCEDPPHELPQEGKVRFTDEDEHVIQHCFHYTSTVLTSTLAFQKEQKLKCECQALLQVAKNLFTHLDDVSVLLQEIITEARNLSNAEICSVFLLDQNELVAKVFDGGVVDDESYEIRIPADQGIAGHVATTGQILNIPDAYAHPLFYRGVDDSTGFRTRNILCFPIKNENQEVIGVAELVNKINGPWFSKFDEDLATAFSIYCGISIAHSLLYKKVNEAQYRSHLANEMMMYHMKVSDDEYTKLLHDGIQPVAAIDSNFASFTYTPRSLPEDDTSMAILSMLQDMNFINNYKIDCPTLARFCLMVKKGYRDPPYHNWMHAFSVSHFCYLLYKNLELTNYLEDIEIFALFISCMCHDLDHRGTNNSFQVASKSVLAALYSSEGSVMERHHFAQAIAILNTHGCNIFDHFSRKDYQRMLDLMRDIILATDLAHHLRIFKDLQKMAEVGYDRNNKQHHRLLLCLLMTSCDLSDQTKGWKTTRKIAELIYKEFFSQGDLEKAMGNRPMEMMDREKAYIPELQISFMEHIAMPIYKLLQDLFPKAAELYERVASNREHWTKVSHKFTIRGLPSNNSLDFLDEEYEVPDLDGTRAPINGCCSLDAE

SEQ ID NO: 55456 - protein, 934 aa, Artificial Sequence
  derived and/or modified sequence
MVLVLHHILIAVVQFLRRGQQVFLKPDEPPPPPQPCADSLQDALLSLGSVIDISGLQRAVKEALSAVLPRVETVYTYLLDGESQLVCEDPPHELPQEGKVREAIISQKRLGCNGLGFSDLPGKPLARLVAPLAPDTQVLVMPLADKEAGAVAAVILVHCGQLSDNEEWSLQAVEKHTLVALRRVQVLQQRGPREAPRAVQNPPEGTAEDQKGGAAYTDRDRKILQLCGELYDLDASSLQLKVLQYLQQETRASRCCLLLVSEDNLQLSCKVIGDKVLGEEVSFPLTGCLGQVVEDKKSIQLKDLTSEDVQQLQSMLGCELQAMLCVPVISRATDQVVALACAFNKLEGDLFTDEDEHVIQHCFHYTSTVLTSTLAFQKEQKLKCECQALLQVAKNLFTHLDDVSVLLQEIITEARNLSNAEICSVFLLDQNELVAKVFDGGVVDDESYEIRIPADQGIAGHVATTGQILNIPDAYAHPLFYRGVDDSTGFRTRNILCFPIKNENQEVIGVAELVNKINGPWFSKFDEDLATAFSIYCGISIAHSLLYKKVNEAQYRSHLANEMMMYHMKVSDDEYTKLLHDGIQPVAAIDSNFASFTYTPRSLPEDDTSMAILSMLQDMNFINNYKIDCPTLARFCLMVKKGYRDPPYHNWMHAFSVSHFCYLLYKNLELTNYLEDIEIFALFISCMCHDLDHRGTNNSFQVASKSVLAALYSSEGSVMERHHFAQAIAILNTHGCNIFDHFSRKDYQRMLDLMRDIILATDLAHHLRIFKDLQKMAEVGYDRNNKQHHRLLLCLLMTSCDLSDQTKGWKTTRKIAELIYKEFFSQGDLEKAMGNRPMEMMDREKAYIPELQISFMEHIAMPIYKLLQDLFPKAAELYERVASNREHWTKVSHKFTIRGLPSNNSLDFLDEEYEVPDLDGTRAPINGCCSLDAE

SEQ ID NO: 55457 - DNA, 2853 bp, Artificial Sequence
  derived and/or modified sequence
atgagctacatcctgaagatgcccggcacctgcctgcccggcgagggcaccacctacgagctgccccccagcagcctgcaccccagcagcgcccccgtgaccagcggcggcacctgccccgccctgctgaccgaggccggctgggaggcccccatcatggccttcaccgaggccgccagcgccgtgggccccagctggacccacagcagagccagcgtgagcagcaccgtgaagaccgagagaagaagaagagtgctgcaggcctgcggcatggtgagaagaggccagcaggtgttcctgaagcccgacgagccccccccccccccccagccctgcgccgacagcctgcaggacgccctgctgagcctgggcagcgtgatcgacatcagcggcctgcagagagccgtgaaggaggccctgagcgccgtgctgcccagagtggagaccgtgtacacctacctgctggacggcgagagccagctggtgtgcgaggaccccccccacgagctgccccaggagggcaaggtgagagaggccatcatcagccagaagagactgggctgcaacggcctgggcttcagcgacctgcccggcaagcccctggccagactggtggcccccctggcccccgacacccaggtgctggtgatgcccctggccgacaaggaggccggcgccgtggccgccgtgatcctggtgcactgcggccagctgagcgacaacgaggagtggagcctgcaggccgtggagaagcacaccctggtggccctgagaagagtgcaggtgctgcagcagagaggccccagagaggcccccagagccgtgcagaacccccccgagggcaccgccgaggaccagaagggcggcgccgcctacaccgacagagacagaaagatcctgcagctgtgcggcgagctgtacgacctggacgccagcagcctgcagctgaaggtgctgcagtacctgcagcaggagaccagagccagcagatgctgcctgctgctggtgagcgaggacaacctgcagctgagctgcaaggtgatcggcgacaaggtgctgggcgaggaggtgagcttccccctgaccggctgcctgggccaggtggtggaggacaagaagagcatccagctgaaggacctgaccagcgaggacgtgcagcagctgcagagcatgctgggctgcgagctgcaggccatgctgtgcgtgcccgtgatcagcagagccaccgaccaggtggtggccctggcctgcgccttcaacaagctggagggcgacctgttcaccgacgaggacgagcacgtgatccagcactgcttccactacaccagcaccgtgctgaccagcaccctggccttccagaaggagcagaagctgaagtgcgagtgccaggccctgctgcaggtggccaagaacctgttcacccacctggacgacgtgagcgtgctgctgcaggagatcatcaccgaggccagaaacctgagcaacgccgagatctgcagcgtgttcctgctggaccagaacgagctggtggccaaggtgttcgacggcggcgtggtggacgacgagagctacgagatcagaatccccgccgaccagggcatcgccggccacgtggccaccaccggccagatcctgaacatccccgacgcctacgcccaccccctgttctacagaggcgtggacgacagcaccggcttcagaaccagaaacatcctgtgcttccccatcaagaacgagaaccaggaggtgatcggcgtggccgagctggtgaacaagatcaacggcccctggttcagcaagttcgacgaggacctggccaccgccttcagcatctactgcggcatcagcatcgcccacagcctgctgtacaagaaggtgaacgaggcccagtacagaagccacctggccaacgagatgatgatgtaccacatgaaggtgagcgacgacgagtacaccaagctgctgcacgacggcatccagcccgtggccgccatcgacagcaacttcgccagcttcacctacacccccagaagcctgcccgaggacgacaccagcatggccatcctgagcatgctgcaggacatgaacttcatcaacaactacaagatcgactgccccaccctggccagattctgcctgatggtgaagaagggctacagagaccccccctaccacaactggatgcacgccttcagcgtgagccacttctgctacctgctgtacaagaacctggagctgaccaactacctggaggacatcgagatcttcgccctgttcatcagctgcatgtgccacgacctggaccacagaggcaccaacaacagcttccaggtggccagcaagagcgtgctggccgccctgtacagcagcgagggcagcgtgatggagagacaccacttcgcccaggccatcgccatcctgaacacccacggctgcaacatcttcgaccacttcagcagaaaggactaccagagaatgctggacctgatgagagacatcatcctggccaccgacctggcccaccacctgagaatcttcaaggacctgcagaagatggccgaggtgggctacgacagaaacaacaagcagcaccacagactgctgctgtgcctgctgatgaccagctgcgacctgagcgaccagaccaagggctggaagaccaccagaaagatcgccgagctgatctacaaggagttcttcagccagggcgacctggagaaggccatgggcaacagacccatggagatgatggacagagagaaggcctacatccccgagctgcagatcagcttcatggagcacatcgccatgcccatctacaagctgctgcaggacctgttccccaaggcctag

SEQ ID NO: 55458 - DNA, 2805 bp, Artificial Sequence
  derived and/or modified sequence
atggtgctggtgctgcaccacatcctgatcgccgtggtgcagttcctgagaagaggccagcaggtgttcctgaagcccgacgagccccccccccccccccagccctgcgccgacagcctgcaggacgccctgctgagcctgggcagcgtgatcgacatcagcggcctgcagagagccgtgaaggaggccctgagcgccgtgctgcccagagtggagaccgtgtacacctacctgctggacggcgagagccagctggtgtgcgaggaccccccccacgagctgccccaggagggcaaggtgagagaggccatcatcagccagaagagactgggctgcaacggcctgggcttcagcgacctgcccggcaagcccctggccagactggtggcccccctggcccccgacacccaggtgctggtgatgcccctggccgacaaggaggccggcgccgtggccgccgtgatcctggtgcactgcggccagctgagcgacaacgaggagtggagcctgcaggccgtggagaagcacaccctggtggccctgagaagagtgcaggtgctgcagcagagaggccccagagaggcccccagagccgtgcagaacccccccgagggcaccgccgaggaccagaagggcggcgccgcctacaccgacagagacagaaagatcctgcagctgtgcggcgagctgtacgacctggacgccagcagcctgcagctgaaggtgctgcagtacctgcagcaggagaccagagccagcagatgctgcctgctgctggtgagcgaggacaacctgcagctgagctgcaaggtgatcggcgacaaggtgctgggcgaggaggtgagcttccccctgaccggctgcctgggccaggtggtggaggacaagaagagcatccagctgaaggacctgaccagcgaggacgtgcagcagctgcagagcatgctgggctgcgagctgcaggccatgctgtgcgtgcccgtgatcagcagagccaccgaccaggtggtggccctggcctgcgccttcaacaagctggagggcgacctgttcaccgacgaggacgagcacgtgatccagcactgcttccactacaccagcaccgtgctgaccagcaccctggccttccagaaggagcagaagctgaagtgcgagtgccaggccctgctgcaggtggccaagaacctgttcacccacctggacgacgtgagcgtgctgctgcaggagatcatcaccgaggccagaaacctgagcaacgccgagatctgcagcgtgttcctgctggaccagaacgagctggtggccaaggtgttcgacggcggcgtggtggacgacgagagctacgagatcagaatccccgccgaccagggcatcgccggccacgtggccaccaccggccagatcctgaacatccccgacgcctacgcccaccccctgttctacagaggcgtggacgacagcaccggcttcagaaccagaaacatcctgtgcttccccatcaagaacgagaaccaggaggtgatcggcgtggccgagctggtgaacaagatcaacggcccctggttcagcaagttcgacgaggacctggccaccgccttcagcatctactgcggcatcagcatcgcccacagcctgctgtacaagaaggtgaacgaggcccagtacagaagccacctggccaacgagatgatgatgtaccacatgaaggtgagcgacgacgagtacaccaagctgctgcacgacggcatccagcccgtggccgccatcgacagcaacttcgccagcttcacctacacccccagaagcctgcccgaggacgacaccagcatggccatcctgagcatgctgcaggacatgaacttcatcaacaactacaagatcgactgccccaccctggccagattctgcctgatggtgaagaagggctacagagaccccccctaccacaactggatgcacgccttcagcgtgagccacttctgctacctgctgtacaagaacctggagctgaccaactacctggaggacatcgagatcttcgccctgttcatcagctgcatgtgccacgacctggaccacagaggcaccaacaacagcttccaggtggccagcaagagcgtgctggccgccctgtacagcagcgagggcagcgtgatggagagacaccacttcgcccaggccatcgccatcctgaacacccacggctgcaacatcttcgaccacttcagcagaaaggactaccagagaatgctggacctgatgagagacatcatcctggccaccgacctggcccaccacctgagaatcttcaaggacctgcagaagatggccgaggtgggctacgacagaaacaacaagcagcaccacagactgctgctgtgcctgctgatgaccagctgcgacctgagcgaccagaccaagggctggaagaccaccagaaagatcgccgagctgatctacaaggagttcttcagccagggcgacctggagaaggccatgggcaacagacccatggagatgatggacagagagaaggcctacatccccgagctgcagatcagcttcatggagcacatcgccatgcccatctacaagctgctgcaggacctgttccccaaggccgccgagctgtacgagagagtggccagcaacagagagcactggaccaaggtgagccacaagttcaccatcagaggcctgcccagcaacaacagcctggacttcctggacgaggagtacgaggtgcccgacctggacggcaccagagcccccatcaacggctgctgcagcctggacgccgagtag

SEQ ID NO: 55459 - DNA, 2853 bp, Artificial Sequence
  derived and/or modified sequence
atgagctatatcctgaagatgccaggcacatgcttacccggggaagggacaacctacgaactgccgccgtcctctctacatcccagttccgctccggtaaccagtggcggcacttgcccagctttactgacagaagcaggctgggaggcaccaattatggcctttacagaagccgccagcgcagtgggaccttcctggacacacagcagagctagcgttagcagtacggtcaaaacagaacgtcgacgtcgtgtccttcaggcctgcggcatggtacgtcggggacaacaggtttttctgaagccggatgaaccccccccacccccacagccctgtgccgattctttacaagatgctctgcttagcctaggatcagtcattgatatttctggtctgcagagggccgtgaaagaggcactgtccgcagtcctgccacgggtggaaacagtgtatacatatctccttgatggagagtcccagctggtgtgtgaggacccacctcacgagttacctcaggaagggaaggtgcgagaagccatcattagtcagaagaggctcggttgcaacggcctcggtttttcggacctgcctggtaagccactcgcccggttggtggccccactggcccccgatacccaggtgctggtcatgcctttagcagacaaggaggctggcgcagtggccgctgttattttggtgcattgtggacagttgtcagataatgaggaatggtcattgcaagcagtcgaaaaacataccctagttgccctgaggcgcgtccaggtcctgcagcaacgcggtcctagagaagccccccgcgctgtgcagaacccaccagaaggaacggcagaagaccagaagggaggggcagcatacaccgaccgcgatagaaaaattctgcaactttgcggcgaactgtacgacctggacgcctctagtctacagttaaaagtgctccagtacttgcagcaagagacgagagcaagcaggtgttgtctgctgctcgtctcggaagataacctgcaactctcttgtaaggtaattggcgataaagtgctgggggaagaggtcagcttccccctgactggctgtcttggccaggtagtggaggacaaaaagtcaatccagttaaaagacttgacctctgaggacgtgcagcagttacagtcgatgctgggttgcgagctacaggctatgctatgcgttcctgtcattagccgggctactgaccaggtggtcgcccttgcctgcgcattcaataaactggaaggagacctcttcactgatgaggacgagcacgtcattcaacactgctttcactacacgagtacagtcctgacctctacccttgcctttcaaaaggagcagaagctgaagtgcgaatgccaggccctgctccaagtcgcgaagaatctttttacccatttggacgatgtgtcagttctgctgcaggagattattactgaagcccggaatttgtctaatgccgaaatttgctcagtcttcttgctcgatcagaatgagctagtggccaaagtgtttgacggcggtgtcgtggatgatgaaagctacgaaattcggattcctgccgatcagggaattgcggggcacgtggcaacaacgggacagatcctgaatattcctgatgcttatgctcatcccctgttctatagaggtgtagatgactccacgggcttccggactcgaaacattctgtgcttccccatcaagaacgagaaccaggaggttatcggagtggctgagctggtgaataagataaatgggccttggttttctaagtttgatgaggatttggcaactgccttctcaatatactgtggtatatcaatcgcccatagcttgctgtataaaaaggtaaacgaagctcagtacaggtcacacctggcgaacgaaatgatgatgtaccatatgaaggtaagtgatgacgaatataccaaattactccacgacggcattcagccggtggctgctatcgattctaacttcgcgtctttcacgtatacaccaaggtcattaccggaggatgatactagcatggctattctgtccatgctgcaggacatgaatttcataaacaattataagattgactgccctactctggctcggttttgcctcatggttaagaagggataccgcgacccgccctatcacaattggatgcatgccttttctgtttcccatttctgttacctcttgtataagaacctggagcttacaaattatctcgaggatatcgaaatctttgccctttttataagttgcatgtgtcacgacctggatcataggggaacaaataactcctttcaggtggcctcaaagagcgtgctggccgcattgtacagcagcgaaggaagtgtgatggaacgacatcatttcgcccaggcaattgccatactcaatacgcatgggtgtaacattttcgatcacttctcgcgcaaagactatcagagaatgctcgacctgatgcgggacatcattctggcgacagatctggcccaccatttgagaattttcaaggatttgcaaaaaatggctgaagtgggatatgaccgcaacaacaagcagcaccatcgcctcttgctgtgcctgttaatgacatcctgtgaccttagcgatcaaactaaaggatggaagaccactcgcaaaattgccgagttgatttacaaggagttttttagccagggcgatctcgagaaggccatggggaaccggccaatggaaatgatggatcgggagaaggcatatatcccagaactgcagatctcctttatggagcacatcgccatgcccatttacaagcttcttcaggacctatttcctaaagcgtag

SEQ ID NO: 55460 - DNA, 2805 bp, Artificial Sequence
  derived and/or modified sequence
atggtgctggtactgcatcacattctcattgcggtggtccagtttttacggagagggcagcaggtttttctgaaacccgacgagcccccccccccgccccaaccctgtgctgatagtcttcaggacgccctgctgtctctgggctccgtaatcgacatcagtggattgcagagggctgtcaaggaagctctctcagctgtacttccaagagtggagaccgtttatacctaccttctggatggagagagtcagctggtgtgtgaggatcctccccacgaactaccacaagaaggaaaagttcgcgaggctattataagccagaaacggctggggtgcaacggactgggtttcagcgacctacccggtaaaccactggcccgattggtggccccattggcacctgacactcaagtccttgttatgcctctggctgataaggaggcaggtgcagtggctgcggtcatcctcgtccactgtggccaactcagcgataatgaggaatggagcctccaagccgtggaaaaacacactctggtcgccctgcggagggttcaggtcctgcagcagcgcggacccagagaggccccaagggcagtgcagaaccccccggagggtactgccgaagatcagaagggtggggccgcgtataccgaccgcgacagaaaaattctgcagctttgcggtgagctctacgacctggatgctagctcccttcagctgaaagtcttgcagtacctgcagcaggaaactcgcgcgtctcgctgctgcctgcttctcgtttccgaggacaacttgcaactgagttgtaaggttattggcgacaaagttttaggggaggaagtcagctttcccttaaccggctgtctggggcaggtggttgaggacaaaaaaagcatccagctgaaagacctgacctcagaggatgttcagcaactgcagagcatgctgggttgcgagctccaagccatgctgtgtgtcccggtgataagccgggccacagatcaagtagtggcgcttgcctgcgcatttaacaaactggagggggatctttttactgacgaagacgagcacgttattcagcattgttttcattacactagtactgtcttgacctcaaccctggcattccagaaagaacagaaactgaagtgtgagtgccaagcccttctgcaggtcgccaagaacttgttcacccacctcgatgatgtgagcgtcttactccaggagattatcaccgaagcgcggaacctgtctaacgccgagatctgttctgttttcctgcttgaccagaatgaacttgtagccaaggtgttcgacggcggcgtggtggacgacgaaagttacgaaatcaggatccctgctgaccaagggatagcaggacacgtggcgactactggccaaatcttgaacatcccagacgcctatgctcatcctttgttctacaggggggttgacgacagtaccggatttcgaacccgaaacattctgtgctttcccatcaagaatgagaaccaggaggttattggggtcgccgagttggtaaacaagattaacggcccctggtttagcaagtttgatgaggacctggcgaccgctttttccatatattgtggaatatctatcgcccactccctcctgtacaagaaggtgaacgaggcccagtacaggtctcatctggctaatgagatgatgatgtaccacatgaaggtttctgacgacgagtatacaaaattgctccacgatggcattcaaccagtcgcagccattgattccaacttcgcaagctttacatacactccaaggagcttgcccgaagatgacaccagtatggcaattctgtccatgctgcaggatatgaatttcattaataactataagattgattgtccgactctcgcacgtttctgcctgatggtgaaaaagggataccgggatccaccataccacaactggatgcacgctttcagcgttagccacttctgttatctgctatacaagaatctggaattaacaaattacttggaagatatcgaaatatttgcgttgttcatatcttgcatgtgccatgacttggaccatcggggaacaaacaactcattccaggtggcatcgaagagtgtgttagcagctctgtattcctcagaaggatccgtgatggagcgccaccactttgcccaggctatcgctattttgaatacccatgggtgtaacatttttgatcacttctcgagaaaagattaccaacgtatgctggatctgatgagggacatcatacttgccaccgacttggctcatcatctgcggatttttaaagatctccagaagatggccgaggttgggtatgatcggaataacaaacaacaccaccgccttctactatgtctgttaatgacctcatgcgatctgtccgaccagactaaagggtggaaaacaactagaaagatcgctgaactgatctacaaagagttctttagccagggagatttggagaaggccatggggaacaggcctatggagatgatggatcgggaaaaggcatacatcccagagttgcaaatatcttttatggaacacatagccatgcccatttacaaactattgcaggatcttttccccaaagccgccgagttatatgagagagtcgcgagcaaccgggaacactggactaaggtgtcacataaattcactatacggggtttgcccagcaataatagcttagactttttggatgaggagtacgaggtcccagatctggacggtacacgtgcacctattaatggctgttgctctttggacgcagagtag

SEQ ID NO: 55461 - DNA, 2853 bp, Artificial Sequence
  derived and/or modified sequence
atgagctacatcctgaagatgcctggcacctgcctgcctggagagggcaccacctatgagctgccccccagcagcctgcaccccagcagcgcccctgtgaccagcggcggcacctgcccagccctgctgacagaggccggctgggaggcccccatcatggccttcacagaggccgccagcgctgtgggccccagctggacccacagccgggcctctgtgagcagcacagtgaagacagaaagaagaagaagagtgctgcaggcctgtggcatggtgagaagaggccagcaggtgttcctgaagccagatgagcccccacctccaccccagccctgtgccgacagcctgcaggatgccctgctgagcctgggctctgtgattgacatcagcggcctgcagagagctgtgaaggaggccctgtctgctgtgctgccccgggtggagaccgtgtacacctacctgctggatggagagagccagctggtgtgtgaggacccccctcatgagctgccccaggagggcaaggtgcgggaggccatcatcagccagaagaggctgggctgcaatggcctgggcttcagtgacctgcccgggaagcccctggcccggctggtggcccccctggccccagacacccaggtgctggtgatgcccctggccgacaaggaggccggggctgtggccgctgtgatcctggtgcactgcggccagctgagtgacaatgaggagtggagcctgcaggccgtggagaagcacaccctggtggccctgcggcgggtgcaggtgctgcagcagaggggcccccgggaggcccccagggctgtgcagaaccccccagagggcacagctgaggaccagaagggcggggccgcctacacagaccgggacaggaagatcctgcagctgtgtggggagctgtatgacctggatgccagcagcctgcagctgaaggtgctgcagtacctgcagcaggagacccgggccagccgctgctgcctgctgctggtgtctgaggacaacctgcagctgagctgcaaggtgattggagacaaggtgctgggggaggaggtgtccttccccctgaccggctgcctgggccaggtggtggaggacaagaagagcatccagctgaaggacctgaccagtgaagatgtgcagcagctgcagagcatgctgggctgtgagctgcaggccatgctgtgtgtgcctgtgatcagccgggccacagaccaggtggtggccctggcctgtgccttcaacaagctggagggggacctcttcacagatgaagatgaacatgtgatccagcactgcttccactacaccagcacagtgctgaccagcaccctggccttccagaaggagcagaagctgaagtgtgagtgccaggccctgctgcaggtggccaagaacctcttcacccacctggatgatgtgtctgtgctgctgcaggagatcatcacagaggccaggaacctgagcaatgctgagatctgcagcgtcttcctgctggaccagaatgagctggtggccaaggtgtttgatggaggagtggtggatgatgagagctatgagatccgcatcccagctgaccagggcattgctggccacgtggccaccaccggccagatcctgaacatcccagatgcctatgcccaccccctcttctacagaggagtggatgacagcacaggcttccgcaccaggaacatcctgtgcttccccatcaagaatgaaaaccaggaggtgattggagtggccgagctggtgaacaagatcaatggcccctggttcagcaagtttgatgaggacctggccacagccttcagcatctactgcggcatcagcatcgcccacagcctgctgtacaagaaggtgaatgaggcccagtaccgcagccacctggccaatgagatgatgatgtaccacatgaaggtgtctgatgatgagtacaccaagctgctgcatgatggcatccagcctgtggccgccatcgacagcaactttgccagcttcacctacacccccaggagcctgcctgaagatgacacctccatggccatcctgtccatgctgcaggacatgaacttcatcaacaactacaagattgactgccccaccctggcccgcttctgcctgatggtgaagaagggctacagagaccccccctaccacaactggatgcacgccttctctgtgagccacttctgctacctgctgtacaagaacctggagctgaccaactacctggaggacatcgagatctttgccctcttcatcagctgcatgtgccacgacctggaccaccggggcaccaacaacagcttccaggtggccagcaagtctgtgctggccgccctgtacagcagcgagggctctgtgatggagcggcaccactttgcccaggccatcgccatcctgaacacccacggctgcaacatctttgaccacttcagcaggaaggactaccagaggatgctggacctgatgagggacatcatcctggccacagacctggcccaccacctgcgcatcttcaaggacctgcagaagatggccgaggtgggctatgacaggaacaacaagcagcaccaccggctgctgctgtgcctgctgatgaccagctgtgacctgagtgaccagaccaagggctggaagaccaccaggaagattgctgagctgatctacaaggagttcttcagccagggcgacctggagaaggccatgggcaaccggcccatggagatgatggaccgggagaaggcctacatccctgagctgcagatctccttcatggagcacatcgccatgcccatctacaagctgctgcaggacctcttccccaaggcctag

SEQ ID NO: 55462 - DNA, 2805 bp, Artificial Sequence
  derived and/or modified sequence
atggtgctggtgctgcaccacatcctgattgctgtggtgcagttcctgcggcggggccagcaggtgttcctgaagccagatgagcccccacctccaccccagccctgtgccgacagcctgcaggatgccctgctgagcctgggctctgtgattgacatcagcggcctgcagagagctgtgaaggaggccctgtctgctgtgctgccccgggtggagaccgtgtacacctacctgctggatggagagagccagctggtgtgtgaggacccccctcatgagctgccccaggagggcaaggtgcgggaggccatcatcagccagaagaggctgggctgcaatggcctgggcttcagtgacctgcccgggaagcccctggcccggctggtggcccccctggccccagacacccaggtgctggtgatgcccctggccgacaaggaggccggggctgtggccgctgtgatcctggtgcactgcggccagctgagtgacaatgaggagtggagcctgcaggccgtggagaagcacaccctggtggccctgcggcgggtgcaggtgctgcagcagaggggcccccgggaggcccccagggctgtgcagaaccccccagagggcacagctgaggaccagaagggcggggccgcctacacagaccgggacaggaagatcctgcagctgtgtggggagctgtatgacctggatgccagcagcctgcagctgaaggtgctgcagtacctgcagcaggagacccgggccagccgctgctgcctgctgctggtgtctgaggacaacctgcagctgagctgcaaggtgattggagacaaggtgctgggggaggaggtgtccttccccctgaccggctgcctgggccaggtggtggaggacaagaagagcatccagctgaaggacctgaccagtgaagatgtgcagcagctgcagagcatgctgggctgtgagctgcaggccatgctgtgtgtgcctgtgatcagccgggccacagaccaggtggtggccctggcctgtgccttcaacaagctggagggggacctcttcacagatgaagatgaacatgtgatccagcactgcttccactacaccagcacagtgctgaccagcaccctggccttccagaaggagcagaagctgaagtgtgagtgccaggccctgctgcaggtggccaagaacctcttcacccacctggatgatgtgtctgtgctgctgcaggagatcatcacagaggccaggaacctgagcaatgctgagatctgcagcgtcttcctgctggaccagaatgagctggtggccaaggtgtttgatggaggagtggtggatgatgagagctatgagatccgcatcccagctgaccagggcattgctggccacgtggccaccaccggccagatcctgaacatcccagatgcctatgcccaccccctcttctacagaggagtggatgacagcacaggcttccgcaccaggaacatcctgtgcttccccatcaagaatgaaaaccaggaggtgattggagtggccgagctggtgaacaagatcaatggcccctggttcagcaagtttgatgaggacctggccacagccttcagcatctactgcggcatcagcatcgcccacagcctgctgtacaagaaggtgaatgaggcccagtaccgcagccacctggccaatgagatgatgatgtaccacatgaaggtgtctgatgatgagtacaccaagctgctgcatgatggcatccagcctgtggccgccatcgacagcaactttgccagcttcacctacacccccaggagcctgcctgaagatgacacctccatggccatcctgtccatgctgcaggacatgaacttcatcaacaactacaagattgactgccccaccctggcccgcttctgcctgatggtgaagaagggctacagagaccccccctaccacaactggatgcacgccttctctgtgagccacttctgctacctgctgtacaagaacctggagctgaccaactacctggaggacatcgagatctttgccctcttcatcagctgcatgtgccacgacctggaccaccggggcaccaacaacagcttccaggtggccagcaagtctgtgctggccgccctgtacagcagcgagggctctgtgatggagcggcaccactttgcccaggccatcgccatcctgaacacccacggctgcaacatctttgaccacttcagcaggaaggactaccagaggatgctggacctgatgagggacatcatcctggccacagacctggcccaccacctgcgcatcttcaaggacctgcagaagatggccgaggtgggctatgacaggaacaacaagcagcaccaccggctgctgctgtgcctgctgatgaccagctgtgacctgagtgaccagaccaagggctggaagaccaccaggaagattgctgagctgatctacaaggagttcttcagccagggcgacctggagaaggccatgggcaaccggcccatggagatgatggaccgggagaaggcctacatccctgagctgcagatctccttcatggagcacatcgccatgcccatctacaagctgctgcaggacctcttccccaaggctgctgagctgtatgaaagagtggccagcaaccgggagcactggaccaaggtgagccacaagttcaccatccggggcctgcccagcaacaacagcctggacttcctggatgaggagtatgaggtgcctgacctggatggcacccgggcccccatcaatggctgctgcagcctggatgctgagtag

SEQ ID NO: 55463 - DNA, 2853 bp, Artificial Sequence
  derived and/or modified sequence
atgagctacatcctgaagatgcccggcacctgcctgcccggcgaggggaccacgtacgagctacctccctcaagtctacacccctcttcggctccagttaccagcggcggtacctgccccgctttgctgacggaggctgggtgggaggcacctataatggctttcacagaggcggcgtcggctgtggggccaagctggactcacagccgcgcatctgtttcttccactgtcaagacagaacgccggagaagagtgcttcaggcatgcggcatggtgaggcgggggcagcaggtgtttctgaaaccagatgagccccctccccctccccagccatgcgcagatagcttacaggacgcattgctgtccttgggctccgtgattgacatcagtgggctgcagagggccgtcaaggaagctttaagcgccgtgctgccaagggtagagaccgtttatacctaccttttagacggtgagagccagctagtgtgtgaagatccaccccacgaactgcctcaggagggaaaggtccgggaagccattatctcgcagaagagactgggatgtaatggactggggtttagcgaccttcccggaaagcctctggcgagactcgtcgccccactagcaccggacacccaggttctagtgatgccgctggctgacaaagaggcaggagcagtggccgcggtgattctcgtgcactgcggtcagttatctgataatgaggaatggtctcttcaggcagttgaaaaacacacccttgttgcccttcgccgggtccaggttcttcaacagagagggcctagagaggcgcccagggcagtacagaacccccccgaaggaactgccgaggatcaaaagggaggggcagcctatactgatcgagaccgcaagatcctacaactgtgcggcgaactgtatgatctcgacgcatcctcactgcaactcaaggtcctgcagtacctgcagcaggagacccgagcctcgcggtgttgcttacttttggtgagcgaagacaacctccagcttagctgtaaggttatcggagacaaggtgctcggggaggaggttagcttccccctgacaggttgtctgggccaggtcgtggaggataagaagagcattcagctgaaggacttaaccagcgaagacgttcagcagttacagtcgatgctcgggtgtgagctgcaggcaatgctgtgcgtcccagtaatatcccgggccacagatcaggtggtagctttggcctgtgcatttaacaaattggagggggatctgtttacagacgaggatgagcacgtgatccagcactgcttccactacacttcaactgtgctgacatctactttagcgttccagaaggaacaaaaactgaagtgtgagtgccaagctctgttacaggtggcaaaaaacctcttcacccatctcgatgatgtgtctgtgctgctccaagagatcataacagaggctagaaacttgtccaatgccgagatctgctccgtgttcctgctcgatcagaacgagctggtggcaaaggtgtttgatgggggggtagtggacgatgagagttacgaaatcaggatcccagccgatcagggcatcgccggccatgtagcgactacgggccagatcctgaacatacccgatgcctatgcccatccgctgttctatcggggtgtggatgattcgacgggctttcgtactcgcaacatactgtgcttcccaatcaaaaacgaaaatcaggaagtgatcggagtggcggaactagtcaacaagatcaacgggccttggttttccaagttcgacgaggatctcgccaccgcatttagcatatactgcggtatctcaatagctcactctctcctgtataaaaaagtcaacgaggcacaatatcgttcccatctggccaatgagatgatgatgtaccatatgaaggttagtgatgacgagtatactaaattgctacatgatgggatccaaccagtggccgccattgactccaatttcgcgtcattcacctatacaccccgcagcctgcccgaggatgatacaagtatggcaatcctctcgatgctgcaggacatgaattttattaataactacaagatcgattgtcctaccctggctaggttctgcctcatggttaagaaagggtaccgcgaccctccctaccataactggatgcacgccttctccgttagtcatttctgctacctgctatacaagaatctggaactgacaaactacctggaggacatcgagatcttcgccctttttatctcgtgtatgtgtcacgacctggatcaccgtggcactaataattcgttccaagtcgcttctaagtcggtcctggccgctctctactcatccgaaggtagtgttatggagcgtcatcattttgcgcaagctattgccatcttgaatacccacggatgcaatatttttgatcacttcagccgtaaagactaccaaagaatgttagacctgatgagggatataatcctcgcaacagacctggcccatcacttaaggattttcaaagacttgcagaaaatggccgaggtgggctacgataggaataacaaacagcaccacaggcttctactgtgtctcctcatgacaagttgtgacctgtccgatcagaccaagggatggaagaccacaaggaagattgccgaactcatctataaagaatttttttctcagggggatttagagaaggctatgggcaaccgtccaatggagatgatggacagggagaaagcttatattccagagctgcagatttcttttatggaacatatcgccatgccgatctacaagctgctccaggacctctttcctaaggcctag

SEQ ID NO: 55464 - DNA, 2805 bp, Artificial Sequence
  derived and/or modified sequence
atggtgctggtgctgcaccacatcctgatcgccgtggtgcagttcctgagacgcggccagcaggtattcctgaaaccagacgagccaccacctcctcctcaaccatgcgccgacagtctccaagatgcactgttgtcactggggagcgttattgatatctccggactacagcgggctgttaaggaggccctgagcgcagtgttgcccagagtcgagaccgtgtatacatacctactggatggagaaagccagctggtgtgcgaggatccccctcatgaactgccccaggaaggaaaagttagagaggccataatctcccaaaaacgtctaggatgtaacggcctgggttttagtgatctgcccggcaagcctctcgcaaggctcgtcgcgccgctcgctccagacactcaggttcttgttatgccgctggccgacaaggaagcaggagcagttgcagctgtaatacttgtccattgtggacagctgagcgacaatgaagaatggtccctgcaggccgtggaaaagcacaccctggtagcactgcggcgagtgcaagttctccagcagagagggccaagagaggctccacgggccgtgcagaatccgcccgagggcaccgccgaggatcagaaaggcggagccgcatatacagatcgggacaggaaaatacttcaattatgtggtgaattatatgacttggatgcctcgagcctacagcttaaagtgctgcagtatctgcagcaggagacaagggcctcacggtgctgtctcctgttggtgtccgaggataacctgcaactgtcctgcaaggtcatcggcgataaggtgcttggtgaggaagtttccttcccattgacaggttgtcttgggcaggtggtggaagacaagaagtccatacagctcaaggatttaacctctgaagacgtgcagcaactgcaatcaatgctgggctgtgagctgcaggccatgctttgtgttcccgttatatcccgcgccacagaccaggtggtagctttagcctgcgcctttaacaagcttgaaggtgaccttttcacggacgaagacgagcacgttattcagcattgctttcactacacatctaccgtgttaacctctaccttggcatttcagaaagagcaaaagttgaagtgtgagtgccaagctttgcttcaggtggccaagaacttattcacccacttggatgacgtctcagtgctactccaggagatcatcaccgaggccagaaatctcagcaacgccgaaatatgttctgtttttttgttggatcagaatgaattggtggcgaaggtcttcgatgggggggttgtcgacgacgaatcgtatgaaatccggatccctgccgatcaagggatagctggccatgtggcgacgacgggccagattcttaatattcctgacgcatatgctcacccgttgttctataggggggtggatgacagcaccggattccgtactaggaatattctgtgcttcccgattaagaatgagaatcaggaggtgatcggcgttgccgaactggtgaataaaatcaatggaccctggtttagtaagttcgacgaagacctggctacggcctttagtatctactgcggcataagcatcgctcattcgctgctatacaagaaggtgaacgaggcccagtaccggagccacctggccaatgagatgatgatgtaccacatgaaagtgtccgatgacgaatacactaaactccttcacgacgggatccagcccgtggccgctatcgatagtaactttgcctctttcacttatactccaagatccctgcctgaagatgatacatccatggccatactgtcaatgctgcaggatatgaattttataaataactacaaaatagattgtcctactttagcccggttttgtctaatggtaaagaagggctaccgggatcccccttatcacaattggatgcatgccttcagcgtgagtcatttttgctatctactgtataagaatttggagctgacaaattacctcgaagatatcgaaatcttcgctctctttatttcttgcatgtgccacgatctggaccaccgaggaactaacaattcctttcaggtcgcatccaagtcagtgttggcagctctgtatagctctgagggtagtgtgatggagcgtcaccacttcgcccaggctatagccatactcaacacccacgggtgcaatatctttgaccactttagcaggaaagactatcaacggatgctggacctgatgcgggatatcattcttgctactgacttggctcaccatttacgtatttttaaggatctgcagaagatggcggaagtcggatacgatagaaataacaaacagcaccaccggttgcttctctgcctgctcatgaccagctgtgacctgagcgatcagacaaaaggctggaagaccacaaggaagatcgctgaactcatctataaggagttcttctctcagggagacctggagaaggcgatgggaaacaggcccatggagatgatggacagggagaaggcttacatacctgaactccagattagttttatggaacatatcgccatgcccatttacaaacttctccaggatctcttccccaaagcagcggagctatacgaaagggtggcaagcaacagagaacattggaccaaggtcagccataagtttacaattcggggtctgccatccaacaatagcctggattttctggacgaagagtatgaagtgcctgatctagacggtaccagggcccccataaatgggtgttgcagtctggacgcagaatag

SEQ ID NO: 55465 - DNA, 4275 bp, Artificial Sequence
  derived and/or modified sequence
atgagttacattttaaagatgcctggtacatgcctgccaggagaaggcacaacatatgaactccctccctcttccctccacccctcctcagctcctgtgacatcaggagggacatgccctgccctgctcacagaggctgggtgggaggctcccatcatggccttcactgaggctgcctctgcagttggaccaagctggacacacagtagggcctcagtttcatcaactgtaaaaacagagaggagaaggagggttcttcaggcctgtggaatggtcaggcggggccagcaggtcttcctcaagccggacgagccgccgccgccgccgcagccatgcgccgacagcctgcaggacgccttgctgagtctgggctctgtcatcgacatttcaggcctgcaacgtgctgtcaaggaggccctgtcagctgtgctcccccgagtggaaactgtctacacctacctactggatggtgagtcccagctggtgtgtgaggaccccccacatgagctgccccaggaggggaaagtccgggaggctatcatctcccagaagcggctgggctgcaatgggctgggcttctcagacctgccagggaagcccttggccaggctggtggctccactggctcctgatacccaagtgctggtcatgccgctagcggacaaggaggctggggccgtggcagctgtcatcttggtgcactgtggccagctgagtgataatgaggaatggagcctgcaggcggtggagaagcataccctggtcgccctgcggagggtgcaggtcctgcagcagcgcgggcccagggaggctccccgagccgtccagaaccccccggaggggacggcggaagaccagaagggcggggcggcgtacaccgaccgcgaccgcaagatcctccaactgtgcggggaactctacgacctggatgcctcttccctgcagctcaaagtgctccaatacctgcagcaggagacccgggcatcccgctgctgcctcctgctggtgtcggaggacaatctccagctttcttgcaaggtcatcggagacaaagtgctcggggaagaggtcagctttcccttgacaggatgcctgggccaggtggtggaagacaagaagtccatccagctgaaggacctcacctccgaggatgtacaacagctgcagagcatgttgggctgtgagctgcaggccatgctctgtgtccctgtcatcagccgggccactgaccaggtggtggccttggcctgcgccttcaacaagctagaaggagacttgttcaccgacgaggacgagcatgtgatccagcactgcttccactacaccagcaccgtgctcaccagcaccctggccttccagaaggaacagaaactcaagtgtgagtgccaggctcttctccaagtggcaaagaacctcttcacccacctggatgacgtctctgtcctgctccaggagatcatcacggaggccagaaacctcagcaacgcagagatctgctctgtgttcctgctggatcagaatgagctggtggccaaggtgttcgacgggggcgtggtggatgatgagagctatgagatccgcatcccggccgatcagggcatcgcgggacacgtggcgaccacgggccagatcctgaacatccctgacgcatatgcccatccgcttttctaccgcggcgtggacgacagcaccggcttccgcacgcgcaacatcctctgcttccccatcaagaacgagaaccaggaggtcatcggtgtggccgagctggtgaacaagatcaatgggccatggttcagcaagttcgacgaggacctggcgacggccttctccatctactgcggcatcagcatcgcccattctctcctatacaaaaaagtgaatgaggctcagtatcgcagccacctggccaatgagatgatgatgtaccacatgaaggtctccgatgatgagtataccaaacttctccatgatgggatccagcctgtggctgccattgactccaattttgcaagtttcacctatacccctcgttccctgcccgaggatgacacgtccatggccatcctgagcatgctgcaggacatgaatttcatcaacaactacaaaattgactgcccgaccctggcccggttctgtttgatggtgaagaagggctaccgggatcccccctaccacaactggatgcacgccttttctgtctcccacttctgctacctgctctacaagaacctggagctcaccaactacctcgaggacatcgagatctttgccttgtttatttcctgcatgtgtcatgacctggaccacagaggcacaaacaactctttccaggtggcctcgaaatctgtgctggctgcgctctacagctctgagggctccgtcatggagaggcaccactttgctcaggccatcgccatcctcaacacccacggctgcaacatctttgatcatttctcccggaaggactatcagcgcatgctggatctgatgcgggacatcatcttggccacagacctggcccaccatctccgcatcttcaaggacctccagaagatggctgaggtgggctacgaccgaaacaacaagcagcaccacagacttctcctctgcctcctcatgacctcctgtgacctctctgaccagaccaagggctggaagactacgagaaagatcgcggagctgatctacaaagaattcttctcccagggagacctggagaaggccatgggcaacaggccgatggagatgatggaccgggagaaggcctatatccctgagctgcaaatcagcttcatggagcacattgcaatgcccatctacaagctgttgcaggacctgttccccaaagcggcagagctgtacgagcgcgtggcctccaaccgtgagcactggaccaaggtgtcccacaagttcaccatccgcggcctcccaagtaacaactcgctggacttcctggatgaggagtacgaggtgcctgatctggatggcactagggcccccatcaatggctgctgcagccttgatgctgagtgatcccctccagggacacttccctgcccaggccacctcccacagccctccactggtctggccagatgcactgggaacagagccacgggtcctgggtcctagaccaggacttcctgtgtgaccctggacaagtactaccttcctgggcctcagctttctcgtctgtataatggaagcaagacttccaacctcacggagactttgtaatttgttttctgagagcacaggggtgaccaatgagcagtgggccctactctgcacctctgaccacaccttggcaagtctttcccaagccattctttgtctgagcagcttgatggtttctccttgccccatttctgccccaccagatctttgctcctttccctttgaggactcccaccctttggggtctccaggatcctcatggaaggggaaggtgagacatctgagtgagcagagtgtggcatcttggaaacagtccttagttctgtgggaggactagaaacagccgcggggcgaaggccccctgaggaccactactatactgatggtgggattgggacctgggggatacaggggccccaggaagaagctgccagaggggcagctcagtgctctgcagagaggggccctggggagaagcaggatgggattgatgggcaggagggatccccgcactgggagacaggcccaggtatgaatgagccagccatgcttcctcctgcctgtgtgacgctgggcgagtctcttcccctgtctgggccaaacagggagcgggtaagacaatccatgctctaagatccattttagatcaatgtctaaaatagctctatcgctctgcggagtcccagcagaggctatggaatgtttctgcaaccctaaggcacagagagcccaaccctgagtgtctcagaggccccctgagtgttccccttggcctgagccccttacccattcctgcagccagtgagagacctggcctcagccctggcagggctctctcttcaaggccatatccacctgtgccctggggcttgggagaccccatagggccgggactcttgggtcagcccggccactggcttctctctttttctctgtttcattctgtgtgcgttgtggggtgggggagggggtccacctgccttacctttctgagttgcctttagagagatgcgtttttctaggactctgtgcaactgtcgtatatggtcccgtgggctgaccgctttgtacatgagaataaatctatttctttctacc

SEQ ID NO: 55466 - DNA, 3119 bp, Artificial Sequence
  derived and/or modified sequence
actcgggcggaccaggcgaagctgtcgcggacgcgctgaccgagcgcagcggccgggccggcgggcgggcgggcggctgcgagcatggtcctggtgctgcaccacatcctcatcgctgttgtccaattcctcaggcggggccagcaggtcttcctcaagccggacgagccgccgccgccgccgcagccatgcgccgacagcctgcaggacgccttgctgagtctgggctctgtcatcgacatttcaggcctgcaacgtgctgtcaaggaggccctgtcagctgtgctcccccgagtggaaactgtctacacctacctactggatggtgagtcccagctggtgtgtgaggaccccccacatgagctgccccaggaggggaaagtccgggaggctatcatctcccagaagcggctgggctgcaatgggctgggcttctcagacctgccagggaagcccttggccaggctggtggctccactggctcctgatacccaagtgctggtcatgccgctagcggacaaggaggctggggccgtggcagctgtcatcttggtgcactgtggccagctgagtgataatgaggaatggagcctgcaggcggtggagaagcataccctggtcgccctgcggagggtgcaggtcctgcagcagcgcgggcccagggaggctccccgagccgtccagaaccccccggaggggacggcggaagaccagaagggcggggcggcgtacaccgaccgcgaccgcaagatcctccaactgtgcggggaactctacgacctggatgcctcttccctgcagctcaaagtgctccaatacctgcagcaggagacccgggcatcccgctgctgcctcctgctggtgtcggaggacaatctccagctttcttgcaaggtcatcggagacaaagtgctcggggaagaggtcagctttcccttgacaggatgcctgggccaggtggtggaagacaagaagtccatccagctgaaggacctcacctccgaggatgtacaacagctgcagagcatgttgggctgtgagctgcaggccatgctctgtgtccctgtcatcagccgggccactgaccaggtggtggccttggcctgcgccttcaacaagctagaaggagacttgttcaccgacgaggacgagcatgtgatccagcactgcttccactacaccagcaccgtgctcaccagcaccctggccttccagaaggaacagaaactcaagtgtgagtgccaggctcttctccaagtggcaaagaacctcttcacccacctggatgacgtctctgtcctgctccaggagatcatcacggaggccagaaacctcagcaacgcagagatctgctctgtgttcctgctggatcagaatgagctggtggccaaggtgttcgacgggggcgtggtggatgatgagagctatgagatccgcatcccggccgatcagggcatcgcgggacacgtggcgaccacgggccagatcctgaacatccctgacgcatatgcccatccgcttttctaccgcggcgtggacgacagcaccggcttccgcacgcgcaacatcctctgcttccccatcaagaacgagaaccaggaggtcatcggtgtggccgagctggtgaacaagatcaatgggccatggttcagcaagttcgacgaggacctggcgacggccttctccatctactgcggcatcagcatcgcccattctctcctatacaaaaaagtgaatgaggctcagtatcgcagccacctggccaatgagatgatgatgtaccacatgaaggtctccgatgatgagtataccaaacttctccatgatgggatccagcctgtggctgccattgactccaattttgcaagtttcacctatacccctcgttccctgcccgaggatgacacgtccatggccatcctgagcatgctgcaggacatgaatttcatcaacaactacaaaattgactgcccgaccctggcccggttctgtttgatggtgaagaagggctaccgggatcccccctaccacaactggatgcacgccttttctgtctcccacttctgctacctgctctacaagaacctggagctcaccaactacctcgaggacatcgagatctttgccttgtttatttcctgcatgtgtcatgacctggaccacagaggcacaaacaactctttccaggtggcctcgaaatctgtgctggctgcgctctacagctctgagggctccgtcatggagaggcaccactttgctcaggccatcgccatcctcaacacccacggctgcaacatctttgatcatttctcccggaaggactatcagcgcatgctggatctgatgcgggacatcatcttggccacagacctggcccaccatctccgcatcttcaaggacctccagaagatggctgaggtgggctacgaccgaaacaacaagcagcaccacagacttctcctctgcctcctcatgacctcctgtgacctctctgaccagaccaagggctggaagactacgagaaagatcgcggagctgatctacaaagaattcttctcccagggagacctggagaaggccatgggcaacaggccgatggagatgatggaccgggagaaggcctatatccctgagctgcaaatcagcttcatggagcacattgcaatgcccatctacaagctgttgcaggacctgttccccaaagcggcagagctgtacgagcgcgtggcctccaaccgtgagcactggaccaaggtgtcccacaagttcaccatccgcggcctcccaagtaacaactcgctggacttcctggatgaggagtacgaggtgcctgatctggatggcactagggcccccatcaatggctgctgcagccttgatgctgagtgatcccctccagggacacttccctgcccaggccacctcccacagccctccactggtctggccagatgcactgggaacagagccacgggtcctgggtcctagaccaggacttcctgtgtgaccctggacaagtactaccttcctgggcctcagctttctcgtctgtataatggaagcaagacttccaacctcacggagactttgtaatttgttttctgagagcacaggggtga

SEQ ID NO: 55467 - DNA, 2853 bp, Artificial Sequence
  derived and/or modified sequence
atgagctatatcctgaagatgccaggaacttgcctgccaggggaaggcaccacctacgagcttcccccaagctctctccacccatcatccgcgcctgtgacatccggaggaacctgcccggcactgcttacggaggcgggatgggaggccccaataatggcattcactgaggcagcatctgctgtgggacctagctggacacactccagggcttcagtgtcaagtactgtaaaaacagaaaggaggcggagggtcttacaagcatgcggcatggtgaggcgaggccagcaggtgttcttaaagcctgatgagccacccccacccccacagccctgcgctgatagccttcaggatgccctgctgtccctgggcagcgtgatcgacatcagcgggttgcaacgcgctgtgaaagaggctctctctgcagtgctgcctagagtggaaactgtgtatacctatttactagatggggagtcgcagctggtatgcgaggacccgccacacgagctcccacaggagggcaaggtgcgcgaggctatcattagccagaagagactcggctgcaacggcttaggtttttccgacttgcccggaaagcccctcgcccgtctggtggcccctctggccccagatactcaagtcctggtgatgcctttggctgacaaggaggctggcgctgtggctgccgtcatcctagtccactgcggccaactctccgacaacgaggaatggagtttacaggctgtggagaaacacactctcgtggccttgcgcagagtgcaagtgcttcagcagcgcggaccgagagaagctccgagggcagtgcagaatccacccgagggtactgcagaggatcagaaagggggtgctgcatataccgatcgagatcgaaagatactgcagctatgtggcgaactgtacgacctggacgcaagttccctgcaacttaaagtgctccagtaccttcagcaggagaccagagcttcaagatgttgcttactcctggtatccgaagataatcttcagttgtcttgcaaggtcatcggcgacaaggtacttggagaggaggtgagtttccccctcaccggttgtctgggtcaagtcgtagaggacaagaagtccattcaacttaaggacctcaccagcgaagacgtgcagcagctgcaaagtatgctcgggtgcgaattgcaagccatgctgtgcgtgcctgtgatatcgagagcaaccgatcaggtggtggcgctggcatgcgcattcaataagctggaaggtgatctctttacagatgaagatgagcatgtcatccagcactgcttccattatacctcaactgtgctgacgtctactctcgccttccagaaggagcaaaagctcaagtgcgaatgccaggctctgctacaggttgccaaaaatttgtttacacatctggatgacgtgagcgtgctgttacaagaaatcataactgaagctcggaacctgagcaatgcggaaatctgcagtgtctttctcctcgatcagaacgaactggtggccaaggtgtttgacggtggagtcgtcgatgacgagtcctatgaaatccgaatccctgccgatcagggcattgccggacacgtcgcgactaccggccagatcctgaatatacctgatgcctacgcacatcccctgttttatcgcggagtagatgatagcaccgggttccgcactcgaaatatcttgtgtttcccgatcaaaaacgagaaccaggaggtgatcggtgttgccgagttggtgaacaaaatcaacggcccttggtttagtaaattcgacgaggacttagccacagccttctctatctattgtggcatttccatcgcccactcactcctctataaaaaggttaacgaagcacagtatcggtcacacctggccaacgagatgatgatgtatcacatgaaagtgagcgacgacgaatacaccaagttacttcacgacggaatacagccagttgcagcgattgactctaatttcgcgagctttacgtacaccccacggtccctgcccgaggacgacacttccatggccattctcagcatgctgcaggacatgaactttatcaacaactataagattgactgccctactctcgctagattttgtctcatggtcaagaagggatacagagatccaccttaccacaattggatgcacgcatttagtgtgtcccacttctgctatctgctctataagaaccttgaacttacgaattatctcgaagatatcgaaatctttgccctcttcatttcctgtatgtgccacgacttagaccacaggggaacaaacaacagtttccaggttgcttcaaagtccgtattggccgctctctatagtagtgagggctccgtcatggaacgccaccatttcgcgcaggctatcgcaatactgaatacccatggctgtaacatcttcgaccacttctcacggaaggattaccagagaatgctggatctgatgcgcgatataatcctcgccacagatttagcccatcatctaagaatctttaaagatcttcagaaaatggcagaggtgggctatgaccgtaataacaaacagcaccacagactgcttctctgtctgctgatgacctcctgcgatctcagcgaccagactaaaggatggaagaccaccagaaaaatcgctgagctaatctataaagaattcttctctcagggcgaccttgagaaggcaatgggcaatagacctatggagatgatggaccgggagaaagcctatattcctgagctgcaaatatccttcatggagcatatagccatgcctatatacaagctccttcaggacctgttcccaaaggcatag

SEQ ID NO: 55468 - DNA, 2805 bp, Artificial Sequence
  derived and/or modified sequence
atggtcctggtactgcaccatatccttatcgctgtagtgcagttcctgcggagaggccagcaggtgtttctgaaaccggacgagccccctccacccccacagccgtgcgctgactcactgcaggacgccctcctgtcactgggaagcgtgattgatatctccggccttcagagagctgtgaaggaggcacttagtgctgtactacccagagtggagacagtgtacacttacttactagacggtgagagtcagctcgtgtgcgaggatccccctcatgaactgccacaagaagggaaagttcgagaagctattatctctcagaagcgacttggctgcaacggattgggcttttcagacctccccggaaaacctctggcacgcctggtcgcacctctggctcccgacactcaggtgctggttatgccgttagccgacaaagaggcaggtgctgttgccgctgttatcctagtccattgtggtcagctgagcgacaacgaggagtggtcacttcaagctgtcgagaagcatacattggtggccctgcggagggtgcaggtgctgcagcagcggggacccagggaggcaccacgcgctgttcagaaccctccagagggaactgccgaggatcagaagggcggagctgcctataccgatcgcgacaggaaaatcctccagctgtgtggagagctgtacgatttggacgctagcagcttacagctgaaggtactccagtacttacagcaggagactcgcgcttcacgctgttgtttgctattggtatccgaggacaatcttcagctgtcctgtaaagtgatcggcgataaggtgttaggtgaggaggtgagcttcccattaacaggttgcttggggcaagtggtggaagataagaagtccatccagctcaaggacctcacttccgaagacgtgcagcagctccaaagtatgctcggatgcgagctgcaggcaatgctttgcgtgcctgtgatctcgagggccaccgatcaagtggtcgccttggcctgcgccttcaacaaactcgagggcgacctgtttacagatgaagacgagcacgttatccagcactgttttcattatacatctacagtgcttacaagtacccttgccttccagaaggagcagaagcttaaatgcgaatgtcaggcactgctgcaggttgctaagaatctgtttactcacctcgatgatgtgtccgttctccttcaggaaataattactgaagccagaaatttgagcaacgcagagatatgctctgtatttctgttagaccaaaatgagcttgtcgcaaaggtttttgatggaggtgtggtggatgatgaaagctacgagattagaatacccgctgaccagggaattgcagggcatgtagccacaaccgggcagattctgaatattcccgacgcatatgcccacccattgttctaccgtggagttgacgattcgactggtttcaggacccggaacattctttgctttccgatcaagaacgagaatcaggaggtcattggagtggccgagctggtgaacaaaattaacggaccatggttttctaagttcgacgaggatctcgcaaccgctttctccatatattgcgggattagcatcgcacacagcctcttgtacaagaaagttaacgaggcacagtaccgctctcacctggcaaacgaaatgatgatgtaccacatgaaggtatcggatgacgagtacaccaagctgctgcacgatggaatacagccagttgcagccatcgacagcaattttgctagcttcacatataccccgagatcactgccagaggatgatacctccatggccatattatcaatgcttcaggatatgaattttatcaataactataagatagactgtccaaccctcgctcggttttgccttatggtaaaaaagggctatagagatccgccataccacaattggatgcacgccttttccgtttcccacttctgctaccttctgtataagaaccttgagctcacaaattacctggaagacatagaaatatttgccttgttcatcagctgcatgtgccacgaccttgaccatcgaggcacaaacaactccttccaggtggcctcaaaaagcgttctggctgcactctactcatcggaaggctctgtgatggaacgccatcacttcgcccaggcaatcgccattcttaacacacatgggtgcaacatcttcgaccatttctcccggaaagactaccagaggatgctggatcttatgagagacatcattctggccaccgatctggcacaccacctgagaattttcaaagacctgcagaaaatggcagaggtaggatacgaccgtaataataagcagcatcaccgattgctgctatgtctcctgatgacttcctgtgacctgagtgatcagactaaaggatggaagacaacacgcaaaatcgccgagctgatctataaagaattctttagccaaggtgacttagagaaagctatgggcaacagaccaatggaaatgatggatcgagagaaagcctacatcccagagttgcagattagttttatggaacacattgcgatgcccatctacaaattgttgcaggacctgtttcctaaggccgcagagctttatgagcgagttgcgtctaatagggagcactggaccaaggtctcccataagttcactattcggggtcttccctctaacaactccttagatttcctggatgaggagtacgaggtgcctgatctcgacggtactcgggcaccaatcaatggctgctgctctttagacgctgagtag

SEQ ID NO: 55469 - protein, 696 aa, Artificial Sequence
  derived and/or modified sequence
MGFQPPAALLLRLFLLQGILRLLWGDLAFIPPFIRMSGPAVSASLVGDTEGVTVSLAVLQDEAGILPIPTCGVLNNETEDWSVTVIPGAVLEVTVRWKRGLDWCSSNETDSFSESPCILQTLLVSASHNSSCSAHLLIQVEIYANSSLTHNASENVTVIPNQVYQPLGPCPCNLTAGACDVRCCCDQECSSNLTTLFRRSCFTGVFGGDVNPPFDQLCSAGTTTRGVPDWFPFLCVQSPLANTPFLGYFYHGAVSPKQDSSFEVYVDTDAKDFADFGYKQGDPIMTVKKAYFTIPQVSLAGQCMQNAPVAFLHNFDVKCVTNLELYQERDGIINAKIKNVALGGIVTPKVIYEEATDLDKFITNTETPLNNGSTPRIVNVEEHYIFKWNNNTISEINVKIFRAEINAHQKGIMTQRFVVKFLSYNSGNEEELSGNPGYQLGKPVRALNINRMNNVTTLHLWQSAGRGLCTSATFKPILFGENVLSGCLLEVGINENCTQLRENAVERLDSLIQATHVAMRGNSDYADLSDGWLEIIRVDAPDPGADPLASSVNGMCLDIPAHLSIRILISDAGAVEGITQQEILGVETRFSSVNWQYQCGLTCEHKADLLPISASVQFIKIPAQLPHPLTRFQINYTEYDCNRNEVCWPQLLYPWTQYYQGELHSQCVAKGLLLLLFLTLALFLSNPWTRICKAYS

SEQ ID NO: 55470 - DNA, 2091 bp, Artificial Sequence
  derived and/or modified sequence
atgggcttccagccccccgccgccctgctgctgagactgttcctgctgcagggcatcctgagactgctgtggggcgacctggccttcatcccccccttcatcagaatgagcggccccgccgtgagcgccagcctggtgggcgacaccgagggcgtgaccgtgagcctggccgtgctgcaggacgaggccggcatcctgcccatccccacctgcggcgtgctgaacaacgagaccgaggactggagcgtgaccgtgatccccggcgccgtgctggaggtgaccgtgagatggaagagaggcctggactggtgcagcagcaacgagaccgacagcttcagcgagagcccctgcatcctgcagaccctgctggtgagcgccagccacaacagcagctgcagcgcccacctgctgatccaggtggagatctacgccaacagcagcctgacccacaacgccagcgagaacgtgaccgtgatccccaaccaggtgtaccagcccctgggcccctgcccctgcaacctgaccgccggcgcctgcgacgtgagatgctgctgcgaccaggagtgcagcagcaacctgaccaccctgttcagaagaagctgcttcaccggcgtgttcggcggcgacgtgaacccccccttcgaccagctgtgcagcgccggcaccaccaccagaggcgtgcccgactggttccccttcctgtgcgtgcagagccccctggccaacacccccttcctgggctacttctaccacggcgccgtgagccccaagcaggacagcagcttcgaggtgtacgtggacaccgacgccaaggacttcgccgacttcggctacaagcagggcgaccccatcatgaccgtgaagaaggcctacttcaccatcccccaggtgagcctggccggccagtgcatgcagaacgcccccgtggccttcctgcacaacttcgacgtgaagtgcgtgaccaacctggagctgtaccaggagagagacggcatcatcaacgccaagatcaagaacgtggccctgggcggcatcgtgacccccaaggtgatctacgaggaggccaccgacctggacaagttcatcaccaacaccgagacccccctgaacaacggcagcacccccagaatcgtgaacgtggaggagcactacatcttcaagtggaacaacaacaccatcagcgagatcaacgtgaagatcttcagagccgagatcaacgcccaccagaagggcatcatgacccagagattcgtggtgaagttcctgagctacaacagcggcaacgaggaggagctgagcggcaaccccggctaccagctgggcaagcccgtgagagccctgaacatcaacagaatgaacaacgtgaccaccctgcacctgtggcagagcgccggcagaggcctgtgcaccagcgccaccttcaagcccatcctgttcggcgagaacgtgctgagcggctgcctgctggaggtgggcatcaacgagaactgcacccagctgagagagaacgccgtggagagactggacagcctgatccaggccacccacgtggccatgagaggcaacagcgactacgccgacctgagcgacggctggctggagatcatcagagtggacgcccccgaccccggcgccgaccccctggccagcagcgtgaacggcatgtgcctggacatccccgcccacctgagcatcagaatcctgatcagcgacgccggcgccgtggagggcatcacccagcaggagatcctgggcgtggagaccagattcagcagcgtgaactggcagtaccagtgcggcctgacctgcgagcacaaggccgacctgctgcccatcagcgccagcgtgcagttcatcaagatccccgcccagctgccccaccccctgaccagattccagatcaactacaccgagtacgactgcaacagaaacgaggtgtgctggccccagctgctgtacccctggacccagtactaccagggcgagctgcacagccagtgcgtggccaagggcctgctgctgctgctgttcctgaccctggccctgttcctgagcaacccctggaccagaatctgcaaggcctacagctag

SEQ ID NO: 55471 - DNA, 2091 bp, Artificial Sequence
  derived and/or modified sequence
atgggttttcagcccccagctgccttgctgctaaggctcttccttctgcaaggtatcttgcggttgctctggggagacctcgcatttatccctccttttatacgcatgtccgggccagccgtgtccgcgagcctggttggggacacagaaggagtgaccgtgagtttggcagtactccaagacgaggcgggtattctcccgatccctacctgtggcgtgctgaacaacgagacggaggactggtctgtcactgtgattccgggggctgtcctggaagtgacggtgaggtggaaaagaggcctggattggtgttcttccaacgaaactgactcatttagtgagagcccgtgcatcctacaaactctcctggtgtctgcatctcacaactcatcctgtagcgcacacctcttgattcaggtggagatctatgcgaactcttctctgactcataatgcctccgagaatgtgactgtgatccccaaccaagtgtatcagccattgggcccatgtccgtgcaacctaaccgccggggcatgcgacgtcagatgctgctgtgaccaggaatgttcctctaacctaacaacactgtttagaaggtcatgttttacgggcgtattcggaggcgatgttaatccaccattcgaccagctctgctcggcgggcaccacaacccgtggagtgcctgattggtttccgttcctgtgtgttcagtcgccgctggcgaacaccccttttctgggctacttttatcacggtgccgtgtcccccaagcaggatagctccttcgaagtatatgtagatacagacgcgaaagacttcgctgatttcggatacaaacagggagacccgataatgactgtaaagaaggcgtactttaccattcctcaggtgagcctggcagggcaatgcatgcagaatgcgcccgtagcattcctgcacaatttcgacgtgaagtgtgtgacgaacctggaactctatcaggaaagggacggaattatcaacgccaagatcaaaaacgtcgcacttggtggtatagtaacccctaaggtgatctatgaagaagctaccgacctggacaaatttatcactaataccgagacccctcttaacaatggctcgactccccggatcgtgaacgtagaagagcactacatcttcaaatggaacaacaacacaatctcggagattaatgtcaagatttttagggcggaaattaacgcgcaccaaaaaggtattatgacccaaaggtttgtagtaaagttcctgtcatacaatagcgggaacgaagaagagctgtccggaaacccgggctatcaactgggaaaacccgttagagctctcaatattaatagaatgaataatgttaccactctgcacctgtggcagtcggccggacgcggactgtgtacatccgcgacctttaagccgatactgtttggtgaaaacgtcctgtccggttgtctcctagaggtggggatcaatgagaattgcactcagctcagggaaaacgctgttgagcggttggacagcttgattcaggctacacatgtcgccatgcgaggtaattcagattacgcggatctgtctgatggatggctggagatcatcagggtggacgcacccgatcccggagcggaccccctggcctcatccgttaatggcatgtgcctcgacattccggctcacttgagtatcagaatccttatctctgacgcgggagcagtggagggaatcacacagcaggaaattttgggagttgaaaccaggttctcatccgtaaactggcaataccagtgcggcctgacctgtgagcacaaggccgatttactacctatcagcgcatccgtgcagttcattaagattcccgcacagctgccgcatccactgacgagatttcagatcaattacacagagtatgattgcaaccgaaatgaagtgtgctggcctcaactcctatacccctggacgcaatattatcagggtgagttacattcccagtgtgtagccaagggcttgctgctactgttgttcctcaccctggccctgtttctgagcaatccatggacaaggatttgtaaggcttactcatag

SEQ ID NO: 55472 - DNA, 2091 bp, Artificial Sequence
  derived and/or modified sequence
atgggcttccagcccccagctgccctgctgctgcggctcttcctgctgcagggcatcctgcggctgctgtggggagacctggccttcatcccccccttcatccgcatgagcggccctgctgtgtctgccagcctggtgggggacacagaaggagtgacagtgtccctggccgtgctgcaggatgaagctggcatcctgcccatccccacctgtggggtgctgaacaatgaaacagaggactggagcgtgaccgtcatccctggagctgtgctggaggtgacagtgcgctggaagaggggcctggactggtgcagcagcaatgaaacagacagcttcagcgagagcccctgcatcctgcagaccctgctggtgtctgccagccacaacagcagctgcagcgcccacctgctgatccaggtggagatctatgccaacagcagcctgacccacaatgcctctgaaaatgtgaccgtcatccccaaccaggtgtaccagcccctgggcccctgcccctgcaacctgacagctggggcctgtgatgtgcgctgctgctgtgaccaggagtgcagcagcaacctgaccaccctcttccgccgcagctgcttcaccggggtgtttggaggagatgtgaaccccccatttgaccagctgtgcagcgctggcaccaccacccggggcgtgcctgactggttccccttcctgtgtgtgcagagccccctggccaacacccccttcctgggctacttctaccatggagctgtgagccccaagcaggacagcagctttgaggtgtatgtggacacagatgccaaggactttgctgactttggctacaagcagggcgaccccatcatgacagtgaagaaggcctacttcaccatcccccaggtgtccctggccggccagtgcatgcagaatgcccctgtggccttcctgcacaactttgatgtgaagtgtgtgaccaacctggagctgtaccaggagagagatggcatcatcaatgccaagatcaagaatgtggccctgggcggcatcgtgacccccaaggtgatctatgaggaggccacagacctggacaagttcatcaccaacacagagacccccctgaacaacggcagcaccccaagaattgtgaatgtggaggagcactacatcttcaagtggaacaacaacaccatcagcgagatcaacgtgaagatcttccgggcagagatcaatgcccaccagaagggcatcatgacccagagatttgtggtgaagttcctgagctacaacagcggaaatgaggaggagctgagcggcaaccctggctaccagctgggcaagcctgtgcgggccctgaacatcaacaggatgaacaacgtgaccaccctgcacctgtggcagagcgctggccggggcctgtgcaccagcgccaccttcaagcccatcctgtttggagaaaatgtgctgagcggctgcctgctggaggtgggcatcaatgaaaactgcacccagctgcgggagaatgctgtggagcggctggacagcctcatccaggccacccacgtggccatgaggggcaacagcgactatgctgacctgagtgatggctggctggagatcatccgggtggatgccccagaccctggagctgaccccctggccagctctgtgaatggcatgtgcctggacatcccagcccacctgagcatccgcatcctgatcagtgatgctggagctgtggagggcatcacccagcaggagatcctgggcgtggagacccgcttcagctctgtgaactggcagtaccagtgtggcctgacctgtgagcacaaggctgacctgctgcccatcagcgcctctgtgcagttcatcaagatcccagcccagctgccccaccccctgacccgcttccagatcaactacacagaatatgactgcaacagaaatgaggtgtgctggccccagctgctgtacccctggacccagtactaccagggcgagctgcacagccagtgtgtggccaagggcctgctgctgctgctcttcctgaccctggccctcttcctgagcaacccctggacccgcatctgcaaggcctacagctag

SEQ ID NO: 55473 - DNA, 2091 bp, Artificial Sequence
  derived and/or modified sequence
atgggcttccagccccccgccgccctgctgctgcggctgttcctgctccagggcatcctcagattactgtggggtgacctcgcctttatcccccctttcatccgaatgtcgggacctgccgttagcgcttctctcgtgggcgacaccgagggagtaaccgtttccctcgccgtcctccaggacgaagcaggaatcttacccatcccgacatgcggtgtacttaacaatgagacggaggactggagtgttaccgtgatccccggggcggtcctggaggtcacagtaaggtggaaacgaggcttagattggtgtagctctaacgagaccgacagcttctccgaatccccatgcatcctccagaccctgctggtgagtgcatcacataattcctcttgctccgcgcatctattgatccaggtggagatctatgcaaactccagcttaacacacaacgcttccgagaacgtcaccgttattcccaaccaggtttatcagcccctgggaccctgcccctgcaatctgaccgcgggcgcatgtgacgtgcgctgctgttgcgaccaggaatgctcctctaacctaaccactctttttaggagatcatgtttcacaggtgtttttggaggagacgtcaaccccccatttgatcagctctgttcagccggtactacaaccagaggcgttccagactggtttcctttcttatgtgtccaatccccactggccaacactccattccttgggtacttctaccacggagctgtttctcccaaacaggactcttcgtttgaagtgtacgtcgacacggatgcgaaggacttcgctgacttcgggtacaagcagggtgaccctattatgacggtgaaaaaggcctactttactattcctcaggtgagtctggccggccagtgcatgcagaacgcaccagtggcctttctgcataattttgacgtcaaatgcgtgaccaatctggagctgtatcaagaacgagacggaatcattaatgcaaaaatcaagaacgtcgcgctcgggggcatcgtcactcccaaagtgatctatgaagaggcgactgacttggacaagttcatcactaacaccgaaactcccctgaacaacggcagtacgccgcgcattgttaacgtcgaagaacactatattttcaagtggaataataacactattagtgaaatcaatgttaaaatcttccgggccgagatcaatgcacatcaaaagggcatcatgacccaacggttcgtggtgaagtttctctcatataactccggcaacgaggaagagctgagtggcaacccagggtaccagctaggaaagcccgtccgtgccctaaacatcaatagaatgaataacgtgactacgctgcatctctggcaatccgccggccgcggactatgtaccagcgcaacattcaaacctattctattcggagaaaatgttttatctggatgtctgcttgaggtgggtattaatgaaaactgtacccagctgagggagaacgctgtggagcgcctggactcactcattcaggccacccacgtagcaatgcgggggaatagtgactatgccgacctgagcgatggatggttggagattattagggtggacgctccggacccgggcgcagacccattggcttcttcggttaacgggatgtgtctggacatccctgcacatctctcaatccgcatcctcatttctgatgcgggagccgttgaaggaatcacgcaacaagaaatcctcggcgtggaaacacggttcagttccgtgaactggcagtatcaatgcggtcttacttgcgaacacaaagccgacctgttacccatctcagcctccgtccagtttattaaaattcccgcccagctgccacacccactgaccaggttccagatcaactacacagagtacgactgcaaccggaatgaggtctgctggccccagcttttgtacccatggacgcagtactaccagggggagctgcactcccagtgcgtggctaaagggctgctgcttttgctgttcctgaccctggccctgtttctgtccaacccatggacacgcatctgtaaggcttattcatag

SEQ ID NO: 55474 - DNA, 2091 bp, Artificial Sequence
  derived and/or modified sequence
atgggatttcagccaccagccgctctgctcctgcggctgttcctcctgcagggcatcctgaggttactgtggggtgacttagcctttataccaccattcatccgcatgtccggtcctgcggtcagtgcctcactagtgggcgatactgagggggtgacggtaagcctcgctgttctgcaggacgaagctggaattctgcccatcccaacctgcggtgtactcaacaacgagacagaggattggtccgtcactgtgattccaggagcagtcctggaagttactgtgcgctggaagcgcggtttggactggtgctcttcaaacgagaccgactcattctcagagagcccgtgtattcttcagactttactggtgagcgctagtcataactcttcctgctcagcccatttgttaatccaggtggaaatttacgctaacagctccctcactcacaacgcaagtgaaaacgttacagtcatcccaaaccaggtgtaccaaccattaggtccctgcccctgcaatctcactgctggcgcatgtgatgttagatgttgctgcgaccaggagtgttctagtaacctgacaacattgttccggaggagctgtttcaccggcgtgtttgggggtgacgtcaacccaccattcgaccagctgtgctcagccggtactacaacccgcggagtgcccgactggttcccatttctatgtgtccaatcacccctagccaatacccctttcctggggtatttttatcatggcgcagtatcaccaaagcaggattcttccttcgaggtttacgttgacacagatgctaaagatttcgctgactttggttacaagcagggggatccaatcatgaccgtgaagaaggcctacttcacaataccgcaggtatccctggcagggcagtgcatgcagaacgccccagtggcctttcttcataatttcgatgtgaagtgtgttactaacttagagctgtaccaagaacgggacggcattataaacgcaaagattaaaaatgtggcattaggagggatcgtcacgcctaaggtgatatacgaggaagccactgacctggataagtttattacaaacacagagactcccctgaacaacggctccaccccccgtattgtgaacgtggaagagcactatatctttaaatggaataataatacaataagcgagattaacgtgaagatttttagggcggagatcaatgcccaccagaaaggcattatgactcagcggttcgtggttaagttccttagctacaactccggaaacgaggaagagctttcaggcaatcccggttaccagttaggaaagcccgtcagggcacttaacataaaccggatgaacaacgtgacgaccctgcatctatggcagtcagccggtagggggctttgtactagtgcaacattcaagccgatcctgtttggcgagaacgtactcagcggatgcctgctggaagtcggcattaatgagaactgtacacagttgagggaaaacgcagtggaacgcctagattcccttattcaggcaacccacgtcgcaatgcggggtaatagcgactacgctgatctgagcgatgggtggctggagatcattagggtcgacgcccctgatcccggtgctgatccattagcttcttcggtcaacgggatgtgcctagatatccctgcccacctgagcattagaatcctgatatctgacgcaggagcagtcgaaggaattacccagcaagaaatactgggggtggaaacgagatttagcagcgtaaactggcagtatcagtgtggactgacctgcgaacataaggcggacttactccctatatccgccagcgtacagtttatcaagatcccagctcagttacctcatcccctgacaaggtttcagatcaactatacagagtacgattgcaaccggaacgaggtatgctggccccagttgctgtacccatggacacagtattatcaaggggagttgcactcacagtgcgtagctaaaggactgctgttattgttgtttctgaccctggccctgtttctttctaatccgtggacaagaatctgtaaggcatattcctag

SEQ ID NO: 55475 - DNA, 2513 bp, Artificial Sequence
  derived and/or modified sequence
atagctccgggcgttcgcttgcaagatggcggcggcggggcagtggctgctgcgttttcgtgtctgagtccttcctgggttctaatgagggcgcggttctgctgtgcccggcccgcgaggtctaaggcatgggcttccagcctccggccgctcttcttttgaggcttttccttctgcagggcatcctgaggcttctgtggggggacctggctttcatccctccttttatccgaatgtccggccctgcggtcagcgcgtccctggtcggagacaccgagggtgtgaccgtgtccctggcagtgctgcaggacgaggcgggaatattgccaattccgacgtgtggagtgctgaacaatgagacggaagactggagcgtgactgtgatccccggtgcggtgttggaagtgacagtgaggtggaagagaggtctggactggtgttcctccaatgagacagattccttctcagagtccccctgtatcctccagacccttctggtttcagcatctcataattcatcctgttcagcacatctactcattcaagtggaaatttatgccaactcttctctgacccataatgcctcagagaacgtgactgtcattcctaaccaggtgtatcagccccttggcccttgtccttgtaatttaacagctggagcctgtgatgttcgctgctgctgtgaccaggaatgctcatcaaatttaacaacgctgttcagacggtcctgcttcaccggcgtgtttggaggagacgtcaatcctccttttgatcagctctgctctgctgggacgacgacacgtggtgtccccgattggtttccctttctgtgtgtgcagtccccccttgccaacacacccttccttggttacttctatcatggtgctgtttcccccaaacaggactcttcctttgaagtatatgtggatactgacgcaaaagactttgcagactttggttacaaacaaggagatcccattatgactgtaaagaaggcatattttactattccgcaggtgtccctggctgggcagtgtatgcagaacgccccagtggcatttcttcacaattttgatgttaaatgcgttactaatttggaactataccaagaacgagatggtattatcaatgcgaagataaagaatgttgccttaggaggcatagttacaccaaaagtgatctatgaggaagcaactgacctagacaaattcatcaccaatacagaaactcctttaaataacggatcaacccctagaattgtgaatgtggaagaacattatattttcaaatggaataataataccatcagtgaaataaatgttaaaatttttagggcagagattaatgcccaccagaaagggataatgacacagagatttgtagtaaaatttttaagctataatagtggtaatgaagaagaattatctggaaatccaggttaccaacttggcaagcctgtccgagctctaaatatcaacaggatgaataatgtcacgactttacatctttggcaatcggctggaaggggtctgtgtacatcagcaactttcaaacccattttatttggagaaaatgtactctctggatgcctgttagaagtcgggattaatgaaaattgtactcagctcagggagaatgctgttgaaagacttgattcattaatacaagcgactcacgttgcaatgagaggcaactccgattacgctgatcttagtgatggctggctcgaaataatacgtgtagatgcccctgatccaggtgcagacccgctggctagcagtgtgaacggcatgtgcctggatattcctgctcacctgagcatccgcatcctcatctcggatgctggcgcggtggaagggattactcagcaggagatactcggtgtagagacaaggttctcctcagtgaactggcagtaccagtgtgggcttacctgtgagcacaaggccgaccttctccctatcagtgcatccgtccagtttattaaaattcctgcacagttaccccaccccctgacaagattccagatcaattatacagagtatgactgcaacagaaatgaggtgtgttggccgcagcttctatatccatggactcagtattatcaaggggagctgcattctcagtgtgttgctaagggcttactgttgctgttgttcctcacattggccttgttcctcagcaacccctggaccagaatatgcaaagcctatagttagacaaccacctggcttttatttttttgagatggagttttgctcttgttgcccaggctgaagtgatctcggctcaccacaacctcctcctcttgggttcaagcgattctcctgcctcagcctccggagaactgggattacaggcatgcaccaccacgcccggctaattttgtatttttagtagagacagggttccaccgtattggccaggctgctctcgaactcctgacctcatgatccgcccatcttggcctcccaaagtgctgagattacaggcatgagccaccgcacccggcc

SEQ ID NO: 55476 - protein, 694 aa, Artificial Sequence
  derived and/or modified sequence
MTDTVFSNSSNRWMYPSDRPLQSNDKEQLQAGWSVHPGGQPDRQRKQEELTDEEKEIINRVIARAEKMEEMEQERIGRLVDRLENMRKNVAGDGVNRCILCGEQLGMLGSACVVCEDCKKNVCTKCGVETNNRLHSVWLCKICIEQREVWKRSGAWFFKGFPKQVLPQPMPIKKTKPQQPVSEPAAPEQPAPEPKHPARAPARGDSEDRRGPGQKTGPDPASAPGRGNYGPPVRRASEARMSSSSRDSESWDHSGGAGDSSRSPAGLRRANSVQASRPAPGSVQSPAPPQPGQPGTPGGSRPGPGPAGRFPDQKPEVAPSDPGTTAPPREERTGGVGGYPAVGAREDRMSHPSGPYSQASAAAPQPAAARQPPPPEEEEEEANSYDSDEATTLGALEFSLLYDQDNSSLQCTIIKAKGLKPMDSNGLADPYVKLHLLPGASKSNKLRTKTLRNTRNPIWNETLVYHGITDEDMQRKTLRISVCDEDKFGHNEFIGETRFSLKKLKPNQRKNFNICLERVIPMKRAGTTGSARGMALYEEEQVERVGDIEERGKILVSLMYSTQQGGLIVGIIRCVHLAAMDANGYSDPFVKLWLKPDMGKKAKHKTQIKKKTLNPEFNEEFFYDIKHSDLAKKSLDISVWDYDIGKSNDYIGGCQLGISAKGERLKHWYECLKNKDKKIERWHQLQNENHVSSD

SEQ ID NO: 55477 - protein, 83 aa, Artificial Sequence
  derived and/or modified sequence
MTDTVFSNSSNRWMYPSDRPLQSNDKEQLQAGWSVHPGGQPDRQRKQEELTDEEKEIINRVIARAEKMEEMEQERIGRLVDRL

SEQ ID NO: 55478 - protein, 94 aa, Artificial Sequence
  derived and/or modified sequence
MTDTVFSNSSNRWMYPSDRPLQSNDKEQLQAGWSVHPGGQPDRQRKQEELTDEEKEIINRVIARAEKMEEMEQERIGRLVDRLENMRKNVAGDG

SEQ ID NO: 55479 - protein, 163 aa, Artificial Sequence
  derived and/or modified sequence
MTDTVFSNSSNRWMYPSDRPLQSNDKEQLQAGWSVHPGGQPDRQRKQEELTDEEKEIINRVIARAEKMEEMEQERIGRLVDRLENMRKNVAGDGVNRCILCGEQLGMLGSACVVCEDCKKNVCTKCGVETNNRLHSVWLCKICIEQREVWKRSGAWFFKGFPK

SEQ ID NO: 55480 - protein, 127 aa, Artificial Sequence
  derived and/or modified sequence
MTDTVFSNSSNRWMYPSDRPLQSNDKEQLQAGWSVHPGGQPDRQRKQEELTDEEKEIINRVIARAEKMEEMEQERIGRLVDRLENMRKNVAGDGVNRCILCGEQLGMLGSACVVCEDCKKNVCTKCG

SEQ ID NO: 55481 - protein, 104 aa, Artificial Sequence
  derived and/or modified sequence
MTDTVFSNSSNRWMYPSDRPLQSNDKEQLQAGWSVHPGGQPDRQRKQEELTDEEKEIINRVIARAEKMEEMEQERIGRLVDRLENMRKNVAGDGVNRCILCGEQ

SEQ ID NO: 55482 - protein, 39 aa, Artificial Sequence
  derived and/or modified sequence
MTDTVFSNSSNRWMYPSDRPLQSNDKEQLQAGWSVHPGG

SEQ ID NO: 55483 - protein, 115 aa, Artificial Sequence
  derived and/or modified sequence
MTDTVFSNSSNRWMYPSDRPLQSNDKEQLQAGWSVHPGGQPDRQRKQEELTDEEKEIINRVIARAEKMEEMEQERIGRLVDRLENMRKNVAGDGVNRCILCGEQLGMLGSACVVC

SEQ ID NO: 55484 - protein, 125 aa, Artificial Sequence
  derived and/or modified sequence
MTDTVFSNSSNRWMYPSDRPLQSNDKEQLQAGWSVHPGGQPDRQRKQEELTDEEKEIINRVIARAEKMEEMEQERIGRLVDRLENMRKNVAGDGVNRCILCGEQLGMLGSACVVCEDCKKNVCTK

SEQ ID NO: 55485 - protein, 181 aa, Artificial Sequence
  derived and/or modified sequence
MTDTVFSNSSNRWMYPSDRPLQSNDKEQLQAGWSVHPGGQPDRQRKQEELTDEEKEIINRVIARAEKMEEMEQERIGRLVDRLENMRKNVAGDGVNRCILCGEQLGMLGSACVVCEDCKKNVCTKCGVETNNRLHSVWLCKICIEQREVWKRSGAWFFKGFPKQVLPQPMPIKKTKPQQPV

SEQ ID NO: 55486 - protein, 120 aa, Artificial Sequence
  derived and/or modified sequence
MTDTVFSNSSNRWMYPSDRPLQSNDKEQLQAGWSVHPGGQPDRQRKQEELTDEEKEIINRVIARAEKMEEMEQERIGRLVDRLENMRKNVAGDGVNRCILCGEQLGMLGSACVVCEDCKK

SEQ ID NO: 55487 - protein, 134 aa, Artificial Sequence
  derived and/or modified sequence
MTDTVFSNSSNRWMYPSDRPLQSNDKEQLQAGWSVHPGGQPDRQRKQEELTDEEKEIINRVIARAEKMEEMEQERIGRLVDRLENMRKNVAGDGVNRCILCGEQLGMLGSACVVCEDCKKNVCTKCGVETNNRL

SEQ ID NO: 55488 - DNA, 2085 bp, Artificial Sequence
  derived and/or modified sequence
atgactgatacggttttcagcaatagctccaaccggtggatgtacccaagtgaccggcctctgcagtccaatgacaaggaacagttgcaagctggttggagcgtgcacccaggaggacaacccgaccgacagcggaaacaggaggaactgacagacgaagagaaagaaatcatcaaccgtgtcatagcaagggccgaaaaaatggaagagatggagcaggagcgaatcggccgactggtagatagattggaaaacatgaggaaaaatgtggccggcgacggcgtgaatcggtgcattctgtgtggagagcagctagggatgctcggcagcgcgtgtgtggtctgtgaggattgtaagaaaaacgtatgcaccaaatgcggcgttgaaacaaataaccggctgcatagcgtctggctttgcaaaatttgtatcgagcaacgtgaggtgtggaagagaagtggcgcttggttttttaagggctttcctaagcaggtgctcccccagcccatgccaatcaagaaaacaaaaccgcagcagcctgtgtccgagcctgccgctcccgagcaacctgcccctgagcctaagcatcccgcaagagctcctgcccgtggagacagcgaggatcgacgcgggccaggccagaagacaggccccgatcccgcctctgctcccggaagggggaattacgggccaccagtaagacgggctagtgaggcacgcatgagctctagctcacgggattcagaatcctgggaccactccggtggcgcgggggattctagcaggtcccctgctggattgcgcagagcaaacagtgtgcaggcctcacgccccgcccccggctcagtccagtccccagcccctccccagcctggccaacccgggacaccaggcggcagtcgcccagggcccggccctgcgggcagatttccagaccagaaaccagaagtagccccctcagatcctggcaccacggccccacctcgcgaggagcgcaccggcggtgtgggcgggtaccccgctgtgggcgcacgagaagaccgaatgtcacatccatccgggccatacagccaagccagcgcggccgcccctcagcctgcggcagcccgtcaaccacccccccctgaagaggaagaggaggaggcaaactcctatgacagtgatgaggcaacgacactcggagcccttgaatttagccttctctacgatcaggataactcatcattgcagtgtacaatcatcaaagccaagggcttgaagccaatggattccaatgggctcgctgatccatatgtcaagctgcacttgcttcccggggctagcaaatcaaacaaactccggacgaaaacgttgcgaaataccagaaatccgatttggaacgagaccctggtgtaccatgggataacggacgaagatatgcagcgcaagactctccgaatctccgtgtgtgacgaagacaagtttggccacaatgaatttatcggcgagacgcggtttagcttaaagaaactgaagcctaaccaacgtaagaatttcaatatctgtctagagcgcgtcatcccaatgaagcgcgctggcaccacagggtccgcaagaggtatggccctctacgaagaagagcaggtggaaagagtgggagacatcgaggagagaggaaaaatcctggtcagcttgatgtattcaacacagcagggcggcttaatcgtgggcatcatcaggtgtgtgcaccttgccgctatggacgccaacggttattctgatcctttcgtgaagttgtggctcaagcccgatatggggaagaaggccaaacacaaaacccaaattaaaaaaaagactctgaatcccgaattcaacgaagagttcttctatgacataaaacactccgatctggctaagaaaagccttgacattagtgtctgggattacgatatagggaagagcaatgactatataggcggttgccagctcggtatttcagccaagggtgaaagactgaagcactggtatgaatgtttgaagaataaagacaaaaagattgagagatggcatcagctccagaacgaaaaccatgtcagcagcgactag

SEQ ID NO: 55489 - DNA, 2085 bp, Artificial Sequence
  derived and/or modified sequence
atgacagacaccgtgttctcaaactcaagcaaccgttggatgtacccatccgatcggcctctccagtccaatgacaaggagcagctgcaggccggctggtctgtgcacccaggcgggcagccagatcgccaaaggaagcaggaggagttgaccgatgaggagaaggagattatcaaccgagtcatcgcacgggccgaaaagatggaggaaatggagcaggagagaattggcaggctggtagacagactcgagaatatgcgcaaaaacgtggcgggcgacggagtgaataggtgcatactgtgtggggagcaactcggcatgctcggctcagcgtgcgttgtgtgcgaggactgcaaaaaaaacgtttgcacgaaatgcggtgtagaaactaataataggctgcactcagtgtggctttgcaagatctgtatcgaacagcgagaagtgtggaaacgatccggggcttggttctttaaggggttcccgaagcaggtattgccacagcccatgcctattaagaagactaagccacagcagcccgtgtcagagcctgctgcccctgagcagcccgcgcccgaacccaagcatcccgcacgcgctcctgcccggggtgactcggaggaccgacgaggcccgggccaaaaaacaggacctgacccagcctcagctcctgggaggggtaactatggcccgcccgtgaggcgggcttcagaggctagaatgtctagcagctcccgggattccgaaagctgggatcactccggaggagccggagattcgtcgcgttcaccagccggcctgaggcgcgcgaattctgtccaggcaagtagacccgcaccaggatccgtgcaatctccagctcctccacaaccgggacagccggggacccctgggggatcgaggcccggacccggccctgctggcagattccctgaccagaaaccagaggttgccccttctgatcctggaaccactgctcctccgcgcgaagagcggaccggtggcgttggtggctaccccgctgtcggggcaagggaggatcgaatgtctcacccttccggaccatatagccaggcctccgctgcagctcctcagcccgccgccgcccgccaaccgcctcctcccgaagaagaagaggaggaggccaactcttacgacagcgacgaagcaactaccttgggtgccctcgagttctcacttttgtacgatcaggataactcctcacttcagtgcactatcatcaaggcgaagggtctaaagccgatggactcaaacggattggctgatccatatgtaaaactacacctgctcccaggagcctcaaagagtaataagttgaggaccaagactttgagaaacacccggaatccaatctggaatgaaaccttggtttaccacggaatcacagacgaggatatgcagcgaaagaccctgcgaatctccgtgtgcgacgaggacaagtttggccataatgaattcattggggagacaagatttagcctgaaaaaattaaagccgaatcagaggaagaactttaatatttgcctggagcgtgtgataccgatgaaacgggccggcaccaccggatctgcccggggcatggcactgtatgaggaagagcaggtagagagggtcggagacattgaagagcgtgggaagattcttgtgtctctgatgtacagtacacaacagggaggcctgatagtggggattatacgctgtgttcatcttgcagcaatggatgcaaacggttattcagaccccttcgtaaagctgtggctgaaacccgacatgggaaagaaggctaaacacaagacgcagattaaaaagaagacccttaatccggaattcaatgaagagtttttttatgatatcaagcactctgaccttgctaagaagtcactggatatctccgtctgggactacgatatcggtaaaagcaacgattacattggcggctgccagctggggatttccgccaaaggcgaaagactcaaacactggtacgagtgcttgaagaataaggacaagaaaatagaacgctggcatcagctgcagaatgagaaccatgtgtcttccgattag

SEQ ID NO: 55490 - DNA, 2085 bp, Artificial Sequence
  derived and/or modified sequence
atgaccgatacggtcttctccaatagctcgaataggtggatgtacccctcagaccggcccctgcagagcaatgacaaggaacaattgcaagccggatggagcgttcaccctggagggcagcccgatcggcagagaaaacaagaggaactcacagatgaagaaaaggaaattataaaccgggtgattgcacgggccgagaagatggaggagatggaacaggaacgtattggacgcttggtggacagattagaaaatatgaggaaaaacgtggccggagacggagttaaccggtgtatactctgcggggaacagctgggcatgctggggagcgcttgcgtggtatgcgaagattgcaagaaaaacgtttgtaccaaatgcggcgttgagactaacaacaggctccactccgtctggctgtgcaaaatatgcattgaacaaagagaggtgtggaaaaggtccggagcctggttcttcaaggggttccctaagcaggtgctgccccagccaatgcctattaagaaaacaaagcctcagcagcctgtgtccgagcccgccgcccccgaacagccagctccagagcccaaacaccccgcacgcgcccctgcccgtggagattctgaggatcgtcggggccccggacagaaaacaggacctgacccagccagtgcgcctgggaggggaaactacggaccgcccgttcggagggcatcagaggccaggatgtcttcctcaagtagggattcggaatcatgggaccattcaggaggggcgggggacagcagtcgatctccagccggcctgcgacgcgcgaattcagtgcaggcctcccgccccgcgcccggctccgtgcaatcgcccgcccccccccagcctggacagccaggaactcccggcggctcccgccctggccctgggccagctggtagattccctgaccaaaagcctgaggtggctccctccgatccgggaactacagcccccccgagagaggaacggaccggaggtgtcggaggctaccctgctgtgggggcaagagaagaccgaatgtcacaccccagcggcccatactcccaggcctcggctgcagcacctcagccagccgctgcaaggcagccccctccccctgaggaggaagaagaagaagccaattcctatgacagtgacgaggcaaccactctcggagcattagaattctccctgctgtacgatcaggacaactcctcactgcaatgcactatcatcaaagctaaggggctgaaaccaatggactcgaacggcctcgccgacccttacgtgaagctccacctgctgcccggagcctctaaatccaacaaactgagaacaaaaacccttagaaatacgcgaaacccaatctggaacgaaaccctcgtgtaccacgggattaccgatgaagacatgcaaaggaagacgctgaggatatctgtttgtgacgaagataagttcggacacaatgaatttattggagaaacacgtttcagcctcaaaaagctgaagccaaaccagagaaagaacttcaatatctgcctcgagcgggtgataccgatgaagcgagctgggacgacaggtagtgcccggggcatggcgctgtacgaagaggagcaagtcgagagagtgggagacattgaggaacggggcaagatcctggtctccctcatgtatagtacccagcaaggtggcctaatcgtgggtatcatcaggtgcgtgcatctggcagccatggatgccaacggctactctgaccctttcgtgaaactttggctcaagcccgatatggggaagaaagcaaaacataagactcagattaagaagaaaacactcaacccggagtttaacgaggaatttttttatgacattaagcattccgacctggcgaagaagagcctggacatctccgtgtgggactacgacattgggaagagtaacgactacattgggggctgccaactggggatttccgcaaaaggggagcgactgaaacactggtacgagtgccttaaaaacaaggacaagaaaatcgagaggtggcaccagctccaaaatgagaatcatgtgagcagcgactag

SEQ ID NO: 55491 - DNA, 2085 bp, Artificial Sequence
  derived and/or modified sequence
atgacggataccgtgttcagcaacagcagcaatcgctggatgtacccatcggaccggccgctacagtcaaatgataaagaacagctgcaggcggggtggtcggtacaccccggaggccagccggatcgccaacgcaagcaggaggagctgaccgacgaggagaaggaaataattaaccgtgtgatcgcaagggccgaaaaaatggaggagatggagcaggagcggattgggcggcttgtggaccgccttgagaacatgcgtaagaacgtggccggtgatggagtgaatcggtgcatcctatgcggcgagcagctgggcatgcttggatccgcctgcgtggtttgcgaggattgcaaaaagaacgtgtgtacgaagtgtggagtggagactaataataggctgcattctgtttggctgtgcaagatctgcatcgaacagcgcgaagtatggaagcgatcgggcgcttggttctttaagggttttcccaagcaagtactcccgcagccaatgcccattaagaaaaccaagccgcaacagccagtgtccgaacctgctgccccagagcagcctgccccagagccaaagcacccagccagagcacccgcacgcggagacagtgaggataggaggggtcccggacagaagaccggacctgaccccgcctcagccccaggcaggggcaactatggcccccctgttagaagggcatcggaggccagaatgtccagtagttctagagatagcgaatcctgggaccattccggtggggccggagacagttcaagaagtcccgcaggcctgaggagggccaacagcgtccaggcatccaggcccgctccaggttccgtgcagtcccctgctcccccacagcccgggcagcctggtacacccggcgggagtagacccggtcctggccccgcagggcggttcccagaccagaagccagaggtagcccccagcgatcctggcaccacagctcccccgcgggaggaaagaacaggcggagtcggaggataccctgcggtgggtgctcgggaggacagaatgagccatccctccggcccctacagccaagccagcgcagctgcaccccagccagcagccgctcggcagccgcccccccccgaggaagaggaagaggaggccaatagctatgactcagacgaagctaccacactgggcgccctcgagttttcactgttgtatgaccaggacaactcctccttgcagtgcacaatcatcaaggcaaagggcttgaagccaatggacagcaacggactggctgatccttacgttaagttgcaccttcttcctggcgcctctaagtctaacaaacttcgtaccaagaccctcagaaataccaggaatcccatttggaatgaaacactggtgtaccacggcattacagatgaggatatgcagcggaaaactctgcggatatccgtgtgtgacgaggataaattcgggcataatgaatttatcggcgagacacgattttcccttaaaaaattaaaaccaaaccagcggaaaaatttcaatatctgcctggagcgcgtgatccctatgaaaagggccgggaccaccggtagtgcgcggggcatggcactatacgaagaggagcaggttgaacgcgtgggcgacattgaagagcggggcaagatcttagtaagcttaatgtacagcacccagcagggaggactgattgtggggataatacggtgtgtgcatctggccgctatggacgctaatggctacagcgatccattcgtcaagctctggctgaaaccagacatgggtaagaaggcaaaacacaagacgcagataaagaaaaagacactgaaccccgagttcaacgaggagtttttctacgacattaagcatagtgatctggccaaaaagagtttggacatttccgtttgggactacgatattggaaagagcaacgactacatcggaggctgtcagttaggcataagcgctaagggtgaacggctaaagcactggtacgaatgccttaagaacaaagacaagaagattgagagatggcaccagctgcaaaatgagaaccatgtcagtagcgactag

SEQ ID NO: 55492 - DNA, 39 bp, Artificial Sequence
  derived and/or modified sequence
atgaccgacaccgtattcagtaattccagtaaccgctag

SEQ ID NO: 55493 - DNA, 252 bp, Artificial Sequence
  derived and/or modified sequence
atgacagataccgtattcagcaacagttcgaataggtggatgtacccttccgaccgcccactgcagagcaatgataaggagcagctccaagcaggttggagtgtccaccccggcgggcagcccgaccggcaaaggaagcaggaagaactgactgatgaagaaaaggaaatcattaatagggtaatcgcccgtgcagagaaaatggaggagatggagcaggagcgaattgggcgtctggtggaccgactgtag

SEQ ID NO: 55494 - DNA, 285 bp, Artificial Sequence
  derived and/or modified sequence
atgaccgatacagtcttttctaatagctccaacaggtggatgtatccctccgaccgacctctgcaatctaatgacaaagagcaacttcaagccggctggtccgtgcaccctggcggccagcctgatcgccaacggaaacaagaggaattaacggacgaagagaaggagataatcaacagggtgatcgctcgcgccgagaagatggaggagatggagcaggaacgtatcggacggctggtggaccggctggagaacatgaggaagaatgtggctggtgacgggtag

SEQ ID NO: 55495 - DNA, 492 bp, Artificial Sequence
  derived and/or modified sequence
atgaccgatacagtgttctccaactcaagtaacaggtggatgtatcctagcgaccggccactgcagagcaatgataaggagcagctgcaagccggttggtcagtccaccccgggggacagcccgacagacagcggaaacaagaagagttgacagatgaagaaaaggagattatcaatcgggtcatcgcccgagccgagaagatggaggagatggagcaagagcgtatcggcaggctcgttgataggttggaaaatatgagaaagaacgtcgcaggcgacggtgtgaaccgttgtatcttatgcggggaacagctcggtatgcttggttccgcctgtgtggtgtgtgaggattgtaagaagaacgtgtgcactaagtgtggcgtggaaaccaataatagactgcactccgtttggttatgtaagatttgtattgaacagcgggaagtgtggaaacgctcaggtgcatggttcttcaaggggttccccaagtag

SEQ ID NO: 55496 - DNA, 384 bp, Artificial Sequence
  derived and/or modified sequence
atgaccgacactgttttctccaactcatccaaccgatggatgtacccctcagatcgcccgcttcagtctaacgacaaggagcagctgcaggctggatggtcagttcaccctggcggtcagcccgacagacagagaaaacaggaggaactcacagacgaggaaaaggaaattatcaatagggtgattgcccgggcggagaaaatggaagagatggagcaggagcggataggcagactggtggaccggctggaaaacatgcgaaaaaacgtagcaggcgatggcgtcaaccgttgcatcctttgtggcgagcagctgggtatgcttggaagtgcctgcgtcgtttgcgaggactgcaaaaagaacgtgtgtaccaagtgcgggtag

SEQ ID NO: 55497 - DNA, 315 bp, Artificial Sequence
  derived and/or modified sequence
atgactgatacagtgttcagtaactcaagtaacagatggatgtaccccagcgacagacctctgcagtccaacgacaaagagcaactgcaggcaggttggtcagtccaccctggagggcagccagaccgacagcgcaaacaggaggagctgaccgacgaggagaaggaaatcatcaaccgggtcatcgcccgggctgaaaaaatggaggagatggagcaggagcgcatcggaaggctggtagaccgtctggagaacatgcgcaagaatgttgcgggggacggcgtcaaccgttgtatactgtgtggcgaacaatag

SEQ ID NO: 55498 - DNA, 120 bp, Artificial Sequence
  derived and/or modified sequence
atgacagacacggtctttagcaattcttccaaccgctggatgtacccctcagatcggcccctgcagtcaaacgataaggagcagctccaagccgggtggtctgtgcaccccggtgggtag

SEQ ID NO: 55499 - DNA, 348 bp, Artificial Sequence
  derived and/or modified sequence
atgaccgacactgtattcagcaattcatccaacaggtggatgtaccccagcgatcggccactgcaatcgaacgacaaagaacagttgcaggcagggtggagcgttcatcctggaggccagcctgataggcagcgtaagcaagaggaactcactgatgaggagaaggagatcatcaatagggtcattgcccgcgccgaaaaaatggaggagatggaacaggagcgcatcggtaggttagtcgaccgcctggaaaacatgaggaaaaacgtggctggggacggggtgaatcggtgtatcctgtgtggcgagcagctgggtatgctgggatctgcatgtgtcgtgtgctag

SEQ ID NO: 55500 - DNA, 378 bp, Artificial Sequence
  derived and/or modified sequence
atgactgacactgtattcagcaacagcagcaatcggtggatgtaccccagcgatcgtccactgcagtcaaatgataaagagcagttgcaagctggatggtcagtgcaccccggcggacagccggatcgacagcggaaacaagaggagttgacggatgaggaaaaagagatcatcaacagggtgatcgccagggctgagaagatggaggagatggaacaggagaggattggaagattagtagaccggctggaaaatatgcgcaagaacgtcgccggcgatggagtgaataggtgtatcctctgcggtgaacagcttggcatgcttggatcagcctgcgtggtctgtgaggattgcaaaaagaacgtttgcactaaatag

SEQ ID NO: 55501 - DNA, 546 bp, Artificial Sequence
  derived and/or modified sequence
atgacagataccgttttctctaactcttctaacaggtggatgtacccatccgatcggcctctgcagtctaacgataaagagcagctacaggcggggtggtccgtgcatcccgggggccaacctgatcggcagcgaaagcaggaggagcttaccgacgaggagaaggagatcattaatagggtgatagcacgtgccgaaaagatggaggagatggagcaagagaggatcggacggctcgtcgaccgcctggaaaacatgaggaagaacgtcgctggggacggcgttaaccgctgtattctgtgtggcgaacagcttgggatgctggggtccgcttgcgtggtctgcgaagactgtaaaaaaaacgtttgcaccaaatgcggcgtagagactaataatcggctccacagtgtctggttgtgtaagatatgcattgagcaacgggaagtctggaagagatccggtgcctggtttttcaagggttttcccaagcaggtgctcccacagccaatgccaattaaaaagaccaaaccacagcagcctgtgtag

SEQ ID NO: 55502 - DNA, 285 bp, Artificial Sequence
  derived and/or modified sequence
atgaccgatacagtgtttagtaattcctctaatagatggatgtacccgtctgaccggcctctgcagtcaaatgacaaagagcagctgcaggctggctggtcagttcaccccggcggtcagcccgatcggcagaggaaacaagaggagctaaccgatgaagagaaggagattatcaatcgggtgatagccagagccgagaaaatggaggagatggagcaggaacgcataggcaggctcgtggaccgtctagagaatatgagaaagaatgtcgcgggggacggttag

SEQ ID NO: 55503 - DNA, 363 bp, Artificial Sequence
  derived and/or modified sequence
atgacggacactgtattttccaatagcagcaatcgatggatgtatccctcagaccgccccttacagagtaacgacaaagagcaactgcaggccggatggtctgttcatcctggcggccagcccgaccggcagaggaagcaggaagagttgactgatgaggagaaagaaattatcaatagggtgatcgcgcgggccgagaagatggaggaaatggagcaggagcgaattggaagacttgtagacaggctggaaaacatgagaaaaaatgtcgcaggcgatggagtgaatcggtgcattctctgcggagaacagctcggtatgctggggtcagcttgcgtggtgtgcgaggattgcaaaaagtag

SEQ ID NO: 55504 - DNA, 405 bp, Artificial Sequence
  derived and/or modified sequence
atgaccgacacagtattcagtaacagctctaataggtggatgtatccaagtgatcgccccttgcaaagcaatgataaagagcagctgcaggccggttggagtgtccaccctggggggcaacccgatcgccaacgtaagcaggaggaactgactgatgaggagaaagaaattatcaaccgagtgattgcccgcgccgagaaaatggaagaaatggagcaggagcggatcggaagactagtggaccgccttgagaatatgagaaaaaacgttgcaggagatggtgtcaatagatgcattctttgcggagaacagctcgggatgctgggatctgcatgcgtggtgtgtgaggactgcaaaaagaatgtgtgtacaaaatgcggagtcgagaccaataatagactctag

SEQ ID NO: 55505 - DNA, 2085 bp, Artificial Sequence
  derived and/or modified sequence
atgacagacaccgtcttcagcaacagcagcaaccgctggatgtaccccagcgaccggcccctgcagagcaatgacaaggagcagctgcaggccggctggagcgtgcaccctgggggccagcctgaccggcagaggaagcaggaggagctgacagatgaggagaaggagatcatcaacagagtcatcgcccgggcagagaagatggaggagatggagcaggagcgcatcggccgcctggtggaccggctggagaacatgaggaagaatgtggccggagatggagtgaaccgctgcatcctgtgtggggagcagctgggcatgctgggcagcgcctgtgtggtgtgtgaggactgcaagaagaatgtgtgcaccaagtgtggggtggagaccaacaaccggctgcacagcgtgtggctgtgcaagatctgcatcgagcagcgggaggtgtggaagaggtctggggcctggttcttcaagggcttccccaagcaggtgctgccccagcccatgcccatcaagaagaccaagccccagcagcctgtgtctgagcctgctgcccctgagcagcctgcccctgagcccaagcacccagcccgggccccagcccggggggacagtgaagatagaagaggccctggccagaagacaggccctgaccctgccagcgcccctggccggggcaactacggcccccctgtgcggcgggccagcgaggccaggatgagcagcagcagccgggacagcgagagctgggaccacagcggcggggccggggacagcagccgcagccctgctggcctgcggcgggccaacagcgtgcaggccagcaggcctgcccctggctctgtgcagagccctgccccaccccagcccggccagcccggcaccccaggcggcagccggcccggccctggccctgctggccgcttcccagaccagaagccagaggtggcccccagcgaccccggcaccacagccccaccccgggaggagaggactggaggagtgggcggctacccagctgtgggcgcccgggaggacaggatgagccaccccagcggcccctacagccaggccagcgctgctgccccccagcctgctgctgcccggcagcccccacctcctgaggaggaggaggaggaggccaacagctatgacagtgatgaggccaccaccctgggcgccctggagttcagcctgctgtatgaccaggacaacagcagcctgcagtgcaccatcatcaaggccaagggcctgaagcccatggacagcaatggcctggccgacccctacgtgaagctgcacctgctgcccggggccagcaagagcaacaagctgcggaccaagaccctgaggaacaccaggaaccccatctggaatgagaccctggtgtaccacggcatcacagatgaggacatgcagaggaagaccctgcgcatctctgtgtgtgatgaggacaagtttggccacaatgagttcatcggggagacccgcttcagcctgaagaagctgaagcccaaccagaggaagaacttcaacatctgcctggagagggtcatccccatgaagagagctggcaccaccggcagcgcccggggcatggccctgtatgaggaggagcaggtggagcgggtgggggacatcgaggagcggggcaagatcctggtgtccctgatgtacagcacccagcagggcggcctcatcgtgggcatcatccgctgtgtgcacctggccgccatggatgccaacggctacagcgacccctttgtgaagctgtggctgaagccagacatgggcaagaaggccaagcacaagacccagatcaagaagaagaccctgaaccctgagttcaatgaggagttcttctatgacatcaagcacagcgacctggccaagaagagcctggacatctctgtgtgggactatgacatcggcaagagcaatgactacatcggcggctgccagctgggcatcagcgccaagggggagcggctgaagcactggtatgagtgcctgaagaacaaggacaagaagattgagcgctggcaccagctgcagaatgaaaaccacgtgtccagtgactag

SEQ ID NO: 55506 - DNA, 39 bp, Artificial Sequence
  derived and/or modified sequence
atgacagacaccgtcttcagcaacagcagcaacagatag

SEQ ID NO: 55507 - DNA, 252 bp, Artificial Sequence
  derived and/or modified sequence
atgacagacaccgtcttcagcaacagcagcaaccgctggatgtaccccagcgaccggcccctgcagagcaatgacaaggagcagctgcaggccggctggagcgtgcaccctgggggccagcctgaccggcagaggaagcaggaggagctgacagatgaggagaaggagatcatcaacagagtcatcgcccgggcagagaagatggaggagatggagcaggagcgcatcggccgcctggtggaccggctgtag

SEQ ID NO: 55508 - DNA, 285 bp, Artificial Sequence
  derived and/or modified sequence
atgacagacaccgtcttcagcaacagcagcaaccgctggatgtaccccagcgaccggcccctgcagagcaatgacaaggagcagctgcaggccggctggagcgtgcaccctgggggccagcctgaccggcagaggaagcaggaggagctgacagatgaggagaaggagatcatcaacagagtcatcgcccgggcagagaagatggaggagatggagcaggagcgcatcggccgcctggtggaccggctggagaacatgaggaagaatgtggccggagatggatag

SEQ ID NO: 55509 - DNA, 492 bp, Artificial Sequence
  derived and/or modified sequence
atgacagacaccgtcttcagcaacagcagcaaccgctggatgtaccccagcgaccggcccctgcagagcaatgacaaggagcagctgcaggccggctggagcgtgcaccctgggggccagcctgaccggcagaggaagcaggaggagctgacagatgaggagaaggagatcatcaacagagtcatcgcccgggcagagaagatggaggagatggagcaggagcgcatcggccgcctggtggaccggctggagaacatgaggaagaatgtggccggagatggagtgaaccgctgcatcctgtgtggggagcagctgggcatgctgggcagcgcctgtgtggtgtgtgaggactgcaagaagaatgtgtgcaccaagtgtggggtggagaccaacaaccggctgcacagcgtgtggctgtgcaagatctgcatcgagcagcgggaggtgtggaagaggtctggggcctggttcttcaagggcttccccaagtag

SEQ ID NO: 55510 - DNA, 384 bp, Artificial Sequence
  derived and/or modified sequence
atgacagacaccgtcttcagcaacagcagcaaccgctggatgtaccccagcgaccggcccctgcagagcaatgacaaggagcagctgcaggccggctggagcgtgcaccctgggggccagcctgaccggcagaggaagcaggaggagctgacagatgaggagaaggagatcatcaacagagtcatcgcccgggcagagaagatggaggagatggagcaggagcgcatcggccgcctggtggaccggctggagaacatgaggaagaatgtggccggagatggagtgaaccgctgcatcctgtgtggggagcagctgggcatgctgggcagcgcctgtgtggtgtgtgaggactgcaagaagaatgtgtgcaccaagtgtggctag

SEQ ID NO: 55511 - DNA, 315 bp, Artificial Sequence
  derived and/or modified sequence
atgacagacaccgtcttcagcaacagcagcaaccgctggatgtaccccagcgaccggcccctgcagagcaatgacaaggagcagctgcaggccggctggagcgtgcaccctgggggccagcctgaccggcagaggaagcaggaggagctgacagatgaggagaaggagatcatcaacagagtcatcgcccgggcagagaagatggaggagatggagcaggagcgcatcggccgcctggtggaccggctggagaacatgaggaagaatgtggccggagatggagtgaaccgctgcatcctgtgtggggagcagtag

SEQ ID NO: 55512 - DNA, 120 bp, Artificial Sequence
  derived and/or modified sequence
atgacagacaccgtcttcagcaacagcagcaaccgctggatgtaccccagcgaccggcccctgcagagcaatgacaaggagcagctgcaggccggctggagcgtgcaccctgggggctag

SEQ ID NO: 55513 - DNA, 348 bp, Artificial Sequence
  derived and/or modified sequence
atgacagacaccgtcttcagcaacagcagcaaccgctggatgtaccccagcgaccggcccctgcagagcaatgacaaggagcagctgcaggccggctggagcgtgcaccctgggggccagcctgaccggcagaggaagcaggaggagctgacagatgaggagaaggagatcatcaacagagtcatcgcccgggcagagaagatggaggagatggagcaggagcgcatcggccgcctggtggaccggctggagaacatgaggaagaatgtggccggagatggagtgaaccgctgcatcctgtgtggggagcagctgggcatgctgggcagcgcctgtgtggtgtgctag

SEQ ID NO: 55514 - DNA, 378 bp, Artificial Sequence
  derived and/or modified sequence
atgacagacaccgtcttcagcaacagcagcaaccgctggatgtaccccagcgaccggcccctgcagagcaatgacaaggagcagctgcaggccggctggagcgtgcaccctgggggccagcctgaccggcagaggaagcaggaggagctgacagatgaggagaaggagatcatcaacagagtcatcgcccgggcagagaagatggaggagatggagcaggagcgcatcggccgcctggtggaccggctggagaacatgaggaagaatgtggccggagatggagtgaaccgctgcatcctgtgtggggagcagctgggcatgctgggcagcgcctgtgtggtgtgtgaggactgcaagaagaatgtgtgcaccaagtag

SEQ ID NO: 55515 - DNA, 546 bp, Artificial Sequence
  derived and/or modified sequence
atgacagacaccgtcttcagcaacagcagcaaccgctggatgtaccccagcgaccggcccctgcagagcaatgacaaggagcagctgcaggccggctggagcgtgcaccctgggggccagcctgaccggcagaggaagcaggaggagctgacagatgaggagaaggagatcatcaacagagtcatcgcccgggcagagaagatggaggagatggagcaggagcgcatcggccgcctggtggaccggctggagaacatgaggaagaatgtggccggagatggagtgaaccgctgcatcctgtgtggggagcagctgggcatgctgggcagcgcctgtgtggtgtgtgaggactgcaagaagaatgtgtgcaccaagtgtggggtggagaccaacaaccggctgcacagcgtgtggctgtgcaagatctgcatcgagcagcgggaggtgtggaagaggtctggggcctggttcttcaagggcttccccaagcaggtgctgccccagcccatgcccatcaagaagaccaagccccagcagcctgtgtag

SEQ ID NO: 55516 - DNA, 363 bp, Artificial Sequence
  derived and/or modified sequence
atgacagacaccgtcttcagcaacagcagcaaccgctggatgtaccccagcgaccggcccctgcagagcaatgacaaggagcagctgcaggccggctggagcgtgcaccctgggggccagcctgaccggcagaggaagcaggaggagctgacagatgaggagaaggagatcatcaacagagtcatcgcccgggcagagaagatggaggagatggagcaggagcgcatcggccgcctggtggaccggctggagaacatgaggaagaatgtggccggagatggagtgaaccgctgcatcctgtgtggggagcagctgggcatgctgggcagcgcctgtgtggtgtgtgaggactgcaagaagtag

SEQ ID NO: 55517 - DNA, 405 bp, Artificial Sequence
  derived and/or modified sequence
atgacagacaccgtcttcagcaacagcagcaaccgctggatgtaccccagcgaccggcccctgcagagcaatgacaaggagcagctgcaggccggctggagcgtgcaccctgggggccagcctgaccggcagaggaagcaggaggagctgacagatgaggagaaggagatcatcaacagagtcatcgcccgggcagagaagatggaggagatggagcaggagcgcatcggccgcctggtggaccggctggagaacatgaggaagaatgtggccggagatggagtgaaccgctgcatcctgtgtggggagcagctgggcatgctgggcagcgcctgtgtggtgtgtgaggactgcaagaagaatgtgtgcaccaagtgtggggtggagaccaacaaccggctgtag

SEQ ID NO: 55518 - DNA, 2085 bp, Artificial Sequence
  derived and/or modified sequence
atgaccgacaccgtgttcagcaacagcagcaaccggtggatgtaccctagcgataggccactacaaagcaatgacaaagaacagctacaggctgggtggtcagtgcatcccggtggtcaacctgatcggcaacgaaagcaggaagaactgacagatgaggagaaggaaatcatcaacagagtgatcgcacgggctgagaagatggaagaaatggaacaggagcgcatcggccggttggtggatcgacttgagaatatgcggaaaaatgtcgccggcgacggtgtaaaccgctgtattctctgtggtgaacagttgggaatgttagggagtgcatgcgtggtatgcgaagattgcaagaaaaacgtctgcaccaagtgtggcgttgaaaccaataacaggcttcacagcgtctggctgtgtaagatttgtatcgagcagcgagaggtatggaagaggagcggcgcatggttctttaagggcttccctaaacaagtgcttccccaacctatgccaattaagaagactaagcctcagcagccagtctcagaaccagcggccccggagcaacccgcccccgagcctaaacaccctgcccgtgcacctgcacggggcgacagtgaggatagacgagggcccggtcagaaaacaggacccgacccagcttcagcgcccggacgcggaaattatggtccacccgtcagaagagccagtgaggctcggatgtcaagctctagtcgcgacagtgagtcctgggaccactcaggcggagccggcgattccagcagatctcccgctggactgcgaagagccaacagcgtccaggcctcccgaccagctcctgggagtgtccagagtcccgccccaccccagccaggtcagccagggactcccgggggctcacgccctggaccaggccccgcaggaagatttcccgaccaaaaacctgaggttgcgccctccgacccgggtacaacagctcctcctagggaagagcgaacaggcggagtgggcggctaccctgcagtgggcgcaagagaagacaggatgtcacacccatccggaccatactctcaagcctcggcggctgctccgcagccggcggctgccaggcagccccctccacccgaggaggaggaggaggaggccaacagctacgatagcgatgaggccaccacactgggcgctttagagttttcactcctctatgatcaggacaatagtagccttcagtgtacgattatcaaagctaagggccttaagcccatggactccaatggcctcgccgatccatacgtcaagcttcaccttctgccgggcgccagtaagtccaacaaactcaggactaaaacattacgcaatactcgaaacccaatatggaacgagactctagtctatcacggcatcacagacgaggacatgcagcgcaagaccctgcgcatctctgtctgcgacgaagacaagttcggccataacgaatttatcggcgaaactaggttctccctgaaaaagctaaagcccaaccagcggaagaacttcaatatctgtctggagcgggtgatccctatgaaacgggccggtacaactgggtctgcccggggtatggctttatacgaggaagaacaggtggagcgagtgggtgatatagaagagcggggcaagatcctggtctcacttatgtattccacccagcagggagggctgatagtcggcattattaggtgcgtgcatctcgccgccatggacgctaacggctacagcgacccattcgtgaaactgtggctgaagcctgacatggggaagaaggctaagcataagacacagatcaagaagaagactcttaacccggaattcaacgaagagttcttctatgacataaaacattccgacctggcgaaaaaatcacttgacatcagtgtatgggattacgatattggtaaaagcaacgattacatcggcgggtgtcaattggggattagcgccaagggtgagcgactgaagcattggtatgagtgtctcaagaataaggataagaagatcgaaagatggcatcaacttcagaacgagaatcatgtaagttcagattag

SEQ ID NO: 55519 - DNA, 2085 bp, Artificial Sequence
  derived and/or modified sequence
atgaccgacaccgtgttcagcaacagcagcaaccggtggatgtaccctagcgatcggccactgcagagcaacgacaaggagcaactgcaagctggctggtccgtacacccgggcggccagcctgatcgtcaaaggaaacaggaggagctgaccgacgaggagaaggaaataattaaccgggttatcgccagggccgaaaagatggaagagatggaacaagaacggatagggcgcctggtcgatcggctggaaaacatgcgcaagaacgtggccggagatggcgtgaataggtgtatcttgtgcggagaacagttagggatgctggggagtgcttgtgtcgtgtgcgaggattgtaagaagaatgtatgcacaaagtgcggtgtggagacaaataatcggttgcactcggtctggctgtgtaaaatctgcattgagcagagggaggtgtggaaaagatctggcgcttggttcttcaaaggttttcccaagcaggtgctgcctcagcccatgccgattaagaagacaaaaccacaacaaccagttagtgagcccgccgcgcctgagcaacctgcacctgagcccaagcatcccgcccgagctccagccagaggggattcagaggaccgacgcgggcccgggcaaaagacaggtccagaccctgcgagtgcccccggcagaggcaattacggacccccagtgcgccgggcaagcgaggctcgcatgtcctcaagctcaagggacagcgagtcatgggaccactcggggggtgctggtgatagttcccgctcccctgccgggctcaggcgagccaacagcgtgcaggcatccagacccgcccccggttcagtccagtctcccgcccccccccagcctgggcagccagggacgcccggaggctccaggcccggcccaggacccgccgggcgttttccagaccagaagccagaagttgcaccatcggatcctggtaccactgccccaccgcgggaagagcgaacgggtggcgtcggcggctaccccgctgtcggggctcgcgaagatcggatgagccatccaagtggcccatatagccaagcttcagctgccgccccacagcctgccgcagcccgccagccacctccaccagaagaggaagaagaggaggccaatagttatgactccgacgaggctactacacttggcgcactcgaattctccctgttgtatgaccaagacaacagtagcctgcagtgtacgatcattaaagccaaggggctcaaacctatggactctaatgggctggctgacccctacgtgaaactgcaccttcttccaggcgcatccaaatcgaacaagcttagaaccaaaaccttgaggaacacccggaaccctatctggaatgagaccttggtatatcacggaattaccgacgaggatatgcaaagaaagacattgagaataagtgtatgcgatgaggataaatttggtcacaacgaattcatcggcgaaacccggttctccctgaagaaactcaaaccaaatcagcgcaaaaactttaacatctgtttggagcgagtaatccctatgaagcgagctggcactaccggcagcgcaagaggcatggctctgtacgaggaggagcaagtggagagagtcggtgacatcgaggaacggggcaagattctggtttcactgatgtactctacgcagcagggtggcttaatcgtgggaattattagatgtgtccatctagccgccatggatgcgaatggctatagtgatcccttcgtgaaactgtggctgaagccagacatggggaaaaaggccaagcacaaaacacaaattaagaaaaagaccctaaacccagaattcaacgaagagttcttctacgacattaagcattcggatctggcgaagaaatcgttggatatcagcgtgtgggactatgatataggcaagagtaatgattacatcggcggttgccagttgggtatcagcgccaagggcgagaggttaaagcactggtacgagtgtctcaagaataaagacaagaaaatcgaaaggtggcaccaactgcagaacgaaaatcatgtcagttcagactag

SEQ ID NO: 55520 - DNA, 2085 bp, Artificial Sequence
  derived and/or modified sequence
atgaccgacaccgtgttcagcaacagcagcaaccggtggatgtacccctccgaccggcccctgcagagtaatgataaggagcagttacaggccgggtggagcgtgcaccctggggggcagccagaccggcagcggaaacaagaagaactgacagacgaggaaaaggaaattatcaaccgcgtgattgcgcgtgcagagaagatggaggagatggagcaggagagaatcggtaggctggtcgacagactagagaatatgcggaaaaacgtggcgggagatggggtgaatcgctgcatcctgtgcggcgagcagctcggcatgttgggaagcgcctgtgtggtttgtgaggactgcaagaagaatgtgtgcactaagtgcggcgttgagacgaacaacagactccatagtgtatggctgtgcaaaatctgtattgagcagcgcgaagtatggaagaggagcggcgcctggttcttcaaaggatttccaaagcaagtactccctcaacctatgccaattaagaagacaaagcctcaacaaccagtgtcagagccagccgcccctgagcagcctgctccagaacctaagcatcctgctagggcaccagctaggggagacagtgaagataggcgcggacctggtcagaaaaccggccccgatcctgcctcggcacccggccggggcaactatgggcctcctgtacgccgtgcctcagaagctaggatgtcctcgtcatcccgtgatagtgagtcttgggaccattcaggcggagcgggcgattccagtaggtctccagccgggctgcgcagggctaattccgttcaggcgagcaggccagcgcctggctcagtccagtcccctgcaccccctcagcctggccagcctggcaccccaggaggttcgaggccgggccctgggccagctggacgttttcctgatcagaaacctgaggtggctccatccgaccccggcaccacagcacctccccgggaagaaagaactgggggcgtgggggggtacccggccgtgggcgcccgtgaggaccgcatgagccacccctcaggcccctactcccaggccagtgctgctgccccccagcctgccgccgctcgccagccacccccccccgaagaagaggaggaggaggctaacagttatgacagcgacgaggctaccaccttgggtgccttggagttttcacttctctatgatcaggacaattcgagcttacaatgcactatcatcaaggctaaaggactcaaacccatggacagcaacggactggcagacccatatgtcaagctccacttgctgcccggggcgagcaagtccaataagctgcggaccaagactctgcgcaatactcggaatcctatttggaatgagacattggtctaccacggcattacagatgaggatatgcagcgcaagactctccggatctcagtgtgtgatgaggacaaattcggtcacaacgaattcatcggagagactagatttagcctgaagaaactcaagcctaaccaaagaaaaaatttcaatatctgcctcgaacgggtgattcctatgaagagggccggaacaactggatccgctagaggtatggccctttatgaggaagaacaggtagagagagttggggacatagaggaaagggggaagatcctggtttctttaatgtactctacccagcaaggaggcctaatcgtgggaatcatacgatgcgtccacctggcagctatggacgctaacgggtacagcgaccccttcgttaagctgtggctgaagcccgacatggggaagaaagccaaacacaagacacagataaagaagaaaaccttaaaccctgagttcaatgaggagtttttttacgacataaaacattctgatctggctaagaaaagcttggatatcagtgtttgggattatgacatcggaaaatcgaatgactacattggcggatgtcaactgggtattagcgctaagggtgaaagactgaagcactggtatgagtgccttaagaacaaagataaaaaaattgagcgatggcatcagcttcagaatgagaaccacgtttcctccgattag

SEQ ID NO: 55521 - DNA, 2085 bp, Artificial Sequence
  derived and/or modified sequence
atgaccgacaccgtgttcagcaacagcagcaaccggtggatgtacccctcagaccggccactccagtctaacgataaagagcaactccaggccggttggagtgtgcaccccggcggacagccggatcggcagcgaaagcaagaagagcttacagacgaggaaaaagaaattatcaacagagtgatcgctcgggccgagaagatggaagagatggagcaagagaggatcggcagactcgtcgaccgtctggagaacatgaggaagaacgtggcaggtgatggtgtgaatcgctgcatcctctgcggagaacagttgggtatgctgggcagtgcctgcgtagtgtgtgaagactgcaagaaaaatgtctgtaccaaatgtggagtggaaacaaataataggctccattcagtgtggctctgcaaaatctgtattgaacagcgggaagtatggaaaagaagtggcgcctggttttttaaaggctttcccaagcaggttctacctcagcctatgcccattaaaaagaccaagccccaacagcctgtttccgaacccgctgcgccagaacaacccgcccccgaacctaaacatcctgctcgggccccagcccgaggtgactccgaagaccggagagggccaggtcagaaaactggaccagacccagcctctgcccccggtagggggaattatggtccccccgtaaggagggcatcagaagctcgcatgtccagttcatctagagattctgagtcttgggaccattcgggaggtgccggtgatagctcaaggagccctgcgggcctgagacgtgcaaactccgttcaagcctctaggccagctccaggatcggtgcagtccccagcacccccgcaacctggccaaccagggacgccgggtggatctaggcccgggcctggacctgccgggagatttcccgatcagaagccggaagtggcgccttcagatcccgggactaccgccccgccgcgggaggagaggactggcggcgtgggggggtaccctgcggtgggggcccgggaagataggatgtctcacccatcgggaccgtacagccaggcaagcgccgccgccccccaaccggcagctgctcgacagcccccaccacctgaagaagaggaggaggaggcaaattcgtacgatagtgatgaggctactaccctgggcgctttggagttctctctgttgtacgaccaagacaattcgagtctccagtgcacaattatcaaagcaaaagggttgaagcctatggactctaatggactggcagacccctatgtgaaattacatttgttgcccggcgcctctaaatctaataaactccggacaaaaactttgcgcaacacccgcaaccctatctggaacgaaaccctcgtgtatcatggcattaccgacgaagacatgcagaggaagacacttagaatctcagtttgtgacgaggataaatttggacacaacgaattcatcggtgagacgcgcttctccctgaaaaagttaaaacccaaccaaaggaaaaacttcaatatctgcttagaacgcgtgatcccaatgaagagggcaggcacaaccgggtccgccagaggtatggccctttatgaagaagagcaagtggagcgcgtcggtgacattgaggagaggggtaagatccttgtttctcttatgtactcaacacagcagggtgggctgatcgttgggataattagatgcgtgcacttggcagccatggatgccaatggttactctgacccctttgtcaaactatggctgaagccagatatgggtaagaaggccaagcacaagacacagattaaaaaaaaaacattgaatccagaattcaacgaggaattcttctatgatataaagcactccgatctggcaaaaaaatcgctcgacatatcggtctgggattatgatattggcaagtccaacgattacattggcggctgccaattgggcatatccgcaaaaggtgagaggctgaagcattggtatgagtgtttgaagaacaaagacaaaaagattgagcggtggcatcaactacaaaacgagaaccacgtgtccagcgactag

SEQ ID NO: 55522 - DNA, 39 bp, Artificial Sequence
  derived and/or modified sequence
atgaccgacaccgtgttcagcaacagcagcaaccggtag

SEQ ID NO: 55523 - DNA, 252 bp, Artificial Sequence
  derived and/or modified sequence
atgaccgacaccgtgttcagcaacagcagcaaccggtggatgtacccctcagacaggcctctgcagtctaatgacaaagagcaactgcaggctggctggtccgtccaccctgggggccagcctgataggcagcgtaaacaggaggagctgacggacgaggagaaagaaatcattaaccgcgtaatcgcaagggctgaaaagatggaagagatggagcaagagagaattggaagactcgtggaccgcttgtag

SEQ ID NO: 55524 - DNA, 285 bp, Artificial Sequence
  derived and/or modified sequence
atgaccgacaccgtgttcagcaacagcagcaaccggtggatgtacccttcagaccggcccctgcagtcaaatgacaaggagcagctccaagccggttggagtgtccatcccggagggcaacctgaccgccagcgcaagcaagaagagctgaccgacgaagaaaaggagatcatcaacagagtgattgctcgggcggaaaagatggaagaaatggagcaggaacgtataggcaggcttgttgatcgcctggagaacatgcgaaagaatgtcgccggggacggttag

SEQ ID NO: 55525 - DNA, 492 bp, Artificial Sequence
  derived and/or modified sequence
atgaccgacaccgtgttcagcaacagcagcaaccggtggatgtaccccagcgataggcctctccagagtaacgataaagagcagctccaagctggatggtcagtgcatccaggcggtcaaccagacaggcagcggaaacaggaggagttgactgacgaagaaaaagagatcatcaacagagtgattgcgcgggccgagaagatggaagagatggaacaggagagaatcggacgtctggttgatcggctggagaacatgcgaaagaacgttgctggtgacggagtgaatcgctgcatactctgtggcgagcaattaggcatgcttgggtctgcttgcgtcgtgtgtgaggattgcaagaaaaatgtgtgcactaaatgcggtgtggaaacgaacaatcgccttcatagtgtctggctgtgtaagatctgtattgaacagcgcgaggtgtggaagaggtcgggcgcctggttcttcaagggcttccctaagtag

SEQ ID NO: 55526 - DNA, 384 bp, Artificial Sequence
  derived and/or modified sequence
atgaccgacaccgtgttcagcaacagcagcaaccggtggatgtacccttccgaccggcctctacaatcaaacgacaaagaacaactgcaggctggatggtcagttcacccaggaggccagcccgaccgacagcgaaaacaggaagagctgactgacgaagagaaggagatcatcaatcgtgtgattgcacgcgctgaaaaaatggaagagatggagcaggagcgcataggccgactagtggatcgactggagaacatgaggaagaacgttgctggcgatggagtgaaccgatgcatcctgtgcggcgaacagctgggtatgctgggcagcgcctgtgtcgtatgtgaagactgcaaaaaaaacgtctgcacgaaatgtgggtag

SEQ ID NO: 55527 - DNA, 315 bp, Artificial Sequence
  derived and/or modified sequence
atgaccgacaccgtgttcagcaacagcagcaaccggtggatgtacccatccgaccggccactgcagagtaatgacaaagagcagctacaggccggctggtcagttcacccaggcggacagcctgaccgacagcggaagcaagaggaactcacagacgaggagaaggaaatcattaatcgcgtgatcgccagggctgagaaaatggaggagatggaacaagagagaatcgggcggctcgtcgatagactagaaaatatgaggaagaacgtggccggagacggcgtcaacagatgcattctgtgcggggagcaatag

SEQ ID NO: 55528 - DNA, 120 bp, Artificial Sequence
  derived and/or modified sequence
atgaccgacaccgtgttcagcaacagcagcaaccggtggatgtacccatcagatcgccccctgcagtcaaatgataaggaacagttacaggccgggtggagtgtgcaccctggcgggtag

SEQ ID NO: 55529 - DNA, 348 bp, Artificial Sequence
  derived and/or modified sequence
atgaccgacaccgtgttcagcaacagcagcaaccggtggatgtacccctcagatcggccactgcaatctaatgataaggaacagctacaggccggctggtccgtgcatccaggcggccaacctgatcgccagcgcaaacaggaggagctcaccgatgaagaaaaagaaatcataaatcgagtgatcgccagggctgagaagatggaggaaatggagcaagagcgaatcgggcgcctggtggatcggctcgaaaatatgcggaagaacgtcgcgggagatggggttaaccgctgcattctgtgtggggagcaattgggtatgctcggatctgcctgcgtggtctgttag

SEQ ID NO: 55530 - DNA, 378 bp, Artificial Sequence
  derived and/or modified sequence
atgaccgacaccgtgttcagcaacagcagcaaccggtggatgtacccctcggatagacccctacagagcaacgataaggaacagctgcaggcggggtggagtgtgcaccccggtggacagcctgatcgacagagaaaacaggaagagctcacagacgaagagaaggaaattataaatcgtgtaatcgcgagggcagaaaagatggaggagatggagcaagaacggattggcagactcgtagaccgcttggagaacatgcgcaagaatgtcgccggagacggcgttaatagatgtattctctgtggagagcagcttggaatgcttggatccgcatgtgtcgtctgtgaagattgtaagaagaatgtctgtactaagtag

SEQ ID NO: 55531 - DNA, 546 bp, Artificial Sequence
  derived and/or modified sequence
atgaccgacaccgtgttcagcaacagcagcaaccggtggatgtacccctctgatcggcctctgcagagtaacgataaggagcaacttcaggcgggctggtccgtgcatcccggcgggcagcccgatcgacagcgcaaacaggaagaactgaccgatgaggaaaaggagataattaaccgtgttattgctcgcgctgagaagatggaagagatggaacaggaacgtatcgggaggctggttgacaggctggagaacatgcgcaagaacgtcgcaggtgacggggtgaatcggtgcatcctttgtggggagcaattgggaatgttgggcagcgcatgtgttgtgtgtgaagactgcaagaagaacgtctgtactaaatgtggtgtggaaactaacaatcggctccactctgtgtggctgtgcaaaatctgtattgagcagcgggaggtttggaaaagatctggcgcatggttctttaaagggttccccaagcaggttctgccacagcctatgcccatcaagaaaaccaagcctcaacagcccgtttag

SEQ ID NO: 55532 - DNA, 285 bp, Artificial Sequence
  derived and/or modified sequence
atgaccgacaccgtgttcagcaacagcagcaaccggtggatgtacccgtccgacagaccgcttcagtcaaatgacaaagagcagttgcaggccgggtggtccgtgcatccagggggccagccggatagacagagaaagcaggaagagctgacagacgaggaaaaggagataattaacagggtcatcgcaagagcagagaaaatggaggaaatggaacaggaaaggattgggcgactggtagaccgacttgaaaatatgaggaaaaacgtggccggtgacgggtag

SEQ ID NO: 55533 - DNA, 363 bp, Artificial Sequence
  derived and/or modified sequence
atgaccgacaccgtgttcagcaacagcagcaaccggtggatgtacccatcagatagacccttgcagtctaatgacaaggagcagctacaggccgggtggtctgtgcaccctggggggcagcccgataggcaaagaaagcaggaagaactcacagatgaggaaaaagagattattaaccgggtcattgcgagagctgagaagatggaggagatggagcaggaacggattggcaggttagtggaccgactggaaaacatgagaaagaacgtggcaggagatggggtgaatcgttgtatcctgtgcggagaacaactcgggatgctgggttccgcgtgcgtggtctgcgaggattgtaagaaatag

SEQ ID NO: 55534 - DNA, 405 bp, Artificial Sequence
  derived and/or modified sequence
atgaccgacaccgtgttcagcaacagcagcaaccggtggatgtaccctagtgacagaccccttcagagcaacgacaaggaacagctacaggccggttggagtgtgcatccaggagggcaacctgaccgtcagcgaaagcaggaggagctcactgatgaggagaaagagatcataaacagagtgatagctagagcagaaaagatggaggaaatggagcaggaacgaatcggacggctggtggatcggctcgagaatatgcgaaagaacgttgcaggagacggcgtgaatcgatgtattctctgcggcgagcagttaggcatgcttggaagcgcctgtgtcgtgtgcgaggactgtaagaaaaatgtttgcacaaagtgtggcgtggaaacgaataatcgactgtag

SEQ ID NO: 55535 - DNA, 2085 bp, Artificial Sequence
  derived and/or modified sequence
atgactgacactgtattttccaatagctctaatagatggatgtatccttctgacagaccactgcagtctaatgacaaagaacaacttcaggcgggatggtccgtccatcccggaggccagccagatcgccagaggaagcaggaagaactgacagatgaagaaaaagaaataataaaccgggtgattgccagggcagagaagatggaagaaatggagcaggaacggataggtcggctcgtcgacagattggagaacatgcgcaagaacgtggccggtgatggagtcaatcgttgcatcctgtgcggagagcagctagggatgctgggctcagcgtgtgtcgtctgcgaagattgcaaaaaaaacgtatgcactaagtgtggcgtggaaactaacaatcgtctgcacagtgtgtggctctgcaaaatctgcatcgaacaaagagaagtgtggaaaagatccggcgcttggttttttaaaggcttcccaaaacaggtcctccctcaaccgatgcccatcaagaagaccaaacctcagcagcccgtctccgagcccgctgcccctgagcaaccagcaccagagcctaaacaccctgcacgcgcaccagcgcgtggcgattctgaagatagaagaggaccagggcagaagacaggtcctgatccagctagcgcgcctggacgtgggaattatggccctccagttagacgcgcaagcgaagcccgaatgtcctcatcttcacgcgactctgagtcctgggaccatagcggcggagccggagactcctcacggtctcctgcgggactccggagagccaacagtgtgcaggcaagcagacctgctccgggtagtgtacagtcgccagctcctccacagcctggacagcccggaacccctggaggttctcggcctggcccaggtccagcaggacgcttcccagatcagaaacccgaggtggccccatccgatcctgggacaactgctccaccccgagaagaaagaaccgggggagtaggaggctatcctgctgttggggcacgagaagaccggatgagtcatcccagcggcccatattcacaggcgtctgccgcagctccccagcctgccgctgctcggcaacctccacctcctgaggaagaggaggaggaggctaacagctatgactctgacgaggcaactacattgggcgctttggagtttagtttattatacgatcaggacaattcctctcttcaatgcacgataattaaggccaagggcctgaaacccatggattcaaatggcctggccgacccttatgtgaagttgcatctgctgcctggggcttcaaagagcaacaagctgcggacaaagacacttagaaatacaagaaatcccatctggaatgagaccctcgtctaccacggcatcactgacgaagacatgcaaaggaaaaccctcaggatatccgtttgtgacgaggataagttcggtcacaacgagttcattggcgagacaagattctcactgaagaaactgaaacctaatcagcggaagaatttcaatatttgtctcgaaagggttatcccaatgaaaagagcgggtacaacaggtagtgccagagggatggccttgtatgaggaagaacaggtggagagggtgggagatattgaagaaagggggaaaatcttagtcagcttgatgtacagtacacagcaaggaggtttgatcgtcggcatcattcggtgcgtgcacctggctgcgatggacgccaacggatactctgatccattcgtaaagttgtggctgaaacctgacatgggcaagaaggccaagcacaaaacacagattaagaaaaaaacccttaatccagaatttaatgaagagttcttctacgatattaagcacagcgacttagccaaaaaatcactcgacattagcgtgtgggactacgacataggcaaatcgaatgactacatagggggatgtcagctgggtatctcagccaaaggcgagagactcaagcactggtatgagtgccttaaaaacaaagacaagaagatcgagagatggcatcagctgcagaatgaaaaccacgtcagctccgactag

SEQ ID NO: 55536 - DNA, 2085 bp, Artificial Sequence
  derived and/or modified sequence
atgacagacaccgtgttttcaaattcatccaatcgatggatgtacccgagcgacagaccactccagtcaaacgacaaggaacagctccaggctggatggagcgtccatccaggcggacaacctgaccggcagaggaaacaggaagagctcacagatgaggaaaaagaaattataaatcgcgtgatcgcacgggcagaaaagatggaggagatggaacaagagagaattggtaggctagtggataggctggaaaacatgcggaaaaacgtggcaggtgatggcgtcaatcgatgcatcctctgtggcgagcagttaggtatgctgggatcagcatgcgtagtgtgcgaagactgtaagaagaacgtctgtacgaagtgtggggtggaaacgaacaatcgactgcattcagtgtggctctgcaaaatctgcatcgaacaaagggaggtgtggaagaggtcaggagcttggttcttcaaagggttccccaagcaagtcctgccccagccgatgcctatcaagaagacgaagccccagcagccagttagcgagccagccgcacctgagcaacctgccccagaacccaagcaccctgcacgcgctcccgcacgcggagacagcgaggatagacggggtcctggccagaagaccggaccagatccagcatctgcgcctggcagaggcaactacggtcccccagtgcggagggcctccgaggccaggatgtcctcgtcttctcgcgactcagagagttgggaccacagcgggggagccggtgactctagtcggtcccccgctgggctccgccgtgcgaatagcgtgcaagcctctaggcccgcaccaggctctgtccagtctccagctccgcctcagccagggcaacccggtacccccggaggcagtcgacccggacctggcccagctggcaggtttccagatcagaagcctgaggtcgcaccttccgacccaggaacaactgctcctcccagggaagagcgcactggcggtgttggcggataccctgccgtgggggctagggaggatagaatgagccatccaagcggtccgtattctcaggcctctgccgctgcccctcagcccgcagctgcaagacagccacctccacccgaagaggaggaggaagaggcgaatagctacgacagtgacgaggctaccacactgggcgctctggagttttcactcctctacgaccaggataacagttccctgcagtgtaccattatcaaggccaaagggctgaagcctatggattcaaatggcttggccgacccatacgttaagctccatttactgcctggcgcatcaaagagtaacaaacttcgcaccaagactctacggaacacccggaaccccatctggaatgagacgctggtctaccacgggatcaccgatgaagatatgcagaggaagaccctgcgcattagtgtgtgcgacgaggacaagttcggacacaatgagttcatcggggagacccggtttagtctgaaaaaactcaaacccaatcagcgaaaaaatttcaacatttgcctagagagagtcattcctatgaagcgggcaggtaccaccgggtccgcccgaggcatggccctctacgaggaggagcaggtagaacgcgtcggagacatagaagagcgcggaaaaattctggtgtcgctcatgtattctacacaacagggcggattaattgtgggaattattcgatgtgtacacctggccgctatggacgccaacgggtatagcgatccgtttgtgaaactgtggctgaaacctgacatgggaaagaaagccaaacacaagacacaaatcaagaagaagaccctaaaccccgaattcaatgaagagtttttctacgatataaagcatagtgacctggccaaaaaaagtctagatatctctgtctgggattatgacatcgggaaatcaaatgattacataggtggctgtcagctcggcatttctgccaagggggaaaggctcaaacactggtacgaatgcctgaagaacaaggacaagaaaatagagcggtggcaccagctacaaaatgagaaccacgtttccagcgactag

SEQ ID NO: 55537 - DNA, 2085 bp, Artificial Sequence
  derived and/or modified sequence
atgaccgacacggtgttcagtaacagctctaatagatggatgtaccccagtgacaggccactccagtcaaatgacaaagaacagctgcaagcagggtggagcgtccaccccggtggccagcccgatagacagcggaagcaggaggaactgacggatgaagagaaagagattatcaatcgggtgattgcaagagctgagaagatggaagagatggaacaggaaaggatcgggcgactcgtggataggctcgaaaatatgcgcaagaacgttgccggagatggtgtgaacagatgcattctatgcggcgaacagcttggaatgcttgggtcagcttgcgtagtatgtgaggattgtaagaagaacgtctgtaccaagtgtggggtggaaacaaacaacagactccattcagtatggctctgcaagatctgcatagaacagcgggaagtctggaaacgctcaggagcttggttctttaaggggtttcctaaacaggtgctgcctcaaccaatgcctataaagaaaacaaagccacagcagcccgtgagtgagcctgcagcaccagagcagcccgcacccgagccaaagcatccagctcgcgcaccagctaggggtgactctgaggatcggcgagggccaggtcaaaagaccggtccagatccagctagtgcacctggtagagggaactatggaccaccggtgcgacgggcttccgaggccagaatgagctcaagttctcgtgactctgagtcgtgggaccattcagggggagcaggcgattccagccggtcccccgcaggtctgcgcagagctaactctgttcaagcttcgagacccgctccaggatccgtgcaatccccagcccctccccagcctggccagcctgggacccccggaggatctcgccctggacccggaccagctggccgatttcccgatcaaaaaccagaggtggcccctagtgacccaggcacaactgccccaccccgagaggaacgaacaggcggagttggaggctaccccgcagtgggcgcacgcgaggatagaatgtcgcatcctagtggcccatacagccaagcctcagctgccgctccacagcctgccgctgcaaggcagccaccccctcctgaggaggaggaggaggaggctaacagttacgacagcgacgaggcgacaactctcggcgcattggaattcagtctcctgtatgatcaagacaatagcagcctccaatgtacaattatcaaagcaaagggactgaagcctatggacagtaacggactggcggatccctatgtgaagctacacttactacctggtgctagcaagagtaacaaactgcgcacaaagacgctgcgcaacacccggaatccaatctggaacgaaacgcttgtctaccatggcatcacagatgaagatatgcagcgtaagaccttgcgcatctccgtctgtgatgaggataaattcggacataatgaattcataggtgaaactagattctccttaaagaagctgaagccaaaccagaggaaaaacttcaatatttgcctggagagggtgatacccatgaaacgtgcgggaaccaccgggtctgcacgtgggatggcgctgtatgaagaagagcaggtcgagagggttggagatatagaggagagaggtaaaattctagtgagtctcatgtactccactcaacaaggtggtctgattgtgggtattattaggtgcgtgcatttggcagcaatggacgccaatgggtactcagatccctttgttaagctctggctcaagcctgacatgggaaagaaggccaagcacaaaactcagattaaaaagaagacccttaatccagaatttaatgaagagttcttctatgatataaagcattctgatttagccaaaaagagcctggacatctccgtgtgggactacgatatcggcaagtccaatgactatatcggcggttgccaactgggtatctccgccaaaggagagcgcttgaaacattggtatgaatgcttgaaaaataaggataaaaaaatagaacgctggcaccaactgcagaatgagaatcacgtctcctccgactag

SEQ ID NO: 55538 - DNA, 2085 bp, Artificial Sequence
  derived and/or modified sequence
atgaccgatactgtgttctccaatagcagcaatcgctggatgtaccctagcgatcgaccactgcagagcaacgataaggaacagttgcaagcaggttggtctgtgcatcccggaggccagcctgaccgccaaaggaaacaggaagaactgacggacgaggagaaggaaatcataaaccgagtgatcgctagggctgaaaagatggaagagatggaacaggagcgcataggcaggttagtggaccggctggagaacatgcgcaaaaacgttgcaggcgatggagtgaaccggtgtatcttatgtggagaacaacttggtatgctggggtccgcctgcgtagtctgtgaggactgtaaaaaaaatgtgtgtacgaagtgcggggtagagactaataacaggcttcattctgtgtggctgtgtaagatctgtatagaacagagggaggtttggaagcgcagcggcgcttggttttttaagggttttcctaagcaggtgttgccccagccaatgcctattaaaaagaccaaacctcagcaaccagtgtcagagccagccgcacctgaacagcctgcgccagagccaaagcatcccgctagggccccagctaggggagactccgaagatcgacgtggacctggccagaaaacagggcctgacccggcatcagcccctggtcgcggaaactatggaccacccgttagacgggcatcagaggcacgaatgagtagtagcagccgggacagtgagtcatgggatcactctgggggagccggtgacagctccagatccccggcaggcctccggcgtgctaactctgtccaggcttctcgcccagcgcctgggagtgttcagagtcctgccccaccccagccaggccagccaggaactcccggaggctcccgccctggtccagggcctgctggccgtttccctgatcagaaaccagaagtcgctcctagtgaccccggaacgaccgccccacctcgggaagaaaggacgggcggtgtcggcggttatccagctgtaggagcacgggaggatcgcatgtctcatcctagcggcccatattctcaagccagtgctgcagccccacaacctgccgctgctagacaacctcctccgcctgaggaggaagaagaagaagctaatagctacgattcagacgaggctacaactttaggagcgttagagttttctctgctgtacgaccaggacaactcaagcctgcagtgtaccattataaaggccaaaggcctgaagccaatggattccaatggattagccgatccatatgtcaagctgcatttacttccaggggcttccaagagtaacaagctgcggacaaagactcttcgcaacactcggaaccctatctggaatgagactctcgtgtatcacggcattacagacgaagacatgcagaggaagactttacgcatttcagtatgtgacgaggacaaatttggccacaacgaattcattggagaaaccaggttttctctgaagaagctcaagcctaaccaacgcaaaaattttaacatctgccttgagagggtgatccccatgaagagggcaggcacaaccgggtcagccagaggaatggcactgtatgaagaagaacaggttgaaagagtgggcgacattgaggagagggggaagattcttgtgagcctcatgtactccacgcagcagggcggattaatcgtggggatcatcagatgtgtacacctggctgctatggatgctaatggatactctgaccctttcgttaagttgtggctgaagcccgatatgggcaaaaaagcgaagcacaaaacccagatcaaaaagaaaactcttaacccagagttcaacgaggagtttttttacgatatcaagcacagtgatttggccaagaaaagcttggatatctccgtatgggattatgatattggcaagtcgaacgattatatagggggttgtcagctgggcatctccgcaaagggcgagagactcaaacattggtacgagtgcctgaagaacaaagataagaagatcgagagatggcatcaactgcagaatgagaatcatgtatcttctgactag

SEQ ID NO: 55539 - DNA, 39 bp, Artificial Sequence
  derived and/or modified sequence
atgacggacacagtatttagcaacagcagtaacagatag

SEQ ID NO: 55540 - DNA, 252 bp, Artificial Sequence
  derived and/or modified sequence
atgactgatactgtattcagcaacagctccaaccgatggatgtacccaagcgataggcctctccagagcaatgacaaggaacaactgcaagcagggtggtccgtccatcctggaggtcaacctgacaggcagcgcaagcaggaggagttaaccgatgaggagaaagaaattatcaatcgcgtgatcgccagagccgaaaagatggaagagatggagcaagagcggatcggcaggctggtggaccggctgtag

SEQ ID NO: 55541 - DNA, 285 bp, Artificial Sequence
  derived and/or modified sequence
atgaccgataccgttttcagcaacagctcgaatcggtggatgtacccatccgataggccactgcagagtaacgacaaggaacagctccaagctggctggtctgttcaccctggcggacagccagaccggcagaggaaacaagaagaactgacagacgaggaaaaagaaataatcaaccgcgttatagctcgcgctgagaagatggaagagatggagcaggagagaataggcaggctggttgatcgattagagaatatgaggaaaaatgtcgctggagatgggtag

SEQ ID NO: 55542 - DNA, 492 bp, Artificial Sequence
  derived and/or modified sequence
atgacagatactgtgtttagcaacagcagcaataggtggatgtacccctctgacaggccacttcaaagcaatgacaaagagcagctacaggcagggtggagcgtccatcccggaggacagccagacaggcaaagaaaacaagaggagctgaccgacgaagagaaggaaattatcaatcgggttatcgctagggcagaaaagatggaggaaatggagcaggaaaggattggtcgcctggtcgacaggctagaaaatatgcgcaaaaacgttgccggtgatggcgttaatcgttgcatcctgtgcggcgaacagctcggcatgctgggatcagcctgtgtggtttgcgaggattgcaaaaaaaatgtgtgcacaaagtgtggagtcgagacaaataacaggctccacagcgtttggctctgtaaaatatgcatcgagcaaagagaggtctggaaaagatctggggcatggttctttaagggctttccaaaatag

SEQ ID NO: 55543 - DNA, 384 bp, Artificial Sequence
  derived and/or modified sequence
atgaccgacacagtcttttcaaactcttccaatagatggatgtatccatccgacaggcccctccagtcaaacgataaggaacagcttcaagccggatggagtgtgcacccaggtgggcagcctgataggcagcgcaagcaggaggagctgaccgatgaagaaaaagagattattaacagagtgatcgccagagcggagaagatggaggagatggagcaggaaagaatcggcagactggtggatcgactggaaaatatgagaaaaaacgtcgccggagatggggttaatagatgtattctgtgcggtgaacagctcggcatgttgggatctgcttgtgtcgtctgtgaggactgtaaaaaaaacgtgtgtaccaagtgcggctag

SEQ ID NO: 55544 - DNA, 315 bp, Artificial Sequence
  derived and/or modified sequence
atgactgacactgtcttttcgaacagttctaaccggtggatgtatccctctgacaggcccctccaatccaacgataaggagcaactccaggccggatggtcagtgcatcccggaggccaacccgatcgacagaggaagcaggaggaactcacagacgaggaaaaagagattatcaaccgtgttatcgctcgagccgagaagatggaggagatggaacaagaaagaatcggacggctggtcgacaggcttgagaatatgcgcaaaaatgtagctggcgatggtgtaaataggtgcatactgtgtggggagcaatag

SEQ ID NO: 55545 - DNA, 120 bp, Artificial Sequence
  derived and/or modified sequence
atgacagacaccgttttttccaatagctcaaacaggtggatgtatccttccgacaggcctctgcagagcaacgacaaggagcaactgcaggcaggctggtccgttcaccctgggggttag

SEQ ID NO: 55546 - DNA, 348 bp, Artificial Sequence
  derived and/or modified sequence
atgacagataccgtgtttagtaatagttctaatcggtggatgtacccctccgacaggccattacagtccaacgataaagagcagttgcaggcgggatggtccgtgcatcctgggggtcagcctgacagacagagaaaacaggaagagctcacagatgaagaaaaagaaatcataaaccgcgtgatagcgagggcagaaaaaatggaggagatggagcaagaacgtatcggacgactggttgaccgcctggagaacatgagaaagaacgtggccggtgatggcgtgaatcgttgtatattgtgtggagagcagctcggtatgcttggctctgcttgtgttgtttgctag

SEQ ID NO: 55547 - DNA, 378 bp, Artificial Sequence
  derived and/or modified sequence
atgacggataccgtgttctcaaactcttcaaatagatggatgtatccctccgataggcccctgcagtccaacgataaagagcagcttcaggcgggttggtcagtccaccccggtgggcagccggacagacaacgcaaacaggaagaactcactgatgaggaaaaggaaataatcaaccgtgttatcgccagagctgagaaaatggaagagatggagcaggaaagaatcgggaggctggtagatcgactggaaaatatgcgcaaaaacgttgccggtgacggcgttaaccgatgtatactttgcggggagcagttgggaatgctgggctcagcttgtgttgtatgtgaagactgcaaaaaaaacgtctgcaccaaatag

SEQ ID NO: 55548 - DNA, 546 bp, Artificial Sequence
  derived and/or modified sequence
atgaccgatacggtgttcagtaattcttcaaacagatggatgtacccctccgaccgcccactgcaaagcaatgataaggaacaactgcaggctggatggtctgtgcacccgggagggcaaccagaccgccaaaggaaacaagaggaactgactgatgaggagaaggaaatcatcaacagggtaatagcgcgagctgaaaagatggaggagatggaacaagaacgcattggccgtctggtggacagactcgaaaatatgaggaagaacgtggccggtgatggagtgaaccgatgcattctgtgtggggaacagctgggaatgttaggttccgcttgcgtggtgtgcgaagactgcaaaaaaaatgtctgcaccaagtgcggggttgagactaataatcgactacactccgtctggctctgcaagatttgtatagagcagcgggaggtgtggaaaagatccggcgcttggtttttcaaaggctttcctaaacaggtgctcccccagcctatgcctatcaaaaaaaccaagccgcagcagcccgtgtag

SEQ ID NO: 55549 - DNA, 285 bp, Artificial Sequence
  derived and/or modified sequence
atgaccgacactgtgttcagcaactcaagtaacaggtggatgtaccccagcgatcgacctctgcaatcaaatgataaagagcagttgcaagccggttggagcgtccaccctggtggccaacccgaccgtcagcgtaaacaggaggagctgactgacgaagaaaaagagattatcaatcgtgttatcgctagagctgaaaagatggaagaaatggagcaggagcggattggcagactggttgacaggttggagaatatgcggaagaatgtggcaggtgatggctag

SEQ ID NO: 55550 - DNA, 363 bp, Artificial Sequence
  derived and/or modified sequence
atgacagacacggtgttttccaattcatctaacaggtggatgtacccgagtgacaggccactccaaagtaacgacaaggagcagctgcaagcgggatggtccgtgcatccaggcggacaacctgatagacaaagaaagcaggaggaactgaccgacgaggaaaaagaaatcatcaaccgggtcatcgctcgcgctgagaaaatggaagagatggaacaagaacgtattgggagactcgtagatcgcctggagaatatgcgtaaaaatgttgcaggggacggcgttaacaggtgcatcctgtgtggagagcagctcggcatgctgggatctgcttgtgtcgtgtgtgaggactgcaagaagtag

SEQ ID NO: 55551 - DNA, 405 bp, Artificial Sequence
  derived and/or modified sequence
atgactgacacagtgttcagcaattcaagcaataggtggatgtacccctctgatagaccattgcagtctaacgataaggagcagttgcaggcgggttggtctgtgcaccccggtggtcagcctgataggcagcgcaagcaggaagagctgacggatgaggagaaagaaataatcaatcgggtgattgccagagctgagaaaatggaagagatggagcaggagcggattggcaggctggttgaccggctcgaaaatatgaggaagaacgtggcaggggacggagttaacagatgtatactgtgcggggagcagctcggcatgctcggtagcgcctgtgtggtgtgcgaagattgtaaaaagaacgtttgtaccaagtgcggagtggagactaataatcgcttgtag

SEQ ID NO: 55552 - DNA, 4679 bp, Artificial Sequence
  derived and/or modified sequence
ggcaccgcacacataaatcacgggtgggaggcaggcttggttcccgcttggttccccctgcactgggaagctgccgccccgcttcccttgctcacacagggctttgcagtagtggtggcagccgcggcagaaactggctctggggaagcaattgattcgtctactgccagcagcccggagttgcctacgcggactggaaaggaagggagaagggagagagagagagagagagagagagagagagagagagactcacagagctaaaaccttcatccatgtggaggacagtctgagggagccactgtcccttgtccactgactcactggctggtccgagttttctccgcttctggcagtggcacctccgctgagcttttaaaccaagtcattgggacttagcgtctttctacccggcagggaagggaggagttggcaagaatttggctcacccattccccctgcaagcctccagcgtcgcggagcactagacatctactatgactgacaccgtgttcagcaacagttctaaccgttggatgtaccccagtgaccggccccttcaatcaaatgataaagaacagctccaggcaggctggtccgtccaccccggtggtcagcctgacaggcagaggaagcaggaagagctgactgatgaggagaaagaaatcatcaacagggtgattgctcgagctgagaaaatggaagagatggagcaggagcgaatcggacgcctggtggaccgcctagaaaacatgaggaagaacgtggctggagatggggtgaaccgctgcatactgtgtggagaacagctggggatgctgggctctgcctgtgtagtatgtgaggactgtaagaagaacgtctgcaccaagtgcggagtggagaccaacaaccgcctgcattctgtgtggctctgcaaaatctgcattgagcagagggaggtgtggaagcgttctggagcgtggttcttcaaaggcttccccaaacaggtcctcccacagcctatgcctataaagaagaccaagccccagcagcctgtcagtgagcctgctgcccctgaacagcctgctcctgagcccaagcaccctgcccgggctccagctcgaggtgacagtgaagataggaggggcccgggtcagaagacaggccctgacccagcctctgctcccgggcgaggaaactatgggcctcccgtgcgcagggcctccgaggcacgaatgagctcatctagccgagattcagagagctgggaccacagtgggggtgctggagactccagccggagcccagcaggtttgagacgggccaactcagtccaggcctccagacctgccccaggctcggtgcagagcccagcgccacctcagcctgggcagccagggaccccaggaggaagcagaccgggtcctgggccagcaggacgctttccagatcagaagccagaggtggctccgagcgaccctgggaccactgccccaccccgagaggagagaacagggggagtcgggggctacccagcagttggagccagagaggaccgaatgagccacccctccggaccctattcccaagcatctgcagctgccccccagcctgctgcagcccgccagccaccacccccagaggaggaggaagaggaagccaacagctacgattcggatgaagcaaccaccctgggtgccctggaattcagccttctctacgaccaggacaacagctccctgcagtgcaccatcattaaggccaagggcctgaagcccatggattcaaacggcttggctgatccctacgttaagctgcacctcctgccgggagccagcaagtccaacaagcttcgtacaaaaactctgcggaatacccggaaccccatctggaatgagaccctcgtgtatcacggcatcaccgatgaggacatgcaaaggaagaccctcaggatctccgtctgtgatgaggacaaatttggccacaatgaatttattggtgagaccagattctccctcaagaaactgaagcccaaccagaggaagaatttcaacatctgcctggagcgagtgattcctatgaaacgtgctgggaccaccgggtcagcccgaggcatggccctttatgaggaagagcaggtggagcgtgttggtgacatcgaggagcgtggcaagatcctggtctccctcatgtacagcacacagcagggaggcctcattgtgggcatcatacgctgcgtgcacctggctgccatggacgctaatggctactcagacccattcgtcaagctctggctgaaaccggacatgggaaagaaggccaaacacaagactcaaattaaaaagaaaaccttgaatcccgaattcaatgaggagtttttctatgacatcaaacacagtgacctggcaaagaagtcactggacatttcagtctgggactatgacatcggcaagtccaatgattacatcggaggctgccagctggggatctctgccaagggagagcgcttaaaacactggtacgagtgtctgaaaaataaagacaagaagatagagcgctggcaccagctacagaatgagaaccacgtgtcaagtgattaggctagtgcccaggtccccatctccatgtcccgggtcccccccagcctgctctagctgcccaccgcaccctgatctctcttctctatgcctacctccccccataccctgctgatctccctgagcctgcctttgagcccccgtcacgttgggcactgctgccaaagactccctcctccctgatgctgggatgtgggctctgaatacagcccctctctcatccctgggatggagcaatggggatggggttggggagacgtttacaaagaggttgatcatttaataacctctcagtttgggtaaattacaaaggttcttcatcatttaggactgtttttagaccctcctagccttgaacacacacatgtacacacacacacacacacacacacacacaccctttcattccctgtgttgtgtctctgtatatccccagttgtcagcagacccggacaatgctgtgagagaagcattggggcacaaatagagcctccgggctcccactgccccctgagatgtacaccctgattgccaggaaaacagactgctgtgttcagtaacacaccctccctgctccaagtgcaccaggatgcaaatgcacagaattcaccaggggcttggacgctctcctctttccgaatgtcacctgtgtgcttcctagcaaaacaaaaacaaacgacaacaacaaaaaacccttcctctgtcaccttttctcctcctccctcttctttcccttccatgatagtagattctctctttctcagcctctcccctctcctttctctccctgcctttcttccctttgcctttctctctctctaaagcagtaacaccgcaaaaacaacagcaaaaaaagtgtatgttaacctagcctcacccccttgctctcaccagcctgaccaggaaactgagaaactggcccaaacctgagattccacttgggcccacgcttcttaactgacccactcctcccgttggcagaaccagacattcccagggcttgggccaatggctggcactgccctgagtgcatggcagcatccctcaagctgtgtagatgccccatagaggactctctcatccgtgggctccccgggtgggcacggaggcatttagaagaccagggccatgggtctgaggaagcctcagccaaagcctccagcctttctcctttctccgctcttaggtaaatgaacaagctaccctcctccccaatgcccttgactctgtttcattgactcttttgcatcccatctctcactcagaaccccctccagtctctctgtctctctttgtctgtctctctgtctcctgcactctcgttactaagcttcctgggagaatcaaataatatcatggctatggaacagtagagagagacaggcctgatgccaaaggctttgggctcatcatcaatctttcactttcttcctataaaaaaaattattttataaaggaggaaaaggcaatgtgggcaaacattacaaatttgaggttgaagtcaggcaatcttcaatgccctgtgagaaaggttcgattttcccaattttgatgaagtcttccctcatgaaaatcactcccagtcatcccaaacccctgacattctctacagaagcatcagacagatactcaaactctcactttccccaaatcacatctcttaacttttcaacgccctccaccctcagctccctgcacaattcatgggaggactcatttcttgccttgaataaccattttctaaacatcgagctcttcaccttccccaaggtggccaacagcttcctggctgccatctttccttttgaccttatctttccccattagtccctggtggcacctactctcagcccacctccctcaccacagtttccccttaggagacagcatgctggctgtgtcgcccaagcctgatgctggtgtaggcgctggaatcagcatgcagcaagctcacagtgcccctagtctgggtgcccgctgtccccgacaaatgtaaccacctccctgcctagaatacacacacgtcctccggtgcatgcacaaccacccagcatctttctttgtgatgatgtagccaaaaataaagtaggagcatccaag

SEQ ID NO: 55553 - DNA, 4452 bp, Artificial Sequence
  derived and/or modified sequence
tttctttttgtcttggtcctgcatgatttaggggtagttgatgtgtctgtgtgtctacgtgtgtgcactggtgctttgattttattttgggaagagtaggagagtcaaatgaacaattttctttcaggcacctccgctgagcttttaaaccaagtcattgggacttagcgtctttctacccggcagggaagggaggagttggcaagaatttggctcacccattccccctgcaagcctccagcgtcgcggagcactagacatctactatgactgacaccgtgttcagcaacagttctaaccgttggatgtaccccagtgaccggccccttcaatcaaatgataaagaacagctccaggcaggctggtccgtccaccccggtggtcagcctgacaggcagaggaagcaggaagagctgactgatgaggagaaagaaatcatcaacagggtgattgctcgagctgagaaaatggaagagatggagcaggagcgaatcggacgcctggtggaccgcctagaaaacatgaggaagaacgtggctggagatggggtgaaccgctgcatactgtgtggagaacagctggggatgctgggctctgcctgtgtagtatgtgaggactgtaagaagaacgtctgcaccaagtgcggagtggagaccaacaaccgcctgcattctgtgtggctctgcaaaatctgcattgagcagagggaggtgtggaagcgttctggagcgtggttcttcaaaggcttccccaaacaggtcctcccacagcctatgcctataaagaagaccaagccccagcagcctgtcagtgagcctgctgcccctgaacagcctgctcctgagcccaagcaccctgcccgggctccagctcgaggtgacagtgaagataggaggggcccgggtcagaagacaggccctgacccagcctctgctcccgggcgaggaaactatgggcctcccgtgcgcagggcctccgaggcacgaatgagctcatctagccgagattcagagagctgggaccacagtgggggtgctggagactccagccggagcccagcaggtttgagacgggccaactcagtccaggcctccagacctgccccaggctcggtgcagagcccagcgccacctcagcctgggcagccagggaccccaggaggaagcagaccgggtcctgggccagcaggacgctttccagatcagaagccagaggtggctccgagcgaccctgggaccactgccccaccccgagaggagagaacagggggagtcgggggctacccagcagttggagccagagaggaccgaatgagccacccctccggaccctattcccaagcatctgcagctgccccccagcctgctgcagcccgccagccaccacccccagaggaggaggaagaggaagccaacagctacgattcggatgaagcaaccaccctgggtgccctggaattcagccttctctacgaccaggacaacagctccctgcagtgcaccatcattaaggccaagggcctgaagcccatggattcaaacggcttggctgatccctacgttaagctgcacctcctgccgggagccagcaagtccaacaagcttcgtacaaaaactctgcggaatacccggaaccccatctggaatgagaccctcgtgtatcacggcatcaccgatgaggacatgcaaaggaagaccctcaggatctccgtctgtgatgaggacaaatttggccacaatgaatttattggtgagaccagattctccctcaagaaactgaagcccaaccagaggaagaatttcaacatctgcctggagcgagtgattcctatgaaacgtgctgggaccaccgggtcagcccgaggcatggccctttatgaggaagagcaggtggagcgtgttggtgacatcgaggagcgtggcaagatcctggtctccctcatgtacagcacacagcagggaggcctcattgtgggcatcatacgctgcgtgcacctggctgccatggacgctaatggctactcagacccattcgtcaagctctggctgaaaccggacatgggaaagaaggccaaacacaagactcaaattaaaaagaaaaccttgaatcccgaattcaatgaggagtttttctatgacatcaaacacagtgacctggcaaagaagtcactggacatttcagtctgggactatgacatcggcaagtccaatgattacatcggaggctgccagctggggatctctgccaagggagagcgcttaaaacactggtacgagtgtctgaaaaataaagacaagaagatagagcgctggcaccagctacagaatgagaaccacgtgtcaagtgattaggctagtgcccaggtccccatctccatgtcccgggtcccccccagcctgctctagctgcccaccgcaccctgatctctcttctctatgcctacctccccccataccctgctgatctccctgagcctgcctttgagcccccgtcacgttgggcactgctgccaaagactccctcctccctgatgctgggatgtgggctctgaatacagcccctctctcatccctgggatggagcaatggggatggggttggggagacgtttacaaagaggttgatcatttaataacctctcagtttgggtaaattacaaaggttcttcatcatttaggactgtttttagaccctcctagccttgaacacacacatgtacacacacacacacacacacacacacacaccctttcattccctgtgttgtgtctctgtatatccccagttgtcagcagacccggacaatgctgtgagagaagcattggggcacaaatagagcctccgggctcccactgccccctgagatgtacaccctgattgccaggaaaacagactgctgtgttcagtaacacaccctccctgctccaagtgcaccaggatgcaaatgcacagaattcaccaggggcttggacgctctcctctttccgaatgtcacctgtgtgcttcctagcaaaacaaaaacaaacgacaacaacaaaaaacccttcctctgtcaccttttctcctcctccctcttctttcccttccatgatagtagattctctctttctcagcctctcccctctcctttctctccctgcctttcttccctttgcctttctctctctctaaagcagtaacaccgcaaaaacaacagcaaaaaaagtgtatgttaacctagcctcacccccttgctctcaccagcctgaccaggaaactgagaaactggcccaaacctgagattccacttgggcccacgcttcttaactgacccactcctcccgttggcagaaccagacattcccagggcttgggccaatggctggcactgccctgagtgcatggcagcatccctcaagctgtgtagatgccccatagaggactctctcatccgtgggctccccgggtgggcacggaggcatttagaagaccagggccatgggtctgaggaagcctcagccaaagcctccagcctttctcctttctccgctcttaggtaaatgaacaagctaccctcctccccaatgcccttgactctgtttcattgactcttttgcatcccatctctcactcagaaccccctccagtctctctgtctctctttgtctgtctctctgtctcctgcactctcgttactaagcttcctgggagaatcaaataatatcatggctatggaacagtagagagagacaggcctgatgccaaaggctttgggctcatcatcaatctttcactttcttcctataaaaaaaattattttataaaggaggaaaaggcaatgtgggcaaacattacaaatttgaggttgaagtcaggcaatcttcaatgccctgtgagaaaggttcgattttcccaattttgatgaagtcttccctcatgaaaatcactcccagtcatcccaaacccctgacattctctacagaagcatcagacagatactcaaactctcactttccccaaatcacatctcttaacttttcaacgccctccaccctcagctccctgcacaattcatgggaggactcatttcttgccttgaataaccattttctaaacatcgagctcttcaccttccccaaggtggccaacagcttcctggctgccatctttccttttgaccttatctttccccattagtccctggtggcacctactctcagcccacctccctcaccacagtttccccttaggagacagcatgctggctgtgtcgcccaagcctgatgctggtgtaggcgctggaatcagcatgcagcaagctcacagtgcccctagtctgggtgcccgctgtccccgacaaatgtaaccacctccctgcctagaatacacacacgtcctccggtgcatgcacaaccacccagcatctttctttgtgatgatgtagccaaaaataaagtaggagcatccaagaaaa

SEQ ID NO: 55554 - DNA, 4179 bp, Artificial Sequence
  derived and/or modified sequence
atgactgacaccgtgttcagcaacagttctaaccgttggatgtaccccagtgaccggccccttcaatcaaatgataaagaacagctccaggcaggctggtccgtccaccccggtggtcagcctgacaggcagaggaagcaggaagagctgactgatgaggagaaagaaatcatcaacagggtgattgctcgagctgagaaaatggaagagatggagcaggagcgaatcggacgcctggtggaccgcctagaaaacatgaggaagaacgtggctggagatggggtgaaccgctgcatactgtgtggagaacagctggggatgctgggctctgcctgtgtagtatgtgaggactgtaagaagaacgtctgcaccaagtgcggagtggagaccaacaaccgcctgcattctgtgtggctctgcaaaatctgcattgagcagagggaggtgtggaagcgttctggagcgtggttcttcaaaggcttccccaaacaggtcctcccacagcctatgcctataaagaagaccaagccccagcagcctgtcagtgagcctgctgcccctgaacagcctgctcctgagcccaagcaccctgcccgggctccagctcgaggtgacagtgaagataggaggggcccgggtcagaagacaggccctgacccagcctctgctcccgggcgaggaaactatgggcctcccgtgcgcagggcctccgaggcacgaatgagctcatctagccgagattcagagagctgggaccacagtgggggtgctggagactccagccggagcccagcaggtttgagacgggccaactcagtccaggcctccagacctgccccaggctcggtgcagagcccagcgccacctcagcctgggcagccagggaccccaggaggaagcagaccgggtcctgggccagcaggacgctttccagatcagaagccagaggtggctccgagcgaccctgggaccactgccccaccccgagaggagagaacagggggagtcgggggctacccagcagttggagccagagaggaccgaatgagccacccctccggaccctattcccaagcatctgcagctgccccccagcctgctgcagcccgccagccaccacccccagaggaggaggaagaggaagccaacagctacgattcggatgaagcaaccaccctgggtgccctggaattcagccttctctacgaccaggacaacagctccctgcagtgcaccatcattaaggccaagggcctgaagcccatggattcaaacggcttggctgatccctacgttaagctgcacctcctgccgggagccagcaagtccaacaagcttcgtacaaaaactctgcggaatacccggaaccccatctggaatgagaccctcgtgtatcacggcatcaccgatgaggacatgcaaaggaagaccctcaggatctccgtctgtgatgaggacaaatttggccacaatgaatttattggtgagaccagattctccctcaagaaactgaagcccaaccagaggaagaatttcaacatctgcctggagcgagtgattcctatgaaacgtgctgggaccaccgggtcagcccgaggcatggccctttatgaggaagagcaggtggagcgtgttggtgacatcgaggagcgtggcaagatcctggtctccctcatgtacagcacacagcagggaggcctcattgtgggcatcatacgctgcgtgcacctggctgccatggacgctaatggctactcagacccattcgtcaagctctggctgaaaccggacatgggaaagaaggccaaacacaagactcaaattaaaaagaaaaccttgaatcccgaattcaatgaggagtttttctatgacatcaaacacagtgacctggcaaagaagtcactggacatttcagtctgggactatgacatcggcaagtccaatgattacatcggaggctgccagctggggatctctgccaagggagagcgcttaaaacactggtacgagtgtctgaaaaataaagacaagaagatagagcgctggcaccagctacagaatgagaaccacgtgtcaagtgattaggctagtgcccaggtccccatctccatgtcccgggtcccccccagcctgctctagctgcccaccgcaccctgatctctcttctctatgcctacctccccccataccctgctgatctccctgagcctgcctttgagcccccgtcacgttgggcactgctgccaaagactccctcctccctgatgctgggatgtgggctctgaatacagcccctctctcatccctgggatggagcaatggggatggggttggggagacgtttacaaagaggttgatcatttaataacctctcagtttgggtaaattacaaaggttcttcatcatttaggactgtttttagaccctcctagccttgaacacacacatgtacacacacacacacacacacacacacacaccctttcattccctgtgttgtgtctctgtatatccccagttgtcagcagacccggacaatgctgtgagagaagcattggggcacaaatagagcctccgggctcccactgccccctgagatgtacaccctgattgccaggaaaacagactgctgtgttcagtaacacaccctccctgctccaagtgcaccaggatgcaaatgcacagaattcaccaggggcttggacgctctcctctttccgaatgtcacctgtgtgcttcctagcaaaacaaaaacaaacgacaacaacaaaaaacccttcctctgtcaccttttctcctcctccctcttctttcccttccatgatagtagattctctctttctcagcctctcccctctcctttctctccctgcctttcttccctttgcctttctctctctctaaagcagtaacaccgcaaaaacaacagcaaaaaaagtgtatgttaacctagcctcacccccttgctctcaccagcctgaccaggaaactgagaaactggcccaaacctgagattccacttgggcccacgcttcttaactgacccactcctcccgttggcagaaccagacattcccagggcttgggccaatggctggcactgccctgagtgcatggcagcatccctcaagctgtgtagatgccccatagaggactctctcatccgtgggctccccgggtgggcacggaggcatttagaagaccagggccatgggtctgaggaagcctcagccaaagcctccagcctttctcctttctccgctcttaggtaaatgaacaagctaccctcctccccaatgcccttgactctgtttcattgactcttttgcatcccatctctcactcagaaccccctccagtctctctgtctctctttgtctgtctctctgtctcctgcactctcgttactaagcttcctgggagaatcaaataatatcatggctatggaacagtagagagagacaggcctgatgccaaaggctttgggctcatcatcaatctttcactttcttcctataaaaaaaattattttataaaggaggaaaaggcaatgtgggcaaacattacaaatttgaggttgaagtcaggcaatcttcaatgccctgtgagaaaggttcgattttcccaattttgatgaagtcttccctcatgaaaatcactcccagtcatcccaaacccctgacattctctacagaagcatcagacagatactcaaactctcactttccccaaatcacatctcttaacttttcaacgccctccaccctcagctccctgcacaattcatgggaggactcatttcttgccttgaataaccattttctaaacatcgagctcttcaccttccccaaggtggccaacagcttcctggctgccatctttccttttgaccttatctttccccattagtccctggtggcacctactctcagcccacctccctcaccacagtttccccttaggagacagcatgctggctgtgtcgcccaagcctgatgctggtgtaggcgctggaatcagcatgcagcaagctcacagtgcccctagtctgggtgcccgctgtccccgacaaatgtaaccacctccctgcctagaatacacacacgtcctccggtgcatgcacaaccacccagcatctttctttgtgatgatgtagccaaaaataaagtaggagcatcc

SEQ ID NO: 55555 - DNA, 2581 bp, Artificial Sequence
  derived and/or modified sequence
gttcctaacccttgatcttggcttgttaaccctttctgagcttccctttagcggggggatgaggatggtcggctgtttccacatttaagggcagagctgggtgaagggtggtgttagtgctcgagggtcacgcgcgggtggctttgccgcggtggtggcagcggtggcagaggcgacaccgctggaggcggcggagggacgggcccaccaacgctgcaggccggcacctccgctgagcttttaaaccaagtcattgggacttagcgtctttctacccggcagggaagggaggagttggcaagaatttggctcacccattccccctgcaagcctccagcgtcgcggagcactagacatctactatgactgacaccgtgttcagcaacagttctaaccgttggatgtaccccagtgaccggccccttcaatcaaatgataaagaacagctccaggcaggctggtccgtccaccccggtggtcagcctgacaggcagaggaagcaggaagagctgactgatgaggagaaagaaatcatcaacagggtgattgctcgagctgagaaaatggaagagatggagcaggagcgaatcggacgcctggtggaccgcctagaaaacatgaggaagaacgtggctggagatggggtgaaccgctgcatactgtgtggagaacagctggggatgctgggctctgcctgtgtagtatgtgaggactgtaagaagaacgtctgcaccaagtgcggagtggagaccaacaaccgcctgcattctgtgtggctctgcaaaatctgcattgagcagagggaggtgtggaagcgttctggagcgtggttcttcaaaggcttccccaaacaggtcctcccacagcctatgcctataaagaagaccaagccccagcagcctgtcagtgagcctgctgcccctgaacagcctgctcctgagcccaagcaccctgcccgggctccagctcgaggtgacagtgaagataggaggggcccgggtcagaagacaggccctgacccagcctctgctcccgggcgaggaaactatgggcctcccgtgcgcagggcctccgaggcacgaatgagctcatctagccgagattcagagagctgggaccacagtgggggtgctggagactccagccggagcccagcaggtttgagacgggccaactcagtccaggcctccagacctgccccaggctcggtgcagagcccagcgccacctcagcctgggcagccagggaccccaggaggaagcagaccgggtcctgggccagcaggacgctttccagatcagaagccagaggtggctccgagcgaccctgggaccactgccccaccccgagaggagagaacagggggagtcgggggctacccagcagttggagccagagaggaccgaatgagccacccctccggaccctattcccaagcatctgcagctgccccccagcctgctgcagcccgccagccaccacccccagaggaggaggaagaggaagccaacagctacgattcggatgaagcaaccaccctgggtgccctggaattcagccttctctacgaccaggacaacagctccctgcagtgcaccatcattaaggccaagggcctgaagcccatggattcaaacggcttggctgatccctacgttaagctgcacctcctgccgggagccagcaagtccaacaagcttcgtacaaaaactctgcggaatacccggaaccccatctggaatgagaccctcgtgtatcacggcatcaccgatgaggacatgcaaaggaagaccctcaggatctccgtctgtgatgaggacaaatttggccacaatgaatttattggtgagaccagattctccctcaagaaactgaagcccaaccagaggaagaatttcaacatctgcctggagcgagtgattcctatgaaacgtgctgggaccaccgggtcagcccgaggcatggccctttatgaggaagagcaggtggagcgtgttggtgacatcgaggagcgtggcaagatcctggtctccctcatgtacagcacacagcagggaggcctcattgtgggcatcatacgctgcgtgcacctggctgccatggacgctaatggctactcagacccattcgtcaagctctggctgaaaccggacatgggaaagaaggccaaacacaagactcaaattaaaaagaaaaccttgaatcccgaattcaatgaggagtttttctatgacatcaaacacagtgacctggcaaagaagtcactggacatttcagtctgggactatgacatcggcaagtccaatgattacatcggaggctgccagctggggatctctgccaagggagagcgcttaaaacactggtacgagtgtctgaaaaataaagacaagaagatagagcgctggcaccagctacagaatgagaaccacgtgtcaagtgattaggctagtgcccaggtccccatctccatgtcccgggtcccccccagcctgctctagctgcccaccgcaccctgatctctcttctctatgcctacctccccccataccctgctgatctccctgagcctgcctttgag

SEQ ID NO: 55556 - DNA, 561 bp, Artificial Sequence
  derived and/or modified sequence
agaggcgacaccgctggaggcggcggagggacgggcccaccaacgctgcaggccggttcttgctctgttgcccaggctggactgcagtggcaccagcatggctcactgcagcctcgaccccctaggctcaagtgatcctcctgcttcagcctcctgagtagctgggaccacaggcacctccgctgagcttttaaaccaagtcattgggacttagcgtctttctacccggcagggaagggaggagttggcaagaatttggctcacccattccccctgcaagcctccagcgtcgcggagcactagacatctactatgactgacaccgtgttcagcaacagttctaaccgttggatgtaccccagtgaccggccccttcaatcaaatgataaagaacagctccaggcaggctggtccgtccaccccggtggtcagcctgacaggcagaggaagcaggaagagctgactgatgaggagaaagaaatcatcaacagggtgattgctcgagctgagaaaatggaagagatggagcaggagcgaatcggacgcctggtggaccgccta

SEQ ID NO: 55557 - DNA, 531 bp, Artificial Sequence
  derived and/or modified sequence
gagagggaggaagaggagggagaggggcgatggagaaggtcatcagttgggtcaaagatggagctactagccaggcctgagacctgagcccctggacaccatgtttctattttctgcttctgtgaaattgcctcttctacatacctcatgcaacgttcgttctacataattcagcaccagcttagattctcactatcaaattgaaccctttcccctttgctatccacacaggagcactagacatctactatgactgacaccgtgttcagcaacagttctaaccgttggatgtaccccagtgaccggccccttcaatcaaatgataaagaacagctccaggcaggctggtccgtccaccccggtggtcagcctgacaggcagaggaagcaggaagagctgactgatgaggagaaagaaatcatcaacagggtgattgctcgagctgagaaaatggaagagatggagcaggagcgaatcggacgcctggtggaccgcctagaaaacatgaggaagaacgtggctggagatggg

SEQ ID NO: 55558 - DNA, 660 bp, Artificial Sequence
  derived and/or modified sequence
ttttctgctctgaattctgagaaactccaggcacctccgctgagcttttaaaccaagtcattgggacttagcgtctttctacccggcagggaagggaggagttggcaagaatttggctcacccattccccctgcaagcctccagcgtcgcggagcactagacatctactatgactgacaccgtgttcagcaacagttctaaccgttggatgtaccccagtgaccggccccttcaatcaaatgataaagaacagctccaggcaggctggtccgtccaccccggtggtcagcctgacaggcagaggaagcaggaagagctgactgatgaggagaaagaaatcatcaacagggtgattgctcgagctgagaaaatggaagagatggagcaggagcgaatcggacgcctggtggaccgcctagaaaacatgaggaagaacgtggctggagatggggtgaaccgctgcatactgtgtggagaacagctggggatgctgggctctgcctgtgtagtatgtgaggactgtaagaagaacgtctgcaccaagtgcggagtggagaccaacaaccgcctgcattctgtgtggctctgcaaaatctgcattgagcagagggaggtgtggaagcgttctggagcgtggttcttcaaaggcttccccaaaca

SEQ ID NO: 55559 - DNA, 561 bp, Artificial Sequence
  derived and/or modified sequence
acttttcactttcagaatggcgtccagtaaatcaatcctgggcacctccgctgagcttttaaaccaagtcattgggacttagcgtctttctacccggcagggaagggaggagttggcaagaatttggctcacccattccccctgcaagcctccagcgtcgcggagcactagacatctactatgactgacaccgtgttcagcaacagttctaaccgttggatgtaccccagtgaccggccccttcaatcaaatgataaagaacagctccaggcaggctggtccgtccaccccggtggtcagcctgacaggcagaggaagcaggaagagctgactgatgaggagaaagaaatcatcaacagggtgattgctcgagctgagaaaatggaagagatggagcaggagcgaatcggacgcctggtggaccgcctagaaaacatgaggaagaacgtggctggagatggggtgaaccgctgcatactgtgtggagaacagctggggatgctgggctctgcctgtgtagtatgtgaggactgtaagaagaacgtctgcaccaagtgcgga

SEQ ID NO: 55560 - DNA, 570 bp, Artificial Sequence
  derived and/or modified sequence
ccttctgaagctggacttgaacctgagaaaatgtgacctggggctgctggcggccagcttgtccccgttaggtgacaataagcagacagaagagccaagcagctatggaggaaaatcaggcacctccgctgagcttttaaaccaagtcattgggacttagcgtctttctacccggcagggaagggaggagttggcaagaatttggctcacccattccccctgcaagcctccagcgtcgcggagcactagacatctactatgactgacaccgtgttcagcaacagttctaaccgttggatgtaccccagtgaccggccccttcaatcaaatgataaagaacagctccaggcaggctggtccgtccaccccggtggtcagcctgacaggcagaggaagcaggaagagctgactgatgaggagaaagaaatcatcaacagggtgattgctcgagctgagaaaatggaagagatggagcaggagcgaatcggacgcctggtggaccgcctagaaaacatgaggaagaacgtggctggagatggggtgaaccgctgcatactgtgtggagaacag

SEQ ID NO: 55561 - DNA, 534 bp, Artificial Sequence
  derived and/or modified sequence
gaatttcaggaatattgggagaagtcaccagaaaagaggactgctcccttctgaagctggacttgaacctgagaaaatgtgacctggggctgctggcggccagcttgtccccgttaggtgacaataagcagacagaagagccaagcagctatggaggaaaatcaggtcatcagttgggtcaaagatggagctactagccaggcctgagacctgagcccctggacaccatgtttctattttctgcttctgtgaaattgcctcttctacatacctcatgcacctccgctgagcttttaaaccaagtcattgggacttagcgtctttctacccggcagggaagggaggagttggcaagaatttggctcacccattccccctgcaagcctccagcgtcgcggagcactagacatctactatgactgacaccgtgttcagcaacagttctaaccgttggatgtaccccagtgaccggccccttcaatcaaatgataaagaacagctccaggcaggctggtccgtccaccccggtggtca

SEQ ID NO: 55562 - DNA, 538 bp, Artificial Sequence
  derived and/or modified sequence
atagttcctttgctctgagagtgagcgacagtattagaaaaagtgtgtggtaggcacctccgctgagcttttaaaccaagtcattgggacttagcgtctttctacccggcagggaagggaggagttggcaagaatttggctcacccattccccctgcaagcctccagcgtcgcggagcactagacatctactatgactgacaccgtgttcagcaacagttctaaccgttggatgtaccccagtgaccggccccttcaatcaaatgataaagaacagctccaggcaggctggtccgtccaccccggtggtcagcctgacaggcagaggaagcaggaagagctgactgatgaggagaaagaaatcatcaacagggtgattgctcgagctgagaaaatggaagagatggagcaggagcgaatcggacgcctggtggaccgcctagaaaacatgaggaagaacgtggctggagatggggtgaaccgctgcatactgtgtggagaacagctggggatgctgggctctgcctgtgtagtatgtg

SEQ ID NO: 55563 - DNA, 579 bp, Artificial Sequence
  derived and/or modified sequence
cttcatccatgtggaggacagtctgagggagccactgtcccttgtccactgactcactggctggcacctccgctgagcttttaaaccaagtcattgggacttagcgtctttctacccggcagggaagggaggagttggcaagaatttggctcacccattccccctgcaagcctccagcgtcgcggagcactagacatctactatgactgacaccgtgttcagcaacagttctaaccgttggatgtaccccagtgaccggccccttcaatcaaatgataaagaacagctccaggcaggctggtccgtccaccccggtggtcagcctgacaggcagaggaagcaggaagagctgactgatgaggagaaagaaatcatcaacagggtgattgctcgagctgagaaaatggaagagatggagcaggagcgaatcggacgcctggtggaccgcctagaaaacatgaggaagaacgtggctggagatggggtgaaccgctgcatactgtgtggagaacagctggggatgctgggctctgcctgtgtagtatgtgaggactgtaagaagaacgtctgcaccaagtg

SEQ ID NO: 55564 - DNA, 740 bp, Artificial Sequence
  derived and/or modified sequence
tttagcggggggatgaggatggtcggctgtttccacatttaagggcagagctgggtgaagggtggtgttagtgctcgagggtcacgcgcgggtggctttgccgcggtggtggcagcggtggcagaggcgacaccgctggaggcggcggagggacgggcccaccaacgctgcaggccggagcactagacatctactatgactgacaccgtgttcagcaacagttctaaccgttggatgtaccccagtgaccggccccttcaatcaaatgataaagaacagctccaggcaggctggtccgtccaccccggtggtcagcctgacaggcagaggaagcaggaagagctgactgatgaggagaaagaaatcatcaacagggtgattgctcgagctgagaaaatggaagagatggagcaggagcgaatcggacgcctggtggaccgcctagaaaacatgaggaagaacgtggctggagatggggtgaaccgctgcatactgtgtggagaacagctggggatgctgggctctgcctgtgtagtatgtgaggactgtaagaagaacgtctgcaccaagtgcggagtggagaccaacaaccgcctgcattctgtgtggctctgcaaaatctgcattgagcagagggaggtgtggaagcgttctggagcgtggttcttcaaaggcttccccaaacaggtcctcccacagcctatgcctataaagaagaccaagccccagcagcctgtcag

SEQ ID NO: 55565 - DNA, 557 bp, Artificial Sequence
  derived and/or modified sequence
ctttgccgcggtggtggcagcggtggcagaggcgacaccgctggaggcggcggagggacgggcccaccaacgctgcagggtctcgctctgtcacccaggctggagtgcaggagcagatcatagttcaccgcaacctccgcctcctgggctccagtgatccttccatcttagcctcctgagtagctgggaccacagcccctggacaccatgtttctattttctgcttctgtgaaattgcctcttctacatacctcatgagcactagacatctactatgactgacaccgtgttcagcaacagttctaaccgttggatgtaccccagtgaccggccccttcaatcaaatgataaagaacagctccaggcaggctggtccgtccaccccggtggtcagcctgacaggcagaggaagcaggaagagctgactgatgaggagaaagaaatcatcaacagggtgattgctcgagctgagaaaatggaagagatggagcaggagcgaatcggacgcctggtggaccgcctagaaaacatgaggaagaacgtggctggagatgggg

SEQ ID NO: 55566 - DNA, 572 bp, Artificial Sequence
  derived and/or modified sequence
aaggcatcttagcgctgtccgtggtgctgaccgccaatcccctggttgccgtttcgaccagctgggatctctggcacctccgctgagcttttaaaccaagtcattgggacttagcgtctttctacccggcagggaagggaggagttggcaagaatttggctcacccattccccctgcaagcctccagcgtcgcggagcactagacatctactatgactgacaccgtgttcagcaacagttctaaccgttggatgtaccccagtgaccggccccttcaatcaaatgataaagaacagctccaggcaggctggtccgtccaccccggtggtcagcctgacaggcagaggaagcaggaagagctgactgatgaggagaaagaaatcatcaacagggtgattgctcgagctgagaaaatggaagagatggagcaggagcgaatcggacgcctggtggaccgcctagaaaacatgaggaagaacgtggctggagatggggtgaaccgctgcatactgtgtggagaacagctggggatgctgggctctgcctgtgtagtatgtgaggactgtaagaag

SEQ ID NO: 55567 - DNA, 562 bp, Artificial Sequence
  derived and/or modified sequence
gtctttctacccggcagggaagggaggagttggcaagaatttggctcacccattccccctgcaagcctccagcgtcgcggggcaagaagaggagaagaggaagattgtggtccattcatgttctccagccaatactggccaaggagcactagacatctactatgactgacaccgtgttcagcaacagttctaaccgttggatgtaccccagtgaccggccccttcaatcaaatgataaagaacagctccaggcaggctggtccgtccaccccggtggtcagcctgacaggcagaggaagcaggaagagctgactgatgaggagaaagaaatcatcaacagggtgattgctcgagctgagaaaatggaagagatggagcaggagcgaatcggacgcctggtggaccgcctagaaaacatgaggaagaacgtggctggagatggggtgaaccgctgcatactgtgtggagaacagctggggatgctgggctctgcctgtgtagtatgtgaggactgtaagaagaacgtctgcaccaagtgcggagtggagaccaacaaccgcct

SEQ ID NO: 55568 - DNA, 2085 bp, Artificial Sequence
  derived and/or modified sequence
atgaccgacaccgtgttcagcaacagcagcaacagatggatgtaccccagcgacagacccctgcagagcaacgacaaggagcagctgcaggccggctggagcgtgcaccccggcggccagcccgacagacagagaaagcaggaggagctgaccgacgaggagaaggagatcatcaacagagtgatcgccagagccgagaagatggaggagatggagcaggagagaatcggcagactggtggacagactggagaacatgagaaagaacgtggccggcgacggcgtgaacagatgcatcctgtgcggcgagcagctgggcatgctgggcagcgcctgcgtggtgtgcgaggactgcaagaagaacgtgtgcaccaagtgcggcgtggagaccaacaacagactgcacagcgtgtggctgtgcaagatctgcatcgagcagagagaggtgtggaagagaagcggcgcctggttcttcaagggcttccccaagcaggtgctgccccagcccatgcccatcaagaagaccaagccccagcagcccgtgagcgagcccgccgcccccgagcagcccgcccccgagcccaagcaccccgccagagcccccgccagaggcgacagcgaggacagaagaggccccggccagaagaccggccccgaccccgccagcgcccccggcagaggcaactacggcccccccgtgagaagagccagcgaggccagaatgagcagcagcagcagagacagcgagagctgggaccacagcggcggcgccggcgacagcagcagaagccccgccggcctgagaagagccaacagcgtgcaggccagcagacccgcccccggcagcgtgcagagccccgcccccccccagcccggccagcccggcacccccggcggcagcagacccggccccggccccgccggcagattccccgaccagaagcccgaggtggcccccagcgaccccggcaccaccgccccccccagagaggagagaaccggcggcgtgggcggctaccccgccgtgggcgccagagaggacagaatgagccaccccagcggcccctacagccaggccagcgccgccgccccccagcccgccgccgccagacagccccccccccccgaggaggaggaggaggaggccaacagctacgacagcgacgaggccaccaccctgggcgccctggagttcagcctgctgtacgaccaggacaacagcagcctgcagtgcaccatcatcaaggccaagggcctgaagcccatggacagcaacggcctggccgacccctacgtgaagctgcacctgctgcccggcgccagcaagagcaacaagctgagaaccaagaccctgagaaacaccagaaaccccatctggaacgagaccctggtgtaccacggcatcaccgacgaggacatgcagagaaagaccctgagaatcagcgtgtgcgacgaggacaagttcggccacaacgagttcatcggcgagaccagattcagcctgaagaagctgaagcccaaccagagaaagaacttcaacatctgcctggagagagtgatccccatgaagagagccggcaccaccggcagcgccagaggcatggccctgtacgaggaggagcaggtggagagagtgggcgacatcgaggagagaggcaagatcctggtgagcctgatgtacagcacccagcagggcggcctgatcgtgggcatcatcagatgcgtgcacctggccgccatggacgccaacggctacagcgaccccttcgtgaagctgtggctgaagcccgacatgggcaagaaggccaagcacaagacccagatcaagaagaagaccctgaaccccgagttcaacgaggagttcttctacgacatcaagcacagcgacctggccaagaagagcctggacatcagcgtgtgggactacgacatcggcaagagcaacgactacatcggcggctgccagctgggcatcagcgccaagggcgagagactgaagcactggtacgagtgcctgaagaacaaggacaagaagatcgagagatggcaccagctgcagaacgagaaccacgtgagcagcgactag

SEQ ID NO: 55569 - DNA, 39 bp, Artificial Sequence
  derived and/or modified sequence
atgaccgacaccgtgttcagcaacagcagcaacagatag

SEQ ID NO: 55570 - DNA, 252 bp, Artificial Sequence
  derived and/or modified sequence
atgaccgacaccgtgttcagcaacagcagcaacagatggatgtaccccagcgacagacccctgcagagcaacgacaaggagcagctgcaggccggctggagcgtgcaccccggcggccagcccgacagacagagaaagcaggaggagctgaccgacgaggagaaggagatcatcaacagagtgatcgccagagccgagaagatggaggagatggagcaggagagaatcggcagactggtggacagactgtag

SEQ ID NO: 55571 - DNA, 285 bp, Artificial Sequence
  derived and/or modified sequence
atgaccgacaccgtgttcagcaacagcagcaacagatggatgtaccccagcgacagacccctgcagagcaacgacaaggagcagctgcaggccggctggagcgtgcaccccggcggccagcccgacagacagagaaagcaggaggagctgaccgacgaggagaaggagatcatcaacagagtgatcgccagagccgagaagatggaggagatggagcaggagagaatcggcagactggtggacagactggagaacatgagaaagaacgtggccggcgacggctag

SEQ ID NO: 55572 - DNA, 492 bp, Artificial Sequence
  derived and/or modified sequence
atgaccgacaccgtgttcagcaacagcagcaacagatggatgtaccccagcgacagacccctgcagagcaacgacaaggagcagctgcaggccggctggagcgtgcaccccggcggccagcccgacagacagagaaagcaggaggagctgaccgacgaggagaaggagatcatcaacagagtgatcgccagagccgagaagatggaggagatggagcaggagagaatcggcagactggtggacagactggagaacatgagaaagaacgtggccggcgacggcgtgaacagatgcatcctgtgcggcgagcagctgggcatgctgggcagcgcctgcgtggtgtgcgaggactgcaagaagaacgtgtgcaccaagtgcggcgtggagaccaacaacagactgcacagcgtgtggctgtgcaagatctgcatcgagcagagagaggtgtggaagagaagcggcgcctggttcttcaagggcttccccaagtag

SEQ ID NO: 55573 - DNA, 384 bp, Artificial Sequence
  derived and/or modified sequence
atgaccgacaccgtgttcagcaacagcagcaacagatggatgtaccccagcgacagacccctgcagagcaacgacaaggagcagctgcaggccggctggagcgtgcaccccggcggccagcccgacagacagagaaagcaggaggagctgaccgacgaggagaaggagatcatcaacagagtgatcgccagagccgagaagatggaggagatggagcaggagagaatcggcagactggtggacagactggagaacatgagaaagaacgtggccggcgacggcgtgaacagatgcatcctgtgcggcgagcagctgggcatgctgggcagcgcctgcgtggtgtgcgaggactgcaagaagaacgtgtgcaccaagtgcggctag

SEQ ID NO: 55574 - DNA, 315 bp, Artificial Sequence
  derived and/or modified sequence
atgaccgacaccgtgttcagcaacagcagcaacagatggatgtaccccagcgacagacccctgcagagcaacgacaaggagcagctgcaggccggctggagcgtgcaccccggcggccagcccgacagacagagaaagcaggaggagctgaccgacgaggagaaggagatcatcaacagagtgatcgccagagccgagaagatggaggagatggagcaggagagaatcggcagactggtggacagactggagaacatgagaaagaacgtggccggcgacggcgtgaacagatgcatcctgtgcggcgagcagtag

SEQ ID NO: 55575 - DNA, 120 bp, Artificial Sequence
  derived and/or modified sequence
atgaccgacaccgtgttcagcaacagcagcaacagatggatgtaccccagcgacagacccctgcagagcaacgacaaggagcagctgcaggccggctggagcgtgcaccccggcggctag

SEQ ID NO: 55576 - DNA, 348 bp, Artificial Sequence
  derived and/or modified sequence
atgaccgacaccgtgttcagcaacagcagcaacagatggatgtaccccagcgacagacccctgcagagcaacgacaaggagcagctgcaggccggctggagcgtgcaccccggcggccagcccgacagacagagaaagcaggaggagctgaccgacgaggagaaggagatcatcaacagagtgatcgccagagccgagaagatggaggagatggagcaggagagaatcggcagactggtggacagactggagaacatgagaaagaacgtggccggcgacggcgtgaacagatgcatcctgtgcggcgagcagctgggcatgctgggcagcgcctgcgtggtgtgctag

SEQ ID NO: 55577 - DNA, 378 bp, Artificial Sequence
  derived and/or modified sequence
atgaccgacaccgtgttcagcaacagcagcaacagatggatgtaccccagcgacagacccctgcagagcaacgacaaggagcagctgcaggccggctggagcgtgcaccccggcggccagcccgacagacagagaaagcaggaggagctgaccgacgaggagaaggagatcatcaacagagtgatcgccagagccgagaagatggaggagatggagcaggagagaatcggcagactggtggacagactggagaacatgagaaagaacgtggccggcgacggcgtgaacagatgcatcctgtgcggcgagcagctgggcatgctgggcagcgcctgcgtggtgtgcgaggactgcaagaagaacgtgtgcaccaagtag

SEQ ID NO: 55578 - DNA, 546 bp, Artificial Sequence
  derived and/or modified sequence
atgaccgacaccgtgttcagcaacagcagcaacagatggatgtaccccagcgacagacccctgcagagcaacgacaaggagcagctgcaggccggctggagcgtgcaccccggcggccagcccgacagacagagaaagcaggaggagctgaccgacgaggagaaggagatcatcaacagagtgatcgccagagccgagaagatggaggagatggagcaggagagaatcggcagactggtggacagactggagaacatgagaaagaacgtggccggcgacggcgtgaacagatgcatcctgtgcggcgagcagctgggcatgctgggcagcgcctgcgtggtgtgcgaggactgcaagaagaacgtgtgcaccaagtgcggcgtggagaccaacaacagactgcacagcgtgtggctgtgcaagatctgcatcgagcagagagaggtgtggaagagaagcggcgcctggttcttcaagggcttccccaagcaggtgctgccccagcccatgcccatcaagaagaccaagccccagcagcccgtgtag

SEQ ID NO: 55579 - DNA, 363 bp, Artificial Sequence
  derived and/or modified sequence
atgaccgacaccgtgttcagcaacagcagcaacagatggatgtaccccagcgacagacccctgcagagcaacgacaaggagcagctgcaggccggctggagcgtgcaccccggcggccagcccgacagacagagaaagcaggaggagctgaccgacgaggagaaggagatcatcaacagagtgatcgccagagccgagaagatggaggagatggagcaggagagaatcggcagactggtggacagactggagaacatgagaaagaacgtggccggcgacggcgtgaacagatgcatcctgtgcggcgagcagctgggcatgctgggcagcgcctgcgtggtgtgcgaggactgcaagaagtag

SEQ ID NO: 55580 - DNA, 405 bp, Artificial Sequence
  derived and/or modified sequence
atgaccgacaccgtgttcagcaacagcagcaacagatggatgtaccccagcgacagacccctgcagagcaacgacaaggagcagctgcaggccggctggagcgtgcaccccggcggccagcccgacagacagagaaagcaggaggagctgaccgacgaggagaaggagatcatcaacagagtgatcgccagagccgagaagatggaggagatggagcaggagagaatcggcagactggtggacagactggagaacatgagaaagaacgtggccggcgacggcgtgaacagatgcatcctgtgcggcgagcagctgggcatgctgggcagcgcctgcgtggtgtgcgaggactgcaagaagaacgtgtgcaccaagtgcggcgtggagaccaacaacagactgtag

SEQ ID NO: 55581 - protein, 1030 aa, Artificial Sequence
  derived and/or modified sequence
MKMADAKQKRNEQLKRWIGSETDLEPPVVKRQKTKVKFDDGAVFLAACSSGDTDEVLKLLHRGADINYANVDGLTALHQACIDDNVDMVKFLVENGANINQPDNEGWIPLHAAASCGYLDIAEFLIGQGAHVGAVNSEGDTPLDIAEEEAMEELLQNEVNRQGVDIEAARKEEERIMLRDARQWLNSGHINDVRHAKSGGTALHVAAAKGYTEVLKLLIQAGYDVNIKDYDGWTPLHAAAHWGKEEACRILVDNLCDMEMVNKVGQTAFDVADEDILGYLEELQKKQNLLHSEKRDKKSPLIESTANMDNNQSQKTFKNKETLIIEPEKNASRIESLEQEKVDEEEEGKKDESSCSSEEDEEDDSESEAETDKTKPLASVTNANTSSTQAAPVAVTTPTVSSGQATPTSPIKKFPTTATKISPKEEERKDESPATWRLGLRKTGSYGALAEITASKEGQKEKDTAGVTRSASSPRLSSSLDNKEKEKDSKGTRLAYVAPTIPRRLASTSDIEEKENRDSSSLRTSSSYTRRKWEDDLKKNSSVNEGSTYHKSCSFGRRQDDLISSSVPSTTSTPTVTSAAGLQKSLLSSTSTTTKITTGSSSAGTQSSTSNRLWAEDSTEKEKDSVPTAVTIPVAPTVVNAAASTTTLTTTTAGTVSSTTEVRERRRSYLTPVRDEESESQRKARSRQARQSRRSTQGVTLTDLQEAEKTIGRSRSTRTREQENEEKEKEEKEKQDKEKQEEKKESETSREDEYKQKYSRTYDETYQRYRPVSTSSSTTPSSSLSTMSSSLYASSQLNRPNSLVGITSAYSRGITKENEREGEKREEEKEGEDKSQPKSIRERRRPREKRRSTGVSFWTQDSDENEQEQQSDTEEGSNKKETQTDSISRYETSSTSAGDRYDSLLGRSGSYSYLEERKPYSSRLEKDDSTDFKKLYEQILAENEKLKAQLHDTNMELTDLKLQLEKATQRQERFADRSLLEMEKRERRALERRISEMEEELKMLPDLKADNQRLKDENGALIRVISKLSK

SEQ ID NO: 55582 - protein, 1030 aa, Artificial Sequence
  derived and/or modified sequence
MKMADAKQKRNEQLKRWIGSETDLEPPVVKRQKTKVKFDDGAVFLAACSSGDTDEVLKLLHRGADINYANVDGLTALHQACIDDNVDMVKFLVENGANINQPDNEGWIPLHAAASCGYLDIAEFLIGQGAHVGAVNSEGDTPLDIAEEEAMEELLQNEVNRQGVDIEAARKEEERIMLRDARQWLNSGHINDVRHAKSGGTALHVAAAKGYTEVLKLLIQAGYDVNIKDYDGWTPLHAAAHWGKEEACRILVDNLCDMEMVNKVGQTAFDVADEDILGYLEELQKKQNLLHSEKRDKKSPLIESTANMDNNQSQKTFKNKETLIIEPEKNASRIESLEQEKVDEEEEGKKDESSCSSEEDEEDDSESEAETDKTKPLASVTNANTSSTQAAPVAVTTPTVSSGQATPTSPIKKFPTTATKISPKEEERKDESPATWRLGLRKTGSYGALAEITASKEGQKEKDTAGVTRSASSPRLSSSLDNKEKEKDSKGTRLAYVAPTIPRRLASTSDIEEKENRDSSSLRTSSSYTRRKWEDDLKKNSSVNEGSTYHKSCSFGRRQDDLISSSVPSTTSTPTVTSAAGLQKSLLSSTSTTTKITTGSSSAGTQSSTSNRLWAEDSTEKEKDSVPTAVTIPVAPTVVNAAASTTTLTTTTAGTVSSTTEVRERRRSYLTPVRDEESESQRKARSRQARQSRRSTQGVTLTDLQEAEKTIGRSRSTRTREQENEEKEKEEKEKQDKEKQEEKKESETSREDEYKQKYSRTYDETYQRYRPVSTSSSTTPSSSLSTMSSSLYASSQLNRPNSLVGITSAYSRGITKENEREGEKREEEKEGEDKSQPKSIRERRRPREKRRSTGVSFWTQDSDENEQEQQSDTEEGSNKKETQVNTITLYETSSTSAGDRYDSLLGRSGSYSYLEERKPYSSRLEKDDSTDFKKLYEQILAENEKLKAQLHDTNMELTDLKLQLEKATQRQERFADRSLLEMEKRERRALERRISEMEEELKMLPDLKADNQRLKDENGALIRVISKLSK

SEQ ID NO: 55583 - DNA, 3093 bp, Artificial Sequence
  derived and/or modified sequence
atgaaaatggccgacgcaaaacagaagcggaacgaacagctcaaaagatggattggctccgaaacagatctggaaccgccagtcgtcaagcgccagaaaactaaagtcaagttcgacgacggggcagtcttcctggcagcatgttcctcgggagataccgacgaagtgctcaagcttctgcatcgcggagcagatatcaactacgctaatgtcgatggactcactgcgctgcaccaggcctgcatcgacgacaatgtggacatggtaaagtttttggttgaaaacggcgcaaacattaatcaacccgacaacgaggggtggattccactgcatgccgcagcttcatgcgggtacctggatattgctgagttcctgatcgggcagggcgcccacgtcggggccgttaacagcgagggcgatacccctttagatatcgccgaagaagaggctatggaagagttactccagaacgaagtcaatcggcagggtgtcgacatcgaagctgctcgcaaagaagaagaaagaatcatgctcagagatgctagacagtggctgaactctggtcatatcaacgacgttcgccatgcgaagtccggcggtaccgccctgcacgtggctgctgccaaggggtacacggaggtgttgaaactgttgatccaggccggttatgacgtgaacatcaaggattacgatgggtggacccctcttcacgccgctgcccattggggcaaagaagaggcctgtcgaatcttggtggacaatctttgtgatatggaaatggtgaataaagtgggacagactgcctttgatgtcgctgatgaagacatcctgggttatctcgaagagctgcagaagaagcagaatctgctgcactcggaaaagcgggacaagaaaagccctcttatcgagtctaccgcaaatatggacaataaccagtcccagaagaccttcaaaaataaagaaacgctgatcattgaacctgagaagaacgcctctcgtatagagagcctggagcaggagaaagttgacgaggaagaggagggcaaaaaagacgagtctagttgctctagtgaagaagacgaggaggacgatagtgagagtgaggccgaaactgacaagactaagccattagcctctgttaccaatgcgaatacgagctcaacccaggccgcacccgtagcagtaaccactcccacggtgtcaagtggccaggctacacccacctcaccaatcaagaagttccccacaacagctactaaaattagtcccaaggaggaggagcgcaaagacgagtcgcccgcaacgtggcgactgggccttcgaaaaaccggatcatatggcgccctggccgagatcactgcctccaaggaaggtcagaaagagaaggacactgccggcgtcacaaggagtgccagttcccctagactgagcagctctctcgacaacaaagagaaagaaaaggacagtaaagggaccaggctggcatacgtggctcctactattcccaggcggctagcctccactagtgacattgaagagaaggaaaatcgggacagttctagtttacgtacatccagctcttatacccgtcgcaagtgggaagacgatctaaagaaaaatagtagtgtaaacgagggttctacctatcataagagctgttccttcggccgaagacaggacgatctgatctcctctagcgtgccttctacaaccagtactcccactgttactagcgccgcagggctgcagaaaagccttctgagctcaacctcgacgactaccaagatcacaacaggctcttcctccgctggcacccagagcagcacgtccaaccgactttgggcagaggacagcacagaaaaggagaaagattccgtcccgacggccgtgacaatccctgtcgcaccgactgttgtcaatgcggcagccagcaccacaaccctcacaactacaaccgctggaaccgtgtctagtacgactgaggtccgcgagcgacgtaggtcctacttgactccagtgcgggatgaggagagcgagtcacagcgcaaagctagatcccggcaggctcgacagagtagaagatccactcagggggtgacactgacagatcttcaagaggcagaaaagaccataggaaggagccggagcactcgcactcgtgagcaggagaacgaagaaaaagaaaaggaggagaaggaaaagcaggataaggagaaacaggaagagaagaaggaatccgagacttcgagggaggatgaatacaagcagaaatacagccgtacctacgacgaaacttaccagcgctatcgccccgtgtctacaagcagctcaaccacaccttcgagcagtctctctacgatgtcgagcagcctttatgcatcctctcagctcaataggcctaactcccttgtcggtattacatccgcgtactcccgcggaatcacgaaggaaaatgagcgtgaaggtgaaaagcgtgaggaagagaaggagggggaggataaatctcagcccaagtctatccgggaaaggcgtcgcccgcgtgaaaagcggcgtagcaccggggttagcttctggacccaggacagcgacgagaatgagcaggaacagcagtcggacacagaggaggggtcaaataagaaagaaacccagactgacagtatttctagatacgagacctcttccacaagtgccggggatcgctacgactcactattgggcagatcagggtcctactcttatctggaggaacgaaagccctattcctcccggttagaaaaggacgatagcactgacttcaaaaaattatatgagcagatcttagccgaaaacgagaagctcaaggcccagttgcatgacaccaacatggagctgacagatctcaagctacagcttgaaaaggccacccagagacaggagcggtttgctgacaggtccctactcgagatggaaaagcgagaaaggagagcactcgagagacggattagcgaaatggaagaggagcttaaaatgctgcccgatctaaaagcggataatcagcgccttaaggacgagaacggtgcactgatacgcgttatcagtaaactgtccaaatag

SEQ ID NO: 55584 - DNA, 3093 bp, Artificial Sequence
  derived and/or modified sequence
atgaaaatggccgacgcaaaacagaaacgaaacgagcagttgaagaggtggatcggctctgagactgacctggaacctccagttgtgaaaagacaaaagacgaaggtaaagtttgatgacggcgccgtctttctcgctgcttgcagctccggcgatactgacgaagttctaaagctgctccaccggggagccgatataaactacgccaacgtggatggtctgactgccttacaccaggcctgcattgacgacaatgtcgacatggtgaagtttcttgtagaaaatggggctaatattaaccagcccgataacgagggttggatccctttacacgctgccgcaagctgcgggtatttggacattgccgagttcctgataggtcagggtgctcacgttggggctgtcaactccgagggcgacacccctctggacatcgcagaagaggaggccatggaagagctgctgcaaaatgaggtgaacaggcagggggtagacatcgaagccgcacggaaggaagaggagaggattatgttacgtgacgctcgtcagtggctgaattctgggcatatcaacgatgtgaggcacgccaaatcaggcggcactgctctgcatgtggccgcggctaagggatataccgaggtcttaaaactgctcattcaagccggatacgatgtgaatatcaaggattatgacgggtggacgccccttcacgctgccgcacactggggcaaggaggaggcatgtagaatcctggtggacaatttatgcgacatggaaatggtcaataaggtcggacagactgcttttgatgtggccgatgaagatattctcggataccttgaagagctgcagaagaagcagaatttactgcattctgaaaagagagacaagaagagtcccctgatagagagtaccgctaacatggataataaccagtcccagaagactttcaaaaataaagaaaccctgatcatagaaccggagaagaacgcctcaagaattgagagcctggaacaggagaaagtggacgaagaagaggaaggcaaaaaagatgagtcaagttgcagctcagaagaagacgaggaagacgactctgagagcgaggccgaaacagataagacgaagcctctggccagcgtaacgaacgccaacacgagtagtacgcaagctgctccagtggcagtgaccacccccactgtaagttccgggcaagccacccctaccagtccaatcaaaaaattcccaacaacagctaccaagatcagcccaaaagaagaagagcggaaagatgagtcacccgccacttggagactgggcctcaggaaaacaggctcctatggggccctcgctgagatcactgccagtaaagagggccaaaaggagaaggatacagcaggcgtgactcgctccgcatcttcgcctagactaagttcaagccttgacaataaagaaaaagaaaaagactccaaagggacaagactggcctacgtggcacccaccatcccaaggaggttagcgtctacctccgacatagaggaaaaggaaaatcgggactccagctcgttacgaacctctagcagttatacccggaggaagtgggaagatgacctgaaaaaaaactcttccgtgaatgaaggcagcacttaccacaagtcctgtagctttggccgaaggcaggacgacctcatctcatcatcggtcccttccacgaccagtactcccaccgtcacttcagccgccggcttacagaaaagcctgctatccagcacaagcactaccacgaagatcacaacgggttcttccagcgccggcacgcagagctctactagcaaccgactgtgggctgaagacagtactgagaaggaaaaagactctgtcccaaccgccgtgactattcctgtcgcccccaccgttgtcaatgctgctgcctctaccacgaccctgaccaccaccacagccggtacagtgtcttccaccaccgaggtccgggagcgcagaagatcttacctgacccctgtgagagatgaagagagtgagtcgcagaggaaggccaggtctagacaggcacgtcagtcacggaggagcactcagggtgtaactttaaccgacctacaggaggcagagaaaactatcggccgatcccgtagtacccgcacgcgggaacaggagaatgaggagaaagagaaggaggagaaggagaaacaagataaggaaaagcaggaggaaaagaaggaaagtgaaacaagccgggaagacgagtataagcagaaatattctagaacttatgacgaaacctaccaacgttacagacctgtgtccacatcgtcttcaaccactccatcatcgtcattaagcacgatgagttcttccctctacgcctctagtcagcttaaccgtcctaatagtctggttgggattacatctgcatactctagggggatcacaaaagaaaacgaaagagagggggagaaaagagaggaagagaaggaaggtgaggacaagtcccaaccgaaatcgatcagggagcgtagacggccccgagagaaacgccgatctaccggcgtatccttctggacgcaagactctgatgaaaacgaacaagagcaacagtcagatacagaagagggatctaacaagaaagagacccaaacagactctatttcaagatatgaaacgtcatcgaccagtgcgggggatagatacgattcactgctggggcggtccgggtcctactcctacctcgaggaaaggaagccctactcttccagactagagaaagacgatagcaccgatttcaagaaattgtacgagcaaatcctggctgagaacgagaaattaaaggcccaacttcatgatacgaatatggagctcacggaccttaaattacagctggagaaggcaacccagaggcaagaacgattcgcggatcggagcttgctggagatggaaaagcgtgaacgaagagcactggagcgccggattagcgagatggaagaagagctaaagatgctgccagatctcaaagcggataaccagcgcttgaaggatgagaatggcgcattaatacgggtgattagtaaactgtcaaagtag

SEQ ID NO: 55585 - DNA, 3093 bp, Artificial Sequence
  derived and/or modified sequence
atgaaaatggccgacgccaagcagaaaaggaatgagcaattgaagaggtggataggatcagagacagacctggagccccccgtggtgaagcgtcagaagaccaaagtgaagtttgatgatggcgctgtgtttcttgctgcctgctcaagtggcgacacggatgaagtgttgaaattactccatcgcggcgccgatatcaactatgcaaacgtcgacggtcttacggccctgcatcaggcctgtattgacgataatgtcgacatggtcaagttcctggtggagaacggggctaacattaaccagcctgacaatgagggctggattccactacacgctgccgctagctgtgggtacctggatatcgccgaattcctcatagggcagggcgcccatgtcggggccgttaacagtgagggggacaccccacttgacattgccgaggaggaggccatggaggaattgcttcaaaatgaggttaatagacagggcgtggatattgaggctgccaggaaggaggaagaaaggatcatgttgcgggatgcaaggcaatggctaaattctggccacattaacgacgtccgccatgccaagagtggaggcacagccctgcatgttgctgcagctaaaggatatactgaggtcttgaaacttctgattcaggctggatatgatgtaaacattaaagactacgatgggtggacccctctccacgcggcagcccattgggggaaggaggaggcgtgtcgcatcctggtagataacctttgcgacatggagatggttaataaggtagggcagactgcatttgacgtggctgatgaggatatattgggctaccttgaagagctgcagaagaaacaaaatctgctgcatagtgagaagcgcgataagaagagtccactgatcgagagtaccgccaacatggataacaaccagtcccagaaaactttcaaaaacaaggaaacactgatcattgagcccgaaaaaaacgcttctaggattgagagccttgagcaagagaaggtcgacgaagaggaagaaggaaaaaaggacgagagtagctgctcatcggaggaggatgaggaagatgactccgagagtgaggcagaaacggacaaaactaaacctctcgcctcagtgactaacgccaatacctcctcaactcaagccgcccctgttgccgtaaccacgcccaccgtgtctagtggacaggcaacccctacttcacctatcaagaagttcccgactacagcaactaagatctcacctaaagaggaggaacgcaaagatgagtcacctgccacttggcgcttaggcctgcgcaaaaccgggagttatggagctctcgcagagatcacagcttctaaagagggacagaaagagaaagatacggcgggggtcacaagatcggcctctagtccgagactcagctcaagtctggacaacaaggagaaggagaaagattctaaaggaacacgtttagcctatgtggcaccaactatacccagacggctggcttcaacgtccgacatcgaggaaaaggaaaaccgggacagttcttctctgagaacctcaagctcttacacaaggagaaagtgggaggacgaccttaaaaagaattcgagtgtcaatgagggatcaacttaccacaagagctgcagctttgggaggaggcaggatgatttgatatcttcaagtgtgccgtccactaccagcactcctaccgttacctcagcggctggcctgcaaaagtcactgctcagctctacgtctacgaccaccaagatcacaacagggagctcctcagccgggacgcaatccagtacctcaaaccggctgtgggccgaggacagcacagaaaaggaaaaagacagcgtgcccacagctgtgaccatccccgtcgctcctactgtggtgaacgccgctgcatctacaacgacgctgacgaccaccacggcaggcaccgtctccagtactaccgaggttcgcgagcgaaggaggagttacttaactcccgtgcgcgacgaggaatcagaatcacagcgtaaagcaaggtctcgtcaggcccgacagtctcgtcgctccacacaaggggtaacccttactgatcttcaagaggcagaaaaaacgattggtaggagtcgctctacaaggacacgggagcaagaaaacgaagagaaggaaaaggaagagaaagagaagcaggataaggagaaacaggaagagaagaaggagagcgaaacatcccgcgaagacgagtacaaacaaaagtattctcgaacctacgatgaaacctaccagaggtatcgaccagtttctacctctagctctaccacgccctccagctccctgtcaactatgtcctccagcctatacgcttcctcccagttaaatcgacccaacagcctagttggaattacgtccgcatattccagaggcatcactaaagaaaacgagcgagagggggagaaaagggaggaggaaaaagaaggagaggacaagagccagcccaagagtattagagaacgacgcaggcctcgagaaaaaaggcggagcaccggcgtgagcttctggactcaggattcagacgagaacgagcaggagcaacagtcggacaccgaggaaggctctaacaaaaaggaaacccaggtgaatacaattactctctatgagacgagcagcacatctgcaggtgataggtacgattccctgctgggacgaagtggatcttatagctacctggaagaaagaaagccatactcctcacgcctggagaaggacgattccaccgatttcaaaaaattgtacgaacaaattcttgctgagaacgaaaagctgaaggcacagttgcatgatacaaatatggaactgactgatctgaaacttcagctggaaaaggccactcaacggcaggaacgttttgccgatcggagcttactggaaatggagaagcgggagaggagggcattagagcggcggatcagcgagatggaggaggaacttaaaatgctaccagacttaaaagctgataatcagcggctgaaggacgaaaacggggcattaatcagagtgatttctaagctctccaagtag

SEQ ID NO: 55586 - DNA, 3093 bp, Artificial Sequence
  derived and/or modified sequence
atgaagatggctgatgccaagcagaagagaaatgagcagctgaagcgctggattggcagcgagacagacctggagccccctgtggtgaagaggcagaagaccaaggtgaagtttgatgatggagctgtgttcctggccgcctgcagcagcggggacacagatgaggtgctgaagctgctgcacagaggagctgacatcaactatgccaacgtggatggcctgacagccctgcaccaggcctgcattgatgacaacgtggacatggtgaagttcctggtggagaatggagccaacatcaaccagcctgacaatgaaggctggatccccctgcacgccgccgccagctgtggctacctggacattgctgagttcctgattggccagggcgcccacgtgggcgctgtgaacagcgagggggacacccccctggacattgctgaggaggaggccatggaggagctgctgcagaatgaggtgaaccggcagggcgtggacatcgaggccgccaggaaggaggaggagcgcatcatgctgagagatgcccggcagtggctgaacagcggccacatcaatgatgtgagacatgccaagagcggcggcacagccctgcacgtggccgccgccaagggctacacagaggtgctgaagctgctgatccaggccggctatgatgtgaacatcaaggactatgatggctggacccccctgcacgccgccgcccactggggcaaggaggaggcctgccgcatcctggtggacaacctgtgtgacatggagatggtgaacaaggtgggccagacagcctttgatgtggctgatgaggacatcctgggctacctggaggagctgcagaagaagcagaacctgctgcacagcgagaagagggacaagaagagccccctcatcgagagcacagccaacatggacaacaaccagagccagaagaccttcaagaacaaggagaccctcatcatcgagcctgagaagaatgccagccgcatcgagagcctggagcaggagaaggtggatgaggaggaggagggcaagaaggatgagagcagctgcagcagtgaagaagatgaggaggatgattctgagagcgaggccgagacagacaagaccaagcccctggcctctgtgaccaatgccaacaccagcagcacccaggccgcccctgtggccgtgaccacccccaccgtgagcagcggccaggccacccccaccagccccatcaagaagttccccaccacagccaccaagatcagccccaaggaggaggagaggaaggatgagagccctgccacctggaggctgggcctgaggaagacaggcagctatggagccctggccgagatcacagccagcaaggagggccagaaggagaaggacacagctggggtgaccaggtctgccagcagcccccggctgagcagcagcctggacaacaaggagaaggagaaggacagcaagggcacccggctggcctacgtggcccccaccatcccccggcggctggccagcaccagtgacatcgaggagaaggaaaatagagacagcagcagcctgcggaccagcagcagctacaccaggaggaagtgggaggatgacctgaagaagaacagctctgtgaatgaaggcagcacctaccacaagagctgcagctttggaagacggcaggatgacctgatcagcagctctgtgcccagcaccaccagcacccccaccgtgaccagcgctgctggcctgcagaagagcctgctgagcagcaccagcaccaccaccaagatcaccaccggcagcagcagcgctggcacccagagcagcaccagcaaccggctgtgggccgaggacagcacagagaaggagaaggacagcgtgcccacagctgtgaccatccctgtggcccccaccgtggtgaatgctgctgccagcaccaccaccctgaccaccaccacagctggcaccgtgagcagcaccacagaggtgcgggagcggcggcgcagctacctgacccctgtgagagatgaggagagcgagagccagaggaaggcccggagccggcaggcccggcagagcagaagaagcacccagggcgtgaccctgacagacctgcaggaggccgagaagaccatcggccgcagccgcagcaccaggacccgggagcaggagaatgaggagaaggagaaggaggagaaggagaagcaggacaaggagaagcaggaggagaagaaggagagcgagaccagcagagaagatgagtacaagcagaagtacagcaggacctatgatgagacctaccagcgctacagacctgtgtccaccagcagcagcaccacccccagcagcagcctgagcaccatgagcagcagcctgtatgccagcagccagctgaaccggcccaacagcctggtgggcatcaccagcgcctacagccggggcatcaccaaggaaaatgaaagagaaggagagaagcgggaggaggagaaggagggggaggacaagagccagcccaagagcatccgggagcggcggcggccccgggagaagaggaggagcactggagtgtccttctggacccaggacagtgatgaaaatgagcaggagcagcagagcgacacagaggagggcagcaacaagaaggagacccagacagacagcatcagccgctatgagaccagcagcaccagcgctggggacagatatgacagcctgctgggccgcagcggcagctacagctacctggaggagaggaagccctacagcagccggctggagaaggatgacagcacagacttcaagaagctgtatgagcagatcctggccgagaatgagaagctgaaggcccagctgcatgacaccaacatggagctgacagacctgaagctgcagctggagaaggccacccagaggcaggagagatttgctgacaggagcctgctggagatggagaagcgggagcggcgggccctggagcggcgcatcagcgagatggaggaggagctgaagatgctgcctgacctgaaggctgacaaccagaggctgaaggatgaaaatggagccctgatccgggtcatcagcaagctgagcaagtag

SEQ ID NO: 55587 - DNA, 3093 bp, Artificial Sequence
  derived and/or modified sequence
atgaagatggctgatgccaagcagaagagaaatgagcagctgaagcgctggattggcagcgagacagacctggagccccctgtggtgaagaggcagaagaccaaggtgaagtttgatgatggagctgtgttcctggccgcctgcagcagcggggacacagatgaggtgctgaagctgctgcacagaggagctgacatcaactatgccaacgtggatggcctgacagccctgcaccaggcctgcattgatgacaacgtggacatggtgaagttcctggtggagaatggagccaacatcaaccagcctgacaatgaaggctggatccccctgcacgccgccgccagctgtggctacctggacattgctgagttcctgattggccagggcgcccacgtgggcgctgtgaacagcgagggggacacccccctggacattgctgaggaggaggccatggaggagctgctgcagaatgaggtgaaccggcagggcgtggacatcgaggccgccaggaaggaggaggagcgcatcatgctgagagatgcccggcagtggctgaacagcggccacatcaatgatgtgagacatgccaagagcggcggcacagccctgcacgtggccgccgccaagggctacacagaggtgctgaagctgctgatccaggccggctatgatgtgaacatcaaggactatgatggctggacccccctgcacgccgccgcccactggggcaaggaggaggcctgccgcatcctggtggacaacctgtgtgacatggagatggtgaacaaggtgggccagacagcctttgatgtggctgatgaggacatcctgggctacctggaggagctgcagaagaagcagaacctgctgcacagcgagaagagggacaagaagagccccctcatcgagagcacagccaacatggacaacaaccagagccagaagaccttcaagaacaaggagaccctcatcatcgagcctgagaagaatgccagccgcatcgagagcctggagcaggagaaggtggatgaggaggaggagggcaagaaggatgagagcagctgcagcagtgaagaagatgaggaggatgattctgagagcgaggccgagacagacaagaccaagcccctggcctctgtgaccaatgccaacaccagcagcacccaggccgcccctgtggccgtgaccacccccaccgtgagcagcggccaggccacccccaccagccccatcaagaagttccccaccacagccaccaagatcagccccaaggaggaggagaggaaggatgagagccctgccacctggaggctgggcctgaggaagacaggcagctatggagccctggccgagatcacagccagcaaggagggccagaaggagaaggacacagctggggtgaccaggtctgccagcagcccccggctgagcagcagcctggacaacaaggagaaggagaaggacagcaagggcacccggctggcctacgtggcccccaccatcccccggcggctggccagcaccagtgacatcgaggagaaggaaaatagagacagcagcagcctgcggaccagcagcagctacaccaggaggaagtgggaggatgacctgaagaagaacagctctgtgaatgaaggcagcacctaccacaagagctgcagctttggaagacggcaggatgacctgatcagcagctctgtgcccagcaccaccagcacccccaccgtgaccagcgctgctggcctgcagaagagcctgctgagcagcaccagcaccaccaccaagatcaccaccggcagcagcagcgctggcacccagagcagcaccagcaaccggctgtgggccgaggacagcacagagaaggagaaggacagcgtgcccacagctgtgaccatccctgtggcccccaccgtggtgaatgctgctgccagcaccaccaccctgaccaccaccacagctggcaccgtgagcagcaccacagaggtgcgggagcggcggcgcagctacctgacccctgtgagagatgaggagagcgagagccagaggaaggcccggagccggcaggcccggcagagcagaagaagcacccagggcgtgaccctgacagacctgcaggaggccgagaagaccatcggccgcagccgcagcaccaggacccgggagcaggagaatgaggagaaggagaaggaggagaaggagaagcaggacaaggagaagcaggaggagaagaaggagagcgagaccagcagagaagatgagtacaagcagaagtacagcaggacctatgatgagacctaccagcgctacagacctgtgtccaccagcagcagcaccacccccagcagcagcctgagcaccatgagcagcagcctgtatgccagcagccagctgaaccggcccaacagcctggtgggcatcaccagcgcctacagccggggcatcaccaaggaaaatgaaagagaaggagagaagcgggaggaggagaaggagggggaggacaagagccagcccaagagcatccgggagcggcggcggccccgggagaagaggaggagcactggagtgtccttctggacccaggacagtgatgaaaatgagcaggagcagcagagcgacacagaggagggcagcaacaagaaggagacccaggtgaacaccatcaccctgtatgagaccagcagcaccagcgctggggacagatatgacagcctgctgggccgcagcggcagctacagctacctggaggagaggaagccctacagcagccggctggagaaggatgacagcacagacttcaagaagctgtatgagcagatcctggccgagaatgagaagctgaaggcccagctgcatgacaccaacatggagctgacagacctgaagctgcagctggagaaggccacccagaggcaggagagatttgctgacaggagcctgctggagatggagaagcgggagcggcgggccctggagcggcgcatcagcgagatggaggaggagctgaagatgctgcctgacctgaaggctgacaaccagaggctgaaggatgaaaatggagccctgatccgggtcatcagcaagctgagcaagtag

SEQ ID NO: 55588 - DNA, 3093 bp, Artificial Sequence
  derived and/or modified sequence
atgaagatggccgacgccaagcagaagcggaacgagcagctgaagagatggataggcagcgagacagacctggagcccccagtcgtcaagaggcagaagaccaaggtgaaattcgatgatggggctgtgtttctggctgcatgtagctccggagacacagatgaggtcctcaagctgcttcacagaggggccgatattaattatgcgaatgtggacgggttgacagcacttcatcaggcatgcatcgatgacaatgtggatatggtgaagttcctagtagaaaacggagctaatatcaatcagcccgataacgagggctggattcctctgcatgccgccgcctcctgtgggtatctggacattgctgagtttctgattggccagggggcccacgttggcgccgtgaactccgaaggagacacgccgctcgacattgccgaagaagaagccatggaggaactcctgcagaacgaggttaataggcagggagtagatatcgaagcagccagaaaggaagaagagagaatcatgctacgcgacgctaggcagtggctgaactccgggcatataaatgacgtgagacacgccaagtcaggtgggactgctttgcacgtggctgccgccaaagggtacacagaagtgttgaagcttctgatacaggcggggtatgacgtcaacatcaaagattatgatggttggacacctctgcacgcggccgcacactgggggaaggaggaagcatgtcgcatactggtcgacaacctctgcgatatggaaatggttaacaaggtaggtcaaactgccttcgatgtggccgacgaagacatcttgggctatctggaggaattgcaaaagaagcaaaacctgctccatagtgaaaaacgcgacaaaaagagccctctaatagaatctaccgctaacatggacaataaccagtcacaaaagacctttaaaaacaaggagactttaattatcgaaccggagaagaacgcttctcggatcgaaagcctggaacaggagaaagttgacgaagaggaggagggaaaaaaggacgagtcctcttgtagtagtgaagaagacgaggaggacgacagtgagtccgaggcagaaactgataagaccaaaccccttgcaagtgtgaccaatgctaacacaagcagcactcaggccgcccctgtagctgtgacaacccccactgttagctcggggcaggctacgcctaccagccccattaaaaaattccccactacagccactaaaataagccccaaagaggaagaacgtaaggacgaatctcctgcgacttggcggctaggccttaggaaaacaggaagctatggagccctcgcggagattacggcgtccaaagagggccagaaggaaaaagacacagctggcgtcactcggtctgcttcctctcctagactttcttcaagcctggataacaaggagaaggagaaagatagcaagggcactaggctcgcctacgtcgcaccaaccattcccagacgactagcctccacctccgacattgaggagaaggaaaaccgggattcatcatcactgcggacctctagctcatatacaaggcggaagtgggaagacgacctcaaaaaaaactcctcagtgaatgagggcagcacataccataagagttgctcctttgggagacggcaggatgacctgatatcctcttctgtcccttctactacctctacacccaccgtaacatcagccgcaggtctgcagaaaagccttctcagtagcacctcaaccactacaaaaatcactacagggtccagttctgctggaacgcaatcgtctacttcaaacagactttgggccgaagactctaccgaaaaagagaaggattctgtgccgactgctgttaccatccccgtggcaccgaccgttgtgaacgcagccgcctccaccaccacgctgactacaacaacagctggcaccgtatcaagtaccacagaggttagagaaaggagacgctcctaccttacccccgttcgtgatgaagaatccgagagccaacgtaaagcccgctccagacaggccagacagtctcgccgatcaacacagggcgtcaccttaacagatcttcaggaggcggaaaagaccattggcaggagccggtccactcgtacgcgcgaacaagagaatgaagagaaagaaaaggaggaaaaagagaaacaggacaaggagaaacaggaagagaaaaaggagtccgaaacttcccgcgaagatgagtacaagcagaagtatagtcggacttatgacgagacgtaccagaggtatcggcccgtgagtacgtcttcatctactaccccctctagctccttaagcaccatgagctctagtttatacgcatccagtcagctgaaccgcccaaactctttagtgggcattaccagcgcctatagcagaggaatcactaaggagaatgaaagagagggcgagaaacgggaagaggagaaagagggcgaagataaatcgcaaccaaagtccattagagagcgccgcagaccgcgagaaaaacggaggtccaccggggtgagtttttggacccaggattctgacgaaaatgagcaggaacagcagtcagatacagaggaagggtcaaataagaaggagacccaaacagactctattagccgatacgaaacatccagcaccagcgccggcgataggtatgacagtctccttgggcggtccggaagctacagttacctagaggaaaggaagccatactcttcccgcctggaaaaagatgactctacggactttaagaagctgtacgagcaaatcctagcagagaacgaaaaactgaaagcccagctccacgacactaacatggaactgaccgacttgaagttgcagcttgagaaggcgacccagcgccaggagcggtttgccgatagaagcctgctggaaatggaaaagcgtgagcgtcgagcactagagaggcggatatccgaaatggaagaggagctgaaaatgttgcccgacctgaaagcggataaccagcgccttaaggacgaaaacggggctctcatccgcgtgatctctaaactgagcaagtag

SEQ ID NO: 55589 - DNA, 3093 bp, Artificial Sequence
  derived and/or modified sequence
atgaagatggccgacgccaagcagaagcggaacgagcagctgaagaggtggataggatccgagacagacctggagccccccgttgtaaagcgtcagaagactaaggtaaaattcgacgatggtgctgtgttcctagccgcctgctcaagcggtgataccgacgaagtgttgaagctgttgcacaggggtgcggatataaactacgcaaatgtggatggcttgactgctctccatcaggcttgtattgatgataacgttgatatggtaaagttccttgtggagaacggcgctaatatcaatcagccagataacgaagggtggatcccattgcatgcagcggccagctgcggctacctggacatcgcggagttcctgatcggacagggggcccatgtcggtgctgttaattccgaaggggacaccccactcgacattgccgaagaggaagcaatggaggagctcctccagaatgaggttaaccgccagggagtggacattgaggccgcacgtaaggaggaggaacgaatcatgctgcgcgacgctcggcagtggctgaactctggacacatcaacgatgtgcgccacgccaagtccggtggcactgccttacatgttgctgctgcgaagggctacaccgaggtgcttaagttgcttatccaggcgggctatgacgtgaacataaaggactatgatggctggacccccctgcacgccgccgcacactgggggaaagaagaggcgtgcaggatcctcgtcgacaacctctgtgatatggagatggtgaacaaagtggggcagactgcattcgatgtggctgatgaggacatactcgggtatcttgaggaactgcagaagaaacagaatttgttacacagcgaaaaaagggataagaagtcacctctcatcgaaagcactgcgaatatggacaacaaccagagccagaaaacatttaagaacaaggagacgctgatcatagaaccggaaaagaacgcatcacgtattgagtcactagaacaggagaaagtggatgaagaagaggagggcaagaaggacgaaagcagctgctcatccgaagaggatgaggaagacgatagtgagtctgaggccgaaaccgataagaccaagcctctggcctccgtgactaacgcaaacacatcgtctactcaggctgcaccagtcgccgtgactactccaactgttagtagtggccaggcgacacctacatcccctatcaaaaagttccccaccacagcaaccaagatctcacctaaagaggaagaacgcaaggacgaaagcccagctacctggcgtctcggcctgcgcaaaacaggatcttacggagccttggcagagatcactgctagcaaagagggccagaaagaaaaggataccgctggcgtgacacggtcagcatcatccccccggctctcgtctagtctggataataaggaaaaggaaaaggacagcaaagggacccggctagcatacgttgcccccacgattcctaggaggctcgcctcaacctctgacattgaggagaaggagaacagagattcttcgagcctcaggacttccagcagctacactagacggaagtgggaagacgacttgaagaaaaacagcagcgtcaacgaaggttccacgtatcataagagctgttcctttggacggcggcaagatgacctaatcagcagctccgtgccaagcactacatctactcccactgtcacgtccgcggcgggtctgcagaagtcactcttatcatctacctcaactaccacaaaaattaccaccggcagttcatcggcaggaactcagtcctcaacgtccaatcgcctctgggcagaggattccacagagaaagagaaggatagcgtcccaacagcggtgacaataccggttgcccctacagtggtcaacgccgccgccagtactaccacactaactactaccactgcgggaaccgtttcaagtacgactgaggtcagggaaaggcggcgcagttatctaacgcctgttagagacgaagaaagtgaaagtcagcgcaaagctcgatctcgccaggctcggcaatcaaggcgcagtactcagggcgtgacccttacagacctacaagaggctgagaagaccattgggagatcccgctccactcggactagggagcaggaaaatgaagagaaggaaaaggaggaaaaggaaaagcaggacaaggagaaacaagaagagaaaaaggagagcgaaacctcccgagaggacgagtataagcaaaagtattcaagaacctacgacgagacctaccagagatataggcccgtgtccacatccagttcgacaactccatcaagttccctgagcaccatgagttcgagcctatacgccagctcccagctcaataggcctaactctctggtggggataaccagcgcatatagccggggtataacgaaggagaacgagcgggagggagagaaaagagaggaggagaaagaaggagaagataagtctcaacccaagtccatccgcgaacgaagacggccccgcgagaagcgaagaagcacaggtgtttcattctggacacaggactccgatgaaaacgagcaggagcaacagtctgataccgaggagggttcaaataaaaaagaaactcagacagattctatttcaagatacgaaacatctagtacatctgctggagatcggtatgattctctgctgggtagatccggctcgtactcctacctcgaagaacgcaagccctacagttcacggttggagaaagatgactcaaccgacttcaagaaactgtatgagcagatcctcgcagaaaacgaaaaactgaaggctcagctgcacgacactaacatggagctcacagaccttaagctgcagctagaaaaggcaacccagcggcaggaacgcttcgcagaccggagccttctagagatggagaaaagagagcgtcgggctctggaacggcggatcagtgagatggaagaggagttaaagatgctgccagacctgaaagccgacaaccagagactgaaggatgaaaatggcgccctgatccgtgtcatctctaaattgtcaaagtag

SEQ ID NO: 55590 - DNA, 3093 bp, Artificial Sequence
  derived and/or modified sequence
atgaagatggccgacgccaagcagaagcggaacgagcagctgaagcggtggataggcagtgagacagatctggagcctcccgtggttaaacggcagaagaccaaggtgaaattcgatgacggtgccgtatttttggcagcatgctcatctggcgacacagacgaggttctcaaactccttcatcggggggcagacatcaattatgcgaatgtcgatggactgacagccctgcatcaagcttgtatcgacgacaatgtcgacatggtcaagtttctggttgagaatggtgccaacatcaatcagcctgataatgaaggctggattcctcttcacgcagccgcctcatgcgggtacttggatatcgcagagtttctgatcggccagggagcccatgtcggagccgtcaacagcgagggcgacactcccctcgatattgccgaggaggaggctatggaggagctgctccaaaatgaggtaaaccggcagggagtcgatattgaggcggcaaggaaggaagaggaaaggatcatgctgcgtgacgcgagacaatggctgaactcaggacatattaacgatgtccgccatgcaaaatcaggaggtactgcgttacatgtcgcggcagctaagggctacaccgaggtcttgaaacttctgatacaggcaggttacgatgtgaacatcaaagactacgacggctggactccgctgcatgccgctgcacactgggggaaggaggaagcttgtcgcatcctcgtggataacttatgcgatatggaaatggtgaacaaggtcggccagaccgcctttgacgtggcggacgaggacatcctcggataccttgaggagctgcaaaaaaaacagaacttgctccattctgagaagcgggataaaaaaagtcctttaatcgagtccaccgctaacatggataacaatcaatcacaaaagacattcaagaataaagagacccttattattgaacccgaaaagaacgcctctcggattgaaagtttagagcaggagaaagtggacgaggaagaggaaggcaaaaaggatgagtcttcatgttcgagtgaggaggacgaagaagatgattcggagagcgaagctgaaaccgacaaaaccaaaccattggctagcgtgacaaatgcaaacactagcagtacccaagctgcccctgtggcagtgactaccccgaccgtgtcctccggccaggccaccccaacgtctccaattaagaagttccctactacagcaacaaagatctcaccaaaagaggaggagcgaaaagatgagtcccccgcaacctggcgcttagggctgcgaaaaaccgggagttatggcgccttagcggagatcaccgcttctaaggagggccaaaaagagaaggatacagccggcgtcaccagaagtgcttccagcccccggctttcctccagtttggataacaaggaaaaggagaaagactctaaaggaactagactcgcgtacgtggctccaactatcccgagacgcctcgcatccacgagtgacatcgaggaaaaggaaaatcgcgacagctcctccctgcgcacctcatcgagttacacaaggaggaagtgggaggatgacttgaaaaaaaatagctcagtcaacgagggaagcacctaccataaaagctgctcctttgggcgtaggcaggacgacttgatttcctctagcgtcccgagcactacgtcgacccccaccgtcacttccgcggctggtctgcagaaaagcctgctgagttccacttctaccaccaccaaaatcacgacgggctcaagttccgctgggacacagagtagcactagcaataggctgtgggcagaagatagcacagaaaaggagaaggattctgttcctacagccgtcaccattcccgtggcccccaccgtggtcaatgccgctgcctctacaactacgttgacaactacaacggccggcaccgttagctctacgaccgaggtgagggagagaaggcggagttatcttacccccgttagagatgaggagagtgaaagccagagaaaggctaggtcgcggcaagctagacagagcagacgctccacacagggggtgactttaaccgacttacaggaggccgagaagacaattggccgctcacgaagcacgagaacacgagagcaggaaaatgaagaaaaagagaaggaagaaaaagagaagcaagataaagagaagcaggaggagaaaaaagagagcgagaccagccgcgaagatgagtacaaacagaagtatagtagaacctacgacgagacctatcagagatatagacctgtctccacaagttcttctacaacaccttcgtcaagtctgtccacgatgagctcgagtctatatgccagttcgcagttaaaccgccctaattcactcgtgggaattacttccgcctactccagagggatcaccaaagagaatgagcgagagggagagaagcgggaggaggaaaaggagggagaagataagtcccagccgaagtccatccgggagaggcggcgacctcgcgaaaagcggaggagtacaggcgtgtctttctggacccaggattctgatgaaaatgaacaggaacagcagtccgatacagaagagggctctaacaagaaagagactcaagttaataccattaccctttacgaaacctcctctacttcggcaggtgatcgctatgattctctcctaggtagatcagggtcttactcctatctggaggaaagaaagccttactccagccggctggagaaagacgattcaaccgatttcaagaaactgtacgagcaaatactggctgaaaacgagaagcttaaagcccagctccacgacaccaacatggagctcacggatttaaagctgcagctggagaaagccactcagcgccaggagaggtttgcagatcggtcactgctggaaatggaaaagagagaaaggcgggctctggaacgccgcatttccgagatggaggaggagctgaagatgttacctgatctcaaagccgataaccagcgactcaaggatgagaatggagcgctgatccgggtcatcagcaagctgtccaagtag

SEQ ID NO: 55591 - DNA, 3093 bp, Artificial Sequence
  derived and/or modified sequence
atgaaaatggccgacgcaaaacagaaacgcaacgagcagctgaagcgctggatagggtcagaaaccgacctcgagccgccagtagttaaacggcagaaaaccaaggttaaattcgacgatggcgcagtgttcttggccgcttgtagcagcggggacactgacgaggtgctcaagcttttacataggggagccgacataaactacgcaaacgtcgacggcctaacagcattgcaccaggcctgtatcgacgataatgtcgatatggtaaaattccttgtggaaaacggcgcaaacattaaccaacccgacaatgaggggtggatcccgcttcatgccgctgcatcatgcggctatctggatatcgccgaattccttattggccagggagcacacgtcggggcagttaacagcgaaggtgatacccctctcgacattgccgaagaggaggccatggaagagctattgcagaatgaggtgaaccgccagggagtggacattgaagccgctaggaaggaagaggagagaattatgctacgggatgctcggcagtggttgaacagcggtcatattaacgacgtgagacatgctaagagtgggggtacggctctgcacgtcgctgctgcaaaggggtacactgaagtcctcaagcttctcatccaggccggttacgatgtgaacatcaaggactacgacggttggactccgctacacgcagccgcacattggggtaaggaggaggcatgtcgcattctagtggataacctttgcgatatggagatggtgaacaaggttggacagactgctttcgacgtcgctgacgaggatattctgggctatttggaagagctacagaaaaaacagaatctcctgcactctgagaagcgggacaagaagagccccctcatcgagagtaccgccaatatggataacaaccagtcccagaagacattcaaaaataaggaaacccttattatcgagccagagaaaaatgcctctcggatcgaatctctggagcaggaaaaggtggatgaggaagaggaggggaagaaggatgagtcctcgtgcagctcagaagaagacgaggaagacgactccgagtctgaggctgagactgacaaaacgaaacctctggcctccgtaactaacgcgaatacgagctcgactcaggctgcccctgtggctgtaacgaccccaacggtcagtagcggacaggctactcctaccagtccaattaaaaaattcccaacaacagcgaccaaaataagcccgaaggaagaagaacggaaggacgaatccccggctacttggaggctggggttgagaaagactggctcctacggggcactggccgaaattacggcatccaaggaggggcaaaaagaaaaggatacagcaggcgtcaccagatccgcatcgtcgccccgtctaagttcctctctcgacaacaaggagaaggagaaggactcaaagggcactcgcttagcatatgttgcccctaccatcccgaggagattagcgtccacttcagacattgaggagaaggaaaacagggattcaagctccctgcgaacaagctcctcatatacccggagaaaatgggaagacgatttgaagaagaattcttccgtcaatgaaggaagcacgtaccacaaaagctgtagcttcggcaggcggcaggacgacctgatttcttcatcggtgccctcaacgacctctacacccactgtgacaagcgcggcaggcctccaaaagtctctcctgagtagcacatctacgacaacgaagataactaccggcagctcctcagctgggacccagtcaagtacctcaaatcgcctgtgggccgaagactccacagagaaggaaaaggactcggtaccaaccgctgtgactattcccgtggctccaaccgttgtgaatgccgctgcctcaacaaccactttgacaacaacaacagcagggacagttagctcaactaccgaagtgagggaaaggagacggtcgtatctgacccctgtgcgtgacgaagaatcagaaagtcagcgcaaggcacggagccgccaggctcgacagtcaaggcggtccacacaaggggtgaccctgaccgacctgcaggaagcggagaagaccattggtcgaagtagatccacaagaactagggagcaggagaatgaagaaaaggagaaagaggagaaagagaaacaggacaaagaaaaacaggaagagaagaaggagtctgaaacatctcgtgaggatgagtacaagcagaaatactctagaacttacgatgagacgtatcaaagatatcgaccagtctctaccagctccagcaccacaccatcatccagcctgtctacaatgtcctcaagtttatacgctagcagtcaacttaatcgccctaattccctagtgggaataacctcagcctatagccggggaattacaaaggaaaacgaacgagaaggcgagaaacgggaagaggaaaaggaaggcgaagacaaatcacagcccaaatccatccgtgagaggaggaggccaagggaaaagcgtagatctacaggggtctccttttggacccaggatagtgacgaaaacgagcaggaacagcagtcagacaccgaagaagggtccaataaaaaagaaacccaaaccgacagcatctctcgatacgagacctcatcaacaagcgcgggtgaccgatatgactctctcctcgggagaagcggctcatactcctacctggaagagagaaagccttattcctctcggctggagaaggacgatagtactgacttcaaaaaactctacgagcagattctggccgagaacgaaaagctgaaggctcagctgcacgacacaaacatggagttgacagacctgaaacttcagctggaaaaggctacccagagacaagaaagattcgctgatagatctctcctagaaatggagaaacgcgagcgaagggccttggagaggcgcatctcagaaatggaagaagaattaaaaatgctgcctgatctaaaagccgacaatcagcgacttaaggatgaaaatggagccctcatacgggtgataagcaagctttccaagtag

SEQ ID NO: 55592 - DNA, 3093 bp, Artificial Sequence
  derived and/or modified sequence
atgaagatggccgatgccaaacagaagcgcaacgaacaactgaagcggtggatcgggagtgagacggacctggaacctcctgtagtcaagcgtcagaaaaccaaagtcaagttcgacgacggggcagtattcctggccgcttgctcgtctggagacactgatgaggtgctgaagttgctccatcgtggggctgatataaattacgctaacgtggatggactcaccgcattacaccaggcttgcatcgatgataatgtagatatggtgaaattcctggttgaaaatggcgcaaacatcaatcagccagataatgaggggtggattcccctacacgccgcagcctcttgcgggtacttggatatagccgaattcctaatcggccagggcgcacatgtgggagcggtgaactcagaaggagacacaccactggatatagcagaggaagaggccatggaggaactgctccagaatgaggtgaacaggcagggtgtcgatattgaagcagctcgaaaggaggaggagagaataatgttgcgcgacgctcggcagtggcttaactccggccacatcaacgacgttcgtcatgccaagagcggcggaaccgccctgcacgtggccgctgctaaagggtacactgaagtgcttaaacttttgattcaggcgggatatgatgtcaacatcaaagattatgatggttggaccccactgcacgctgcggctcactgggggaaagaagaagcttgtagaatcctggtcgataacttgtgcgatatggagatggtcaacaaagttggacagaccgcatttgatgtggcagatgaggacattctgggctatttagaggaactgcagaagaagcagaatcttttacatagtgagaaacgcgataagaaatcgccactgatcgaatccacagcaaatatggataacaatcagtcacagaaaaccttcaagaacaaggagactctcataatcgaacctgagaaaaacgcgtcgcgcattgaatcccttgaacaggaaaaggtcgatgaggaggaggaagggaagaaagacgaatcatcctgttcctcggaggaagacgaagaggacgatagcgagtctgaggccgagacagataaaacaaagccccttgcaagcgtcactaacgccaacacctcttctacccaggctgctccagtagccgttaccaccccaacggtgtcctccgggcaggcgactcccaccagccccataaagaaattcccaacaacagcaaccaagatttctccgaaagaagaggagcggaaagacgagtcaccggctacttggcgtctgggtctccggaaaaccggatcctacggcgctttggcagagataactgcaagcaaggaggggcaaaaggaaaaagataccgcgggagttacccgttccgcgagcagcccgagactttcatctagtctggataataaagagaaagagaaagacagtaaaggcaccagactggcatatgtggctcctactatcccacgcaggttagcttcaaccagtgacattgaggagaaggaaaacagagactcgtctagcctacggaccagttcctcttacaccagacgcaagtgggaagacgatttgaaaaagaactcgagtgtgaatgagggctctacctaccacaagagctgctcattcggcaggcgacaagacgatctgatttcctcctccgttccctccactacctctacccccacggtaacgtctgctgcaggacttcagaaatcactgttatcgagcacgtccacaacaaccaagatcaccacggggtcgtcctcagcaggtacgcagtcttcaacctccaataggctgtgggcagaagattccaccgagaaggaaaaggattcggttccgaccgccgtgaccatcccagtcgccccaactgttgtgaacgccgcagccagcactacgacgctgaccaccacgacagctggcacagtttccagcaccaccgaagtcagggaacgcaggcgctcttacctgaccccggtgcgggacgaagaatcagagagccagcgcaaagccaggtcccggcaggctcgccagtccagacggtcaactcagggggtcacactgaccgacctacaagaggccgagaaaactatcggacgatctaggtcaactagaacaagagaacaggagaacgaggagaaggagaaagaggagaaagaaaagcaagataaggagaaacaggaggaaaagaaggaatctgaaacttcccgggaagacgagtacaaacagaaatactcccgaacatacgacgaaacgtatcagcgctatcggcctgtgtccactagttcgtccactaccccaagcagcagcctatctactatgtcatcatccctgtacgcaagttcacagctgaacagaccaaatagcctggtggggataacttcagcctactccagagggatcacgaaggaaaatgaacgcgaaggggagaaaagagaagaggagaaagaaggggaggacaagagccagccaaagtctattcgggaacggaggcgtcctagggaaaagcgtagaagcacaggcgtaagcttttggacccaggattcagacgagaacgagcaggaacagcagtctgacacagaggagggctctaacaagaaagaaacacagacggactccatcagccgctacgagactagcagcacaagcgccggtgaccgttatgactcccttctgggaaggtcgggctcttattcctatttagaggagcgaaaaccctactcgagcaggttggaaaaggatgacagcactgactttaaaaaattgtatgaacagattcttgctgagaacgagaagctcaaggctcagttacacgacaccaatatggagctgactgatctaaaacttcagttagagaaggcaactcaacggcaggagaggttcgccgaccgctcactgcttgaaatggagaaacgagaaagacgggcactcgaacgccgaattagcgagatggaagaagagctaaaaatgttgcccgatctgaaagccgataatcagcggctaaaggatgagaacggagccctaattagagtcatcagtaaactttcaaagtag

SEQ ID NO: 55593 - DNA, 3093 bp, Artificial Sequence
  derived and/or modified sequence
atgaagatggcggatgcaaagcaaaagcgcaacgaacagttgaaaagatggatcggttccgagactgacttagagccacctgttgtgaagcgtcagaagacaaaagtgaagtttgatgatggagccgtgtttctcgctgcttgctcatccggtgataccgacgaagtattgaaactcttgcataggggggctgatatcaactatgccaacgtggatggcctaacagccctccatcaggcttgtattgatgacaatgtggatatggtgaagttcttggtggagaacggtgccaatattaaccagccagacaatgaaggttggatacctctccacgccgcagctagctgcggctatttagatatcgctgaatttttaattggacagggagctcacgttggagccgttaattctgagggggacacccccctagacattgctgaagaggaggctatggaagagctgctgcaaaacgaagtgaaccgacagggggtggacatagaggccgcaagaaaagaagaggaaagaattatgctgagagacgcgaggcagtggctgaatagtggccacatcaacgatgtgcgtcatgcgaagtctggaggcaccgccctacacgtcgccgctgctaagggctacacagaagtcctgaagctgctgatacaggccggatatgatgtcaatatcaaagattacgacgggtggaccccattgcatgcagctgcccactggggcaaggaagaagcatgtcgcatcctggtggataacttatgtgatatggagatggttaataaagtgggacagactgcgtttgacgtggcagacgaagacatactgggctacttagaggagttgcagaagaagcagaatcttctgcacagcgaaaagcgtgataaaaagagccctcttatcgagtccacagcgaacatggacaataatcaatctcagaagacatttaaaaataaggagacactgatcattgaacctgaaaagaacgcatctagaattgaaagtctggagcaagagaaggtcgacgaggaagaagaggggaagaaggatgagtcatcatgttcttccgaggaggacgaagaagacgactcagaaagcgaagcggagaccgataaaaccaaacccctcgccagtgtgactaatgccaacacatcaagtacccaggcagctcctgtagctgtgacaacaccaacggtctcctctggccaggccacccctacctcgcctatcaagaaatttccaacgacagcaacaaagatcagccccaaggaagaagaacggaaagatgaatctcctgcgacttggcgcctcggactaaggaagaccggatcatacggtgccctggcggagataacagcctcaaaggaggggcaaaaagaaaaggacacagcgggagtgacccggagcgcttcaagcccacggctttcttcctccttggataacaaggaaaaagagaaggacagtaagggaacacgactcgcctatgtggcacctactattccacgcagactcgcaagcacatcagacattgaagagaaggagaatcgcgattctagttcactgaggacctcaagctcatacacaaggcggaaatgggaagacgatctgaaaaagaatagttcagtaaacgaaggttcaacctatcacaagagctgcagctttggccgaaggcaggacgacctaatttccagctctgtaccctctaccacctcaacacccacggtgacatctgccgcagggctgcagaaaagcctgctgtcctcaacttccacgaccacgaagattacaacgggttcaagctctgctggaactcagagcagtacttccaaccggctgtgggcagaagacagcaccgagaaggaaaaggactccgtcccaacagccgttaccattcccgtcgctccaaccgttgtgaacgccgcagcatccacgacgaccctgacgacaaccactgccggaactgtgtctagcacaaccgaggtccgcgaacgcaggaggagttaccttacccctgtcagagacgaggagagcgaaagccagcggaaagccagaagtcggcaggctagacaatcccggaggagtacccaaggagtgaccctcaccgacctccaggaggccgagaaaactattggcaggagtagaagtacacggacccgcgagcaggagaacgaagaaaaagaaaaagaagaaaaggagaaacaagataaggagaagcaggaagagaagaaagagtcggagacttccagggaagatgaatataaacaaaagtattccaggacatatgacgagacgtaccaacgctatcggcctgtgagcaccagctccagtacaacccctagcagctctctgtcaactatgtcatccagcttgtatgcctctagtcagttgaatcgcccaaactcactggtaggcatcacaagcgcctattctagaggcattacaaaagagaacgaacgagaaggcgagaagcgggaggaggaaaaagaaggggaagacaagtcccagccgaaaagtatccgtgaaagaagacgccctcgcgagaaacgaagatcgactggtgtaagcttttggacccaagacagtgacgaaaatgaacaggagcagcagtcggatactgaggaaggatcaaataagaaagagactcaagttaacactatcacactgtacgagaccagttcaacgagcgccggtgatcggtatgatagcctactaggacgctctggctcgtattcctatctcgaggagcgtaaaccgtactcctcacgccttgagaaggatgatagcactgatttcaagaagctctacgagcagattttagctgagaatgagaagctgaaagctcagctacatgatacaaacatggagctcacagacctaaaattgcagctggagaaggctacacaacgccaggaacgcttcgctgacagatcactgctggagatggaaaaacgggaaagaagagccctcgagaggagaatctcagagatggaagaggagctcaaaatgcttcctgacctgaaagcagacaaccagaggctaaaggatgaaaacggtgctctcatacgggtcatttccaagcttagcaaatag

SEQ ID NO: 55594 - DNA, 5582 bp, Artificial Sequence
  derived and/or modified sequence
agatctgccctgtagagccttgcggttccactgctggcctccggattcccgggagcccccagcccgacaggacaaccttccttccccgcttcctcctttccagacccggcggcaggagaggggatgaagatggcggacgcgaagcagaagcggaacgagcagctgaaacgctggatcggctccgagacggacctcgagcctccggtggtgaagcgccagaagaccaaggtgaagttcgacgatggcgccgtcttcctggctgcttgctccagcggcgacacggacgaggtcctcaagctgctgcaccgcggcgccgacatcaattacgccaatgtggacggactcactgccctgcaccaggcttgcattgatgacaatgttgatatggtgaagtttctggtagaaaatggagcaaatattaatcaacctgataatgaaggctggataccactacatgcagcagcttcctgtggatatcttgatattgcagagtttttgattggtcaaggagcacatgtaggggctgtcaacagtgaaggagatacacctttagatattgcggaggaggaggcaatggaagagctacttcaaaatgaagttaatcggcaaggggttgatatagaagcagctcgaaaggaagaagaacggatcatgcttagagatgccaggcagtggctaaatagtggtcatataaatgatgtccggcatgcaaaatctggaggtacagcacttcacgttgcagctgctaaaggctatacggaagttttaaaacttttaatacaggcaggctatgatgttaatattaaagactatgatggctggacacctcttcatgctgcagctcattggggtaaagaagaagcatgtcgaattttagtggacaatctgtgtgatatggagatggtcaacaaagtgggccaaacagcctttgatgtagcagatgaagacattttaggatatttagaagagttgcaaaagaaacaaaatctgctccatagtgaaaaacgggacaagaaatctccactaattgaatcaacagcaaatatggacaataatcagtcacagaagacctttaaaaacaaagagacgttgattattgaaccagagaaaaatgcatcccgtattgaatctctggaacaagaaaaggttgatgaagaagaagaaggaaagaaggatgagtctagctgctctagtgaagaagatgaggaagatgactcggaatcagaagctgaaacagataagacaaaacccctggcttctgtaactaatgccaacacttctagtacacaagcagctcctgtagctgttacaacacctactgtgtcatcaggtcaagcaacacctacatcacctattaaaaagtttccaaccacagctacaaaaatttctcccaaagaagaagagagaaaagatgagtctcctgcaacttggaggttaggacttagaaagacgggcagctatggtgcacttgctgaaatcacagcatctaaagagggtcagaaagaaaaagatactgcaggtgttacacgttcagcttcaagtcccagactttcctcctctttggataataaagaaaaggagaaagatagtaaaggaactaggcttgcatatgttgcacctacaataccaagacgactagccagtacatctgacattgaagagaaagaaaacagagattcttcaagtttgcgaacaagtagttcatatacaaggagaaaatgggaagatgatcttaaaaaaaatagctcagttaatgaaggatcaacgtatcataaaagttgctcctttggtagaagacaagatgatttgattagttctagtgttccaagcaccacatcaacaccaacagttacctctgcagctgggcttcagaaaagcctgctttccagcacaagcactactacaaagattacaacgggttcttcctcagcaggcacacaaagcagtacctcaaatcgtttgtgggctgaggatagtactgagaaagaaaaggacagtgttcctacggcagtgaccattcctgttgctccaactgttgtaaatgctgcagcttctaccacaaccctgactacaactactgctggcactgtctcctccacaacagaggtcagggagagacgcagatcatacctcactcctgttagggatgaagagtctgaatcccaaagaaaagcaagatctagacaagcaagacaatctagaagatcaacacagggagtgacattaactgatcttcaagaagctgagaaaacaataggaagaagtcgttctacccgaaccagagaacaagaaaatgaagaaaaagaaaaagaggaaaaagagaaacaagataaagagaaacaagaagaaaagaaggagtcagaaacatctagagaagatgaatataaacaaaagtactccagaacgtatgatgagacttaccagcgttataggccagtatcaacttcaagttcaaccactccatcctcttcactttctactatgagcagttcactgtatgcttcaagtcaactaaacaggccaaatagtcttgtaggcataacttctgcttactccagaggaataacaaaagaaaatgaaagagagggagaaaaaagagaagaggagaaagaaggagaagataaatcacaacctaaatcaatcagagaacgacgacgaccaagagagaaaagaagatctacaggagtttcattttggacacaagatagtgatgaaaatgaacaagaacaacaatcagacacagaagagggatccaataagaaagaaactcagacggattccatttctagatatgaaaccagttctacatcagctggtgatcgatatgattccttgctgggtcgctctggatcatacagttacttagaagaaagaaaaccttacagcagcaggctagaaaaggatgactcaactgactttaaaaagctttatgaacaaattctagctgaaaatgaaaagctgaaggcacagctacatgatacaaatatggaactaacagatcttaaattacagttggaaaaggccacccagagacaagaaagatttgctgatagatcactgttggaaatggaaaaaagggaacgaagagctctagaaagaagaatatctgaaatggaagaagagctcaaaatgttaccagacctaaaagcagacaaccagaggctaaaggatgaaaatggggccttgatcagagttataagcaaactttccaaataaaaaaaaaaaaagcagcaagtaatggaattgcacatattagtaacccagtggaccataattggcagtcactggaagtctgggaagaatccttggagactgtcattttcggatatcctgccaaatgccctcttatctagaatttttgtttcattttgtttaattttctggggtgtttttgttgttgttggtttgttttttgttttttttttttaatcaagaccattgtttcatgttaatgcagctgctgagaagatttttttttaatgactgagaaaacttgtttacagctccagcatataaggaaagtgttcaaggccagatatgcctcagatatttaaccagtaagccttagttgtacataaatacttttgtgtcaacaaaaactttcagctctcacagaagacagttactcaacattttttgatgtgccacagtttcgagtttttcgatatttaaattttttggcttttcatctaagtttgggtttgtattttttccttctaaactcttcatgtggcagagtcttctatgttttcacagctttttcattacagaaaagaacacttgctcttctgtgattattgtcatgtattaggctaatgctgtgttgtctcccacctggaactgaattgcttggtggaacatatgctttcactgtttgtgcaatatgcatttatttcttatatgaatgctttaaagtcatttgaggttagatcttttaattcctattttctgcttcattggtcactttttttttattgtagtataagatgttagattctgtaatcttcacattcattttagcaggtactgagtgatgctgtatatacaaataagtgtattgttttgatttttagaccaccacatggcatgcttgactatttcttatttcaaatgtctgctaatgcagagtaggctactccatgatagtgttaaaaaacaaaatttgctaacaatgtgatataaagactttaaaagttacacattatgtggagccctatctttacaaaagtttcctactgtaaagtgcttttattttcagttttcacttgatagtactcaaccataattaaagttgcataagataattgctttacatttcacatacctatatttatctgagtgctgtctaaaactgttgtgctagccaaagtaatgctatgaaatcatttgcagaattaacccgtgagttaatgttaaatgcactgttattgccatgtgaagaggcatcgactttgataccaccatcatgttcagaccattttatacatttcagtggcctttttttttttttaaggaaaaaaaagcgcaaaaccaagtacatagtgacgatggcttttatttggacaaatagcttttatattttcattaaaccatgcaaaaaatactacatctttctggcacataactgtctccttaaccactgaacagttcagccatttgaataaattgtacattgtaaagcttatagtagctgattgtattattgattgtattgtatactatattaaatgtgaatttgtaccccttcattttaaaaggtcattgtgttctactgcctattttagattactttggggttggggaagggtgttttggtaagcaggattttaagtcctctctctctcgattggttttatgaagatataaggttatgctcttactaccaagctcaggattcttgattttaaaggtacaaggatagttgtgggagttttatttttggttatatttgaactgtatgaatggtaggtctgaatattgagaatttccatggtcttatgtggaggtaaaatatacagataactgatcagtttgagtgactgcaacatgttctggttgcacaacagttaggcatgctatggtttatatttgtgaagtttggatgcctgtgaagaatgattaaatacatgtttctaatattttagtgttttgtatttaggttatttattctttgtatctaaaactgaacagctactgtgctatattgattttattggtagtattgagcagaccttgtttctgcatgaaactagttgcaaaacccactattttggaaataaaaatgtattttgacatatacaaataaaatgaataaaactattttaaatgtgtgaacttttaatgaagacattttaaattttgttctgagatatttaaattctgcatgggtattttttcactaattgctttacttggataccaatttgaataatttctgaaattgtaatattgtgataatttgcacagcattgtacatgcacatctgtaaatgcaatcttaattgccatatttatgcaatctgtgtaccaatttggacaaatgtttatatattttacataaagctgtctgtatgcagaatctga

SEQ ID NO: 55595 - DNA, 5721 bp, Artificial Sequence
  derived and/or modified sequence
gaagttacgttagattggccgccggtgacgggtggccgtgctgggggcgggagggcttctgtggtaggaagggaggtccgctcggccgggtgcgccgccccagtgctctgtgggatactggaagtctcgagcgtcggctccgggttcccagccctcctctggcccgcactcatagaaacattcacacaccccctgcctcccctctcttccctctccgcctcccccttccccccctcgcgataagaagacccggcggcaggagaggggatgaagatggcggacgcgaagcagaagcggaacgagcagctgaaacgctggatcggctccgagacggacctcgagcctccggtggtgaagcgccagaagaccaaggtgaagttcgacgatggcgccgtcttcctggctgcttgctccagcggcgacacggacgaggtcctcaagctgctgcaccgcggcgccgacatcaattacgccaatgtggacggactcactgccctgcaccaggcttgcattgatgacaatgttgatatggtgaagtttctggtagaaaatggagcaaatattaatcaacctgataatgaaggctggataccactacatgcagcagcttcctgtggatatcttgatattgcagagtttttgattggtcaaggagcacatgtaggggctgtcaacagtgaaggagatacacctttagatattgcggaggaggaggcaatggaagagctacttcaaaatgaagttaatcggcaaggggttgatatagaagcagctcgaaaggaagaagaacggatcatgcttagagatgccaggcagtggctaaatagtggtcatataaatgatgtccggcatgcaaaatctggaggtacagcacttcacgttgcagctgctaaaggctatacggaagttttaaaacttttaatacaggcaggctatgatgttaatattaaagactatgatggctggacacctcttcatgctgcagctcattggggtaaagaagaagcatgtcgaattttagtggacaatctgtgtgatatggagatggtcaacaaagtgggccaaacagcctttgatgtagcagatgaagacattttaggatatttagaagagttgcaaaagaaacaaaatctgctccatagtgaaaaacgggacaagaaatctccactaattgaatcaacagcaaatatggacaataatcagtcacagaagacctttaaaaacaaagagacgttgattattgaaccagagaaaaatgcatcccgtattgaatctctggaacaagaaaaggttgatgaagaagaagaaggaaagaaggatgagtctagctgctctagtgaagaagatgaggaagatgactcggaatcagaagctgaaacagataagacaaaacccctggcttctgtaactaatgccaacacttctagtacacaagcagctcctgtagctgttacaacacctactgtgtcatcaggtcaagcaacacctacatcacctattaaaaagtttccaaccacagctacaaaaatttctcccaaagaagaagagagaaaagatgagtctcctgcaacttggaggttaggacttagaaagacgggcagctatggtgcacttgctgaaatcacagcatctaaagagggtcagaaagaaaaagatactgcaggtgttacacgttcagcttcaagtcccagactttcctcctctttggataataaagaaaaggagaaagatagtaaaggaactaggcttgcatatgttgcacctacaataccaagacgactagccagtacatctgacattgaagagaaagaaaacagagattcttcaagtttgcgaacaagtagttcatatacaaggagaaaatgggaagatgatcttaaaaaaaatagctcagttaatgaaggatcaacgtatcataaaagttgctcctttggtagaagacaagatgatttgattagttctagtgttccaagcaccacatcaacaccaacagttacctctgcagctgggcttcagaaaagcctgctttccagcacaagcactactacaaagattacaacgggttcttcctcagcaggcacacaaagcagtacctcaaatcgtttgtgggctgaggatagtactgagaaagaaaaggacagtgttcctacggcagtgaccattcctgttgctccaactgttgtaaatgctgcagcttctaccacaaccctgactacaactactgctggcactgtctcctccacaacagaggtcagggagagacgcagatcatacctcactcctgttagggatgaagagtctgaatcccaaagaaaagcaagatctagacaagcaagacaatctagaagatcaacacagggagtgacattaactgatcttcaagaagctgagaaaacaataggaagaagtcgttctacccgaaccagagaacaagaaaatgaagaaaaagaaaaagaggaaaaagagaaacaagataaagagaaacaagaagaaaagaaggagtcagaaacatctagagaagatgaatataaacaaaagtactccagaacgtatgatgagacttaccagcgttataggccagtatcaacttcaagttcaaccactccatcctcttcactttctactatgagcagttcactgtatgcttcaagtcaactaaacaggccaaatagtcttgtaggcataacttctgcttactccagaggaataacaaaagaaaatgaaagagagggagaaaaaagagaagaggagaaagaaggagaagataaatcacaacctaaatcaatcagagaacgacgacgaccaagagagaaaagaagatctacaggagtttcattttggacacaagatagtgatgaaaatgaacaagaacaacaatcagacacagaagagggatccaataagaaagaaactcagacggattccatttctagatatgaaaccagttctacatcagctggtgatcgatatgattccttgctgggtcgctctggatcatacagttacttagaagaaagaaaaccttacagcagcaggctagaaaaggatgactcaactgactttaaaaagctttatgaacaaattctagctgaaaatgaaaagctgaaggcacagctacatgatacaaatatggaactaacagatcttaaattacagttggaaaaggccacccagagacaagaaagatttgctgatagatcactgttggaaatggaaaaaagggaacgaagagctctagaaagaagaatatctgaaatggaagaagagctcaaaatgttaccagacctaaaagcagacaaccagaggctaaaggatgaaaatggggccttgatcagagttataagcaaactttccaaataaaaaaaaaaaaagcagcaagtaatggaattgcacatattagtaacccagtggaccataattggcagtcactggaagtctgggaagaatccttggagactgtcattttcggatatcctgccaaatgccctcttatctagaatttttgtttcattttgtttaattttctggggtgtttttgttgttgttggtttgttttttgttttttttttttaatcaagaccattgtttcatgttaatgcagctgctgagaagatttttttttaatgactgagaaaacttgtttacagctccagcatataaggaaagtgttcaaggccagatatgcctcagatatttaaccagtaagccttagttgtacataaatacttttgtgtcaacaaaaactttcagctctcacagaagacagttactcaacattttttgatgtgccacagtttcgagtttttcgatatttaaattttttggcttttcatctaagtttgggtttgtattttttccttctaaactcttcatgtggcagagtcttctatgttttcacagctttttcattacagaaaagaacacttgctcttctgtgattattgtcatgtattaggctaatgctgtgttgtctcccacctggaactgaattgcttggtggaacatatgctttcactgtttgtgcaatatgcatttatttcttatatgaatgctttaaagtcatttgaggttagatcttttaattcctattttctgcttcattggtcactttttttttattgtagtataagatgttagattctgtaatcttcacattcattttagcaggtactgagtgatgctgtatatacaaataagtgtattgttttgatttttagaccaccacatggcatgcttgactatttcttatttcaaatgtctgctaatgcagagtaggctactccatgatagtgttaaaaaacaaaatttgctaacaatgtgatataaagactttaaaagttacacattatgtggagccctatctttacaaaagtttcctactgtaaagtgcttttattttcagttttcacttgatagtactcaaccataattaaagttgcataagataattgctttacatttcacatacctatatttatctgagtgctgtctaaaactgttgtgctagccaaagtaatgctatgaaatcatttgcagaattaacccgtgagttaatgttaaatgcactgttattgccatgtgaagaggcatcgactttgataccaccatcatgttcagaccattttatacatttcagtggcctttttttttttttaaggaaaaaaaagcgcaaaaccaagtacatagtgacgatggcttttatttggacaaatagcttttatattttcattaaaccatgcaaaaaatactacatctttctggcacataactgtctccttaaccactgaacagttcagccatttgaataaattgtacattgtaaagcttatagtagctgattgtattattgattgtattgtatactatattaaatgtgaatttgtaccccttcattttaaaaggtcattgtgttctactgcctattttagattactttggggttggggaagggtgttttggtaagcaggattttaagtcctctctctctcgattggttttatgaagatataaggttatgctcttactaccaagctcaggattcttgattttaaaggtacaaggatagttgtgggagttttatttttggttatatttgaactgtatgaatggtaggtctgaatattgagaatttccatggtcttatgtggaggtaaaatatacagataactgatcagtttgagtgactgcaacatgttctggttgcacaacagttaggcatgctatggtttatatttgtgaagtttggatgcctgtgaagaatgattaaatacatgtttctaatattttagtgttttgtatttaggttatttattctttgtatctaaaactgaacagctactgtgctatattgattttattggtagtattgagcagaccttgtttctgcatgaaactagttgcaaaacccactattttggaaataaaaatgtattttgacatatacaaataaaatgaataaaactattttaaatgtgtgaacttttaatgaagacattttaaattttgttctgagatatttaaattctgcatgggtattttttcactaattgctttacttggataccaatttgaataatttctgaaattgtaatattgtgataatttgcacagcattgtacatgcacatctgtaaatgcaatcttaattgccatatttatgcaatctgtgtaccaatttggacaaatgtttatatattttacataaagctgtctgtatgcagaa

SEQ ID NO: 55596 - DNA, 5582 bp, Artificial Sequence
  derived and/or modified sequence
agatctgccctgtagagccttgcggttccactgctggcctccggattcccgggagcccccagcccgacaggacaaccttccttccccgcttcctcctttccagacccggcggcaggagaggggatgaagatggcggacgcgaagcagaagcggaacgagcagctgaaacgctggatcggctccgagacggacctcgagcctccggtggtgaagcgccagaagaccaaggtgaagttcgacgatggcgccgtcttcctggctgcttgctccagcggcgacacggacgaggtcctcaagctgctgcaccgcggcgccgacatcaattacgccaatgtggacggactcactgccctgcaccaggcttgcattgatgacaatgttgatatggtgaagtttctggtagaaaatggagcaaatattaatcaacctgataatgaaggctggataccactacatgcagcagcttcctgtggatatcttgatattgcagagtttttgattggtcaaggagcacatgtaggggctgtcaacagtgaaggagatacacctttagatattgcggaggaggaggcaatggaagagctacttcaaaatgaagttaatcggcaaggggttgatatagaagcagctcgaaaggaagaagaacggatcatgcttagagatgccaggcagtggctaaatagtggtcatataaatgatgtccggcatgcaaaatctggaggtacagcacttcacgttgcagctgctaaaggctatacggaagttttaaaacttttaatacaggcaggctatgatgttaatattaaagactatgatggctggacacctcttcatgctgcagctcattggggtaaagaagaagcatgtcgaattttagtggacaatctgtgtgatatggagatggtcaacaaagtgggccaaacagcctttgatgtagcagatgaagacattttaggatatttagaagagttgcaaaagaaacaaaatctgctccatagtgaaaaacgggacaagaaatctccactaattgaatcaacagcaaatatggacaataatcagtcacagaagacctttaaaaacaaagagacgttgattattgaaccagagaaaaatgcatcccgtattgaatctctggaacaagaaaaggttgatgaagaagaagaaggaaagaaggatgagtctagctgctctagtgaagaagatgaggaagatgactcggaatcagaagctgaaacagataagacaaaacccctggcttctgtaactaatgccaacacttctagtacacaagcagctcctgtagctgttacaacacctactgtgtcatcaggtcaagcaacacctacatcacctattaaaaagtttccaaccacagctacaaaaatttctcccaaagaagaagagagaaaagatgagtctcctgcaacttggaggttaggacttagaaagacgggcagctatggtgcacttgctgaaatcacagcatctaaagagggtcagaaagaaaaagatactgcaggtgttacacgttcagcttcaagtcccagactttcctcctctttggataataaagaaaaggagaaagatagtaaaggaactaggcttgcatatgttgcacctacaataccaagacgactagccagtacatctgacattgaagagaaagaaaacagagattcttcaagtttgcgaacaagtagttcatatacaaggagaaaatgggaagatgatcttaaaaaaaatagctcagttaatgaaggatcaacgtatcataaaagttgctcctttggtagaagacaagatgatttgattagttctagtgttccaagcaccacatcaacaccaacagttacctctgcagctgggcttcagaaaagcctgctttccagcacaagcactactacaaagattacaacgggttcttcctcagcaggcacacaaagcagtacctcaaatcgtttgtgggctgaggatagtactgagaaagaaaaggacagtgttcctacggcagtgaccattcctgttgctccaactgttgtaaatgctgcagcttctaccacaaccctgactacaactactgctggcactgtctcctccacaacagaggtcagggagagacgcagatcatacctcactcctgttagggatgaagagtctgaatcccaaagaaaagcaagatctagacaagcaagacaatctagaagatcaacacagggagtgacattaactgatcttcaagaagctgagaaaacaataggaagaagtcgttctacccgaaccagagaacaagaaaatgaagaaaaagaaaaagaggaaaaagagaaacaagataaagagaaacaagaagaaaagaaggagtcagaaacatctagagaagatgaatataaacaaaagtactccagaacgtatgatgagacttaccagcgttataggccagtatcaacttcaagttcaaccactccatcctcttcactttctactatgagcagttcactgtatgcttcaagtcaactaaacaggccaaatagtcttgtaggcataacttctgcttactccagaggaataacaaaagaaaatgaaagagagggagaaaaaagagaagaggagaaagaaggagaagataaatcacaacctaaatcaatcagagaacgacgacgaccaagagagaaaagaagatctacaggagtttcattttggacacaagatagtgatgaaaatgaacaagaacaacaatcagacacagaagagggatccaataagaaagaaactcaggtaaataccattactttatatgaaaccagttctacatcagctggtgatcgatatgattccttgctgggtcgctctggatcatacagttacttagaagaaagaaaaccttacagcagcaggctagaaaaggatgactcaactgactttaaaaagctttatgaacaaattctagctgaaaatgaaaagctgaaggcacagctacatgatacaaatatggaactaacagatcttaaattacagttggaaaaggccacccagagacaagaaagatttgctgatagatcactgttggaaatggaaaaaagggaacgaagagctctagaaagaagaatatctgaaatggaagaagagctcaaaatgttaccagacctaaaagcagacaaccagaggctaaaggatgaaaatggggccttgatcagagttataagcaaactttccaaataaaaaaaaaaaaagcagcaagtaatggaattgcacatattagtaacccagtggaccataattggcagtcactggaagtctgggaagaatccttggagactgtcattttcggatatcctgccaaatgccctcttatctagaatttttgtttcattttgtttaattttctggggtgtttttgttgttgttggtttgttttttgttttttttttttaatcaagaccattgtttcatgttaatgcagctgctgagaagatttttttttaatgactgagaaaacttgtttacagctccagcatataaggaaagtgttcaaggccagatatgcctcagatatttaaccagtaagccttagttgtacataaatacttttgtgtcaacaaaaactttcagctctcacagaagacagttactcaacattttttgatgtgccacagtttcgagtttttcgatatttaaattttttggcttttcatctaagtttgggtttgtattttttccttctaaactcttcatgtggcagagtcttctatgttttcacagctttttcattacagaaaagaacacttgctcttctgtgattattgtcatgtattaggctaatgctgtgttgtctcccacctggaactgaattgcttggtggaacatatgctttcactgtttgtgcaatatgcatttatttcttatatgaatgctttaaagtcatttgaggttagatcttttaattcctattttctgcttcattggtcactttttttttattgtagtataagatgttagattctgtaatcttcacattcattttagcaggtactgagtgatgctgtatatacaaataagtgtattgttttgatttttagaccaccacatggcatgcttgactatttcttatttcaaatgtctgctaatgcagagtaggctactccatgatagtgttaaaaaacaaaatttgctaacaatgtgatataaagactttaaaagttacacattatgtggagccctatctttacaaaagtttcctactgtaaagtgcttttattttcagttttcacttgatagtactcaaccataattaaagttgcataagataattgctttacatttcacatacctatatttatctgagtgctgtctaaaactgttgtgctagccaaagtaatgctatgaaatcatttgcagaattaacccgtgagttaatgttaaatgcactgttattgccatgtgaagaggcatcgactttgataccaccatcatgttcagaccattttatacatttcagtggcctttttttttttttaaggaaaaaaaagcgcaaaaccaagtacatagtgacgatggcttttatttggacaaatagcttttatattttcattaaaccatgcaaaaaatactacatctttctggcacataactgtctccttaaccactgaacagttcagccatttgaataaattgtacattgtaaagcttatagtagctgattgtattattgattgtattgtatactatattaaatgtgaatttgtaccccttcattttaaaaggtcattgtgttctactgcctattttagattactttggggttggggaagggtgttttggtaagcaggattttaagtcctctctctctcgattggttttatgaagatataaggttatgctcttactaccaagctcaggattcttgattttaaaggtacaaggatagttgtgggagttttatttttggttatatttgaactgtatgaatggtaggtctgaatattgagaatttccatggtcttatgtggaggtaaaatatacagataactgatcagtttgagtgactgcaacatgttctggttgcacaacagttaggcatgctatggtttatatttgtgaagtttggatgcctgtgaagaatgattaaatacatgtttctaatattttagtgttttgtatttaggttatttattctttgtatctaaaactgaacagctactgtgctatattgattttattggtagtattgagcagaccttgtttctgcatgaaactagttgcaaaacccactattttggaaataaaaatgtattttgacatatacaaataaaatgaataaaactattttaaatgtgtgaacttttaatgaagacattttaaattttgttctgagatatttaaattctgcatgggtattttttcactaattgctttacttggataccaatttgaataatttctgaaattgtaatattgtgataatttgcacagcattgtacatgcacatctgtaaatgcaatcttaattgccatatttatgcaatctgtgtaccaatttggacaaatgtttatatattttacataaagctgtctgtatgcagaatctga

SEQ ID NO: 55597 - DNA, 2977 bp, Artificial Sequence
  derived and/or modified sequence
atcatatgcttgtaagagaatgagagtattaaccttgtagacttctgtaaggggctaagagaaacactgagctaaataattgaggggatatactatgttcatggcttgaaagactgcttgcattgatgacaatgttgatatggtgaagtttctggtagaaaatggagcaaatattaatcaacctgataatgaaggctggataccactacatgcagcagcttcctgtggatatcttgatattgcagagtttttgattggtcaaggagcacatgtaggggctgtcaacagtgaaggagatacacctttagatattgcggaggaggaggcaatggaagagctacttcaaaatgaagttaatcggcaaggggttgatatagaagcagctcgaaaggaagaagaacggatcatgcttagagatgccaggcagtggctaaatagtggtcatataaatgatgtccggcatgcaaaatctggaggtacagcacttcacgttgcagctgctaaaggctatacggaagttttaaaacttttaatacaggcaggctatgatgttaatattaaagactatgatggctggacacctcttcatgctgcagctcattggggtaaagaagaagcatgtcgaattttagtggacaatctgtgtgatatggagatggtcaacaaagtgggccaaacagcctttgatgtagcagatgaagacattttaggatatttagaagagttgcaaaagaaacaaaatctgctccatagtgaaaaacgggacaagaaatctccactaattgaatcaacagcaaatatggacaataatcagtcacagaagacctttaaaaacaaagagacgttgattattgaaccagagaaaaatgcatcccgtattgaatctctggaacaagaaaaggttgatgaagaagaagaaggaaagaaggatgagtctagctgctctagtgaagaagatgaggaagatgactcggaatcagaagctgaaacagataagacaaaacccctggcttctgtaactaatgccaacacttctagtacacaagcagctcctgtagctgttacaacacctactgtgtcatcaggtcaagcaacacctacatcacctattaaaaagtttccaaccacagctacaaaaatttctcccaaagaagaagagagaaaagatgagtctcctgcaacttggaggttaggacttagaaagacgggcagctatggtgcacttgctgaaatcacagcatctaaagagggtcagaaagaaaaagatactgcaggtgttacacgttcagcttcaagtcccagactttcctcctctttggataataaagaaaaggagaaagatagtaaaggaactaggcttgcatatgttgcacctacaataccaagacgactagccagtacatctgacattgaagagaaagaaaacagagattcttcaagtttgcgaacaagtagttcatatacaaggagaaaatgggaagatgatcttaaaaaaaatagctcagttaatgaaggatcaacgtatcataaaagttgctcctttggtagaagacaagatgatttgattagttctagtgttccaagcaccacatcaacaccaacagttacctctgcagctgggcttcagaaaagcctgctttccagcacaagcactactacaaagattacaacgggttcttcctcagcaggcacacaaagcagtacctcaaatcgtttgtgggctgaggatagtactgagaaagaaaaggacagtgttcctacggcagtgaccattcctgttgctccaactgttgtaaatgctgcagcttctaccacaaccctgactacaactactgctggcactgtctcctccacaacagaggtcagggagagacgcagatcatacctcactcctgttagggatgaagagtctgaatcccaaagaaaagcaagatctagacaagcaagacaatctagaagatcaacacagggagtgacattaactgatcttcaagaagctgagaaaacaataggaagaagtcgttctacccgaaccagagaacaagaaaatgaagaaaaagaaaaagaggaaaaagagaaacaagataaagagaaacaagaagaaaagaaggagtcagaaacatctagagaagatgaatataaacaaaagtactccagaacgtatgatgagacttaccagcgttataggccagtatcaacttcaagttcaaccactccatcctcttcactttctactatgagcagttcactgtatgcttcaagtcaactaaacaggccaaatagtcttgtaggcataacttctgcttactccagaggaataacaaaagaaaatgaaagagagggagaaaaaagagaagaggagaaagaaggagaagataaatcacaacctaaatcaatcagagaacgacgacgaccaagagagaaaagaagatctacaggagtttcattttggacacaagatagtgatgaaaatgaacaagaacaacaatcagacacagaagagggatccaataagaaagaaactcagacggattccatttctagatatgaaaccagttctacatcagctggtgatcgatatgattccttgctgggtcgctctggatcatacagttacttagaagaaagaaaaccttacagcagcaggctagaaaaggatgactcaactgactttaaaaagctttatgaacaaattctagctgaaaatgaaaagctgaaggcacagctacatgatacaaatatggaactaacagatcttaaattacagttggaaaaggccacccagagacaagaaagatttgctgatagatcactgttggaaatggaaaaaagggaacgaagagctctagaaagaagaatatctgaaatggaagaagagctcaaaatgttaccagacctaaaagcagacaaccagaggctaaaggatgaaaatggggccttgatcagagttataagcaaactttccaaataaaaaaaa

SEQ ID NO: 55598 - DNA, 3093 bp, Artificial Sequence
  derived and/or modified sequence
atgaagatggccgacgccaagcagaagagaaacgagcagctgaagagatggatcggcagcgagaccgacctggagccccccgtggtgaagagacagaagaccaaggtgaagttcgacgacggcgccgtgttcctggccgcctgcagcagcggcgacaccgacgaggtgctgaagctgctgcacagaggcgccgacatcaactacgccaacgtggacggcctgaccgccctgcaccaggcctgcatcgacgacaacgtggacatggtgaagttcctggtggagaacggcgccaacatcaaccagcccgacaacgagggctggatccccctgcacgccgccgccagctgcggctacctggacatcgccgagttcctgatcggccagggcgcccacgtgggcgccgtgaacagcgagggcgacacccccctggacatcgccgaggaggaggccatggaggagctgctgcagaacgaggtgaacagacagggcgtggacatcgaggccgccagaaaggaggaggagagaatcatgctgagagacgccagacagtggctgaacagcggccacatcaacgacgtgagacacgccaagagcggcggcaccgccctgcacgtggccgccgccaagggctacaccgaggtgctgaagctgctgatccaggccggctacgacgtgaacatcaaggactacgacggctggacccccctgcacgccgccgcccactggggcaaggaggaggcctgcagaatcctggtggacaacctgtgcgacatggagatggtgaacaaggtgggccagaccgccttcgacgtggccgacgaggacatcctgggctacctggaggagctgcagaagaagcagaacctgctgcacagcgagaagagagacaagaagagccccctgatcgagagcaccgccaacatggacaacaaccagagccagaagaccttcaagaacaaggagaccctgatcatcgagcccgagaagaacgccagcagaatcgagagcctggagcaggagaaggtggacgaggaggaggagggcaagaaggacgagagcagctgcagcagcgaggaggacgaggaggacgacagcgagagcgaggccgagaccgacaagaccaagcccctggccagcgtgaccaacgccaacaccagcagcacccaggccgcccccgtggccgtgaccacccccaccgtgagcagcggccaggccacccccaccagccccatcaagaagttccccaccaccgccaccaagatcagccccaaggaggaggagagaaaggacgagagccccgccacctggagactgggcctgagaaagaccggcagctacggcgccctggccgagatcaccgccagcaaggagggccagaaggagaaggacaccgccggcgtgaccagaagcgccagcagccccagactgagcagcagcctggacaacaaggagaaggagaaggacagcaagggcaccagactggcctacgtggcccccaccatccccagaagactggccagcaccagcgacatcgaggagaaggagaacagagacagcagcagcctgagaaccagcagcagctacaccagaagaaagtgggaggacgacctgaagaagaacagcagcgtgaacgagggcagcacctaccacaagagctgcagcttcggcagaagacaggacgacctgatcagcagcagcgtgcccagcaccaccagcacccccaccgtgaccagcgccgccggcctgcagaagagcctgctgagcagcaccagcaccaccaccaagatcaccaccggcagcagcagcgccggcacccagagcagcaccagcaacagactgtgggccgaggacagcaccgagaaggagaaggacagcgtgcccaccgccgtgaccatccccgtggcccccaccgtggtgaacgccgccgccagcaccaccaccctgaccaccaccaccgccggcaccgtgagcagcaccaccgaggtgagagagagaagaagaagctacctgacccccgtgagagacgaggagagcgagagccagagaaaggccagaagcagacaggccagacagagcagaagaagcacccagggcgtgaccctgaccgacctgcaggaggccgagaagaccatcggcagaagcagaagcaccagaaccagagagcaggagaacgaggagaaggagaaggaggagaaggagaagcaggacaaggagaagcaggaggagaagaaggagagcgagaccagcagagaggacgagtacaagcagaagtacagcagaacctacgacgagacctaccagagatacagacccgtgagcaccagcagcagcaccacccccagcagcagcctgagcaccatgagcagcagcctgtacgccagcagccagctgaacagacccaacagcctggtgggcatcaccagcgcctacagcagaggcatcaccaaggagaacgagagagagggcgagaagagagaggaggagaaggagggcgaggacaagagccagcccaagagcatcagagagagaagaagacccagagagaagagaagaagcaccggcgtgagcttctggacccaggacagcgacgagaacgagcaggagcagcagagcgacaccgaggagggcagcaacaagaaggagacccagaccgacagcatcagcagatacgagaccagcagcaccagcgccggcgacagatacgacagcctgctgggcagaagcggcagctacagctacctggaggagagaaagccctacagcagcagactggagaaggacgacagcaccgacttcaagaagctgtacgagcagatcctggccgagaacgagaagctgaaggcccagctgcacgacaccaacatggagctgaccgacctgaagctgcagctggagaaggccacccagagacaggagagattcgccgacagaagcctgctggagatggagaagagagagagaagagccctggagagaagaatcagcgagatggaggaggagctgaagatgctgcccgacctgaaggccgacaaccagagactgaaggacgagaacggcgccctgatcagagtgatcagcaagctgagcaagtag

SEQ ID NO: 55599 - DNA, 3093 bp, Artificial Sequence
  derived and/or modified sequence
atgaagatggccgacgccaagcagaagagaaacgagcagctgaagagatggatcggcagcgagaccgacctggagccccccgtggtgaagagacagaagaccaaggtgaagttcgacgacggcgccgtgttcctggccgcctgcagcagcggcgacaccgacgaggtgctgaagctgctgcacagaggcgccgacatcaactacgccaacgtggacggcctgaccgccctgcaccaggcctgcatcgacgacaacgtggacatggtgaagttcctggtggagaacggcgccaacatcaaccagcccgacaacgagggctggatccccctgcacgccgccgccagctgcggctacctggacatcgccgagttcctgatcggccagggcgcccacgtgggcgccgtgaacagcgagggcgacacccccctggacatcgccgaggaggaggccatggaggagctgctgcagaacgaggtgaacagacagggcgtggacatcgaggccgccagaaaggaggaggagagaatcatgctgagagacgccagacagtggctgaacagcggccacatcaacgacgtgagacacgccaagagcggcggcaccgccctgcacgtggccgccgccaagggctacaccgaggtgctgaagctgctgatccaggccggctacgacgtgaacatcaaggactacgacggctggacccccctgcacgccgccgcccactggggcaaggaggaggcctgcagaatcctggtggacaacctgtgcgacatggagatggtgaacaaggtgggccagaccgccttcgacgtggccgacgaggacatcctgggctacctggaggagctgcagaagaagcagaacctgctgcacagcgagaagagagacaagaagagccccctgatcgagagcaccgccaacatggacaacaaccagagccagaagaccttcaagaacaaggagaccctgatcatcgagcccgagaagaacgccagcagaatcgagagcctggagcaggagaaggtggacgaggaggaggagggcaagaaggacgagagcagctgcagcagcgaggaggacgaggaggacgacagcgagagcgaggccgagaccgacaagaccaagcccctggccagcgtgaccaacgccaacaccagcagcacccaggccgcccccgtggccgtgaccacccccaccgtgagcagcggccaggccacccccaccagccccatcaagaagttccccaccaccgccaccaagatcagccccaaggaggaggagagaaaggacgagagccccgccacctggagactgggcctgagaaagaccggcagctacggcgccctggccgagatcaccgccagcaaggagggccagaaggagaaggacaccgccggcgtgaccagaagcgccagcagccccagactgagcagcagcctggacaacaaggagaaggagaaggacagcaagggcaccagactggcctacgtggcccccaccatccccagaagactggccagcaccagcgacatcgaggagaaggagaacagagacagcagcagcctgagaaccagcagcagctacaccagaagaaagtgggaggacgacctgaagaagaacagcagcgtgaacgagggcagcacctaccacaagagctgcagcttcggcagaagacaggacgacctgatcagcagcagcgtgcccagcaccaccagcacccccaccgtgaccagcgccgccggcctgcagaagagcctgctgagcagcaccagcaccaccaccaagatcaccaccggcagcagcagcgccggcacccagagcagcaccagcaacagactgtgggccgaggacagcaccgagaaggagaaggacagcgtgcccaccgccgtgaccatccccgtggcccccaccgtggtgaacgccgccgccagcaccaccaccctgaccaccaccaccgccggcaccgtgagcagcaccaccgaggtgagagagagaagaagaagctacctgacccccgtgagagacgaggagagcgagagccagagaaaggccagaagcagacaggccagacagagcagaagaagcacccagggcgtgaccctgaccgacctgcaggaggccgagaagaccatcggcagaagcagaagcaccagaaccagagagcaggagaacgaggagaaggagaaggaggagaaggagaagcaggacaaggagaagcaggaggagaagaaggagagcgagaccagcagagaggacgagtacaagcagaagtacagcagaacctacgacgagacctaccagagatacagacccgtgagcaccagcagcagcaccacccccagcagcagcctgagcaccatgagcagcagcctgtacgccagcagccagctgaacagacccaacagcctggtgggcatcaccagcgcctacagcagaggcatcaccaaggagaacgagagagagggcgagaagagagaggaggagaaggagggcgaggacaagagccagcccaagagcatcagagagagaagaagacccagagagaagagaagaagcaccggcgtgagcttctggacccaggacagcgacgagaacgagcaggagcagcagagcgacaccgaggagggcagcaacaagaaggagacccaggtgaacaccatcaccctgtacgagaccagcagcaccagcgccggcgacagatacgacagcctgctgggcagaagcggcagctacagctacctggaggagagaaagccctacagcagcagactggagaaggacgacagcaccgacttcaagaagctgtacgagcagatcctggccgagaacgagaagctgaaggcccagctgcacgacaccaacatggagctgaccgacctgaagctgcagctggagaaggccacccagagacaggagagattcgccgacagaagcctgctggagatggagaagagagagagaagagccctggagagaagaatcagcgagatggaggaggagctgaagatgctgcccgacctgaaggccgacaaccagagactgaaggacgagaacggcgccctgatcagagtgatcagcaagctgagcaagtag

SEQ ID NO: 55600 - protein, 943 aa, Artificial Sequence
  derived and/or modified sequence
MVKFLVENGANINQPDNEGWIPLHAAASCGYLDIAEFLIGQGAHVGAVNSEGDTPLDIAEEEAMEELLQNEVNRQGVDIEAARKEEERIMLRDARQWLNSGHINDVRHAKSGGTALHVAAAKGYTEVLKLLIQAGYDVNIKDYDGWTPLHAAAHWGKEEACRILVDNLCDMEMVNKVGQTAFDVADEDILGYLEELQKKQNLLHSEKRDKKSPLIESTANMDNNQSQKTFKNKETLIIEPEKNASRIESLEQEKVDEEEEGKKDESSCSSEEDEEDDSESEAETDKTKPLASVTNANTSSTQAAPVAVTTPTVSSGQATPTSPIKKFPTTATKISPKEEERKDESPATWRLGLRKTGSYGALAEITASKEGQKEKDTAGVTRSASSPRLSSSLDNKEKEKDSKGTRLAYVAPTIPRRLASTSDIEEKENRDSSSLRTSSSYTRRKWEDDLKKNSSVNEGSTYHKSCSFGRRQDDLISSSVPSTTSTPTVTSAAGLQKSLLSSTSTTTKITTGSSSAGTQSSTSNRLWAEDSTEKEKDSVPTAVTIPVAPTVVNAAASTTTLTTTTAGTVSSTTEVRERRRSYLTPVRDEESESQRKARSRQARQSRRSTQGVTLTDLQEAEKTIGRSRSTRTREQENEEKEKEEKEKQDKEKQEEKKESETSREDEYKQKYSRTYDETYQRYRPVSTSSSTTPSSSLSTMSSSLYASSQLNRPNSLVGITSAYSRGITKENEREGEKREEEKEGEDKSQPKSIRERRRPREKRRSTGVSFWTQDSDENEQEQQSDTEEGSNKKETQTDSISRYETSSTSAGDRYDSLLGRSGSYSYLEERKPYSSRLEKDDSTDFKKLYEQILAENEKLKAQLHDTNMELTDLKLQLEKATQRQERFADRSLLEMEKRERRALERRISEMEEELKMLPDLKADNQRLKDENGALIRVISKLSK

SEQ ID NO: 55601 - DNA, 2832 bp, Artificial Sequence
  derived and/or modified sequence
atggtgaagttcctagtcgaaaacggcgcgaatatcaaccagcccgataacgaaggatggattcctctgcacgccgccgcctcatgcgggtacctggacatcgcagagtttttaatcggacaaggcgctcatgtgggtgcagtgaacagcgagggagacaccccactcgatatagcagaggaagaagctatggaggagctgttgcagaatgaagttaatcggcagggcgttgatatcgaggccgctcgtaaagaagaagagcggattatgcttcgggatgcgagacagtggttgaactcgggacacatcaatgacgtgcggcacgctaaatccgggggcacggcattacacgtggccgctgcaaagggctataccgaggttcttaagttattgatccaggctggttatgacgtcaacattaaggattacgatggctggactcccctgcatgcagcggcgcactggggtaaggaagaagcgtgcaggatcctggtggacaacctttgtgacatggagatggtcaataaggtcggacagaccgccttcgacgtagctgacgaggatattctgggctatttggaagagctgcagaaaaagcagaatctgttgcactccgagaaaagggataagaagtcccctctgatagagtctacggcaaatatggacaacaatcagtcccagaagaccttcaaaaacaaggagactctgataatcgaaccggagaagaatgccagtcggattgagtctctagagcaagaaaaggttgatgaagaggaggagggcaagaaggatgagagtagctgttcctccgaggaggatgaagaggacgacagcgagtctgaggctgagacagacaagactaaaccattagcttccgttactaacgctaatacatctagcacgcaggccgctccagtggctgtgaccaccccgacagtgtcttcgggccaagcgacacctactagccccattaagaaattcccgaccacagccacaaagattagtccgaaggaagaggaacgaaaggatgaaagccccgcaacctggcgcctgggattgaggaaaacaggcagctatggagccttagccgaaattactgcatccaaggaaggtcagaaagagaaagatactgctggcgttactagatccgccagtagccccaggctgagtagtagcctggataataaagagaaggaaaaggattctaaagggacacgcttagcatatgtagctcccacaatcccccggcgcctcgcatccacctctgatatcgaagaaaaggagaatagggactccagcagcctgaggaccagtagtagttacaccagaagaaaatgggaggacgatctcaagaagaacagtagcgtgaacgagggaagcacttaccacaagtcatgcagctttgggcggcggcaggatgacctcatttccagtagcgttccatccactacgtcgacacccaccgtgacgtccgccgccggactgcagaaaagtttacttagttcaacatccaccactactaagattaccacagggagtagcagcgccggaactcagagttctaccagcaaccgcctctgggccgaagattctacggagaaggagaaagactctgttccaaccgccgtaacaatccctgttgctcctaccgtggtaaatgccgccgcttccaccaccacgctgacaaccactacggccggcactgtatcatctacgacagaagtgcgagagcgtcggcgctcttacttaaccccggtgcgggacgaggaaagcgagtctcagcgaaaagctaggtccagacaggcccgccagtctaggcggagtacgcagggggtgaccctgactgacctgcaggaagccgaaaaaaccattgggcgctctaggtcgacacgtactcgagagcaggagaatgaggagaaagagaaggaggagaaggagaaacaggataaggagaagcaggaagagaaaaaggagtcggaaacaagtcgggaggatgaatacaaacagaaatatagccgaacctacgacgaaacttaccagagatatcgtcctgtgtccacgtcaagcagtaccacccctagcagcagcctctctactatgtcatcttccctgtatgcctcatcgcaactgaaccgtccaaacagtctagtcgggatcacatctgcctatagtaggggcattacaaaagagaatgaaagagaaggggaaaaacgggaggaagaaaaagagggcgaagataaatctcaaccgaaaagtattagagagcgccgtaggccccgcgagaaaagacgatccacaggcgtctccttctggacccaagactcagatgagaacgaacaagaacagcagtctgataccgaggaggggtcaaacaagaaggagacccagacagattcaattagcaggtacgagacatcctcaacatctgccggagaccgctatgactcacttcttggccgatcgggtagttactcttatctggaagagagaaagccatattcttccaggctggagaaagacgactcaacagatttcaagaagttgtacgagcagatcctggccgaaaatgaaaaactcaaagcacaactgcacgacacgaacatggaactcaccgacctcaaactccagctagaaaaagcaacgcagcggcaggagagatttgccgatcgttccctcctggaaatggagaagagggagaggcgcgctctggaaaggcggatttcagagatggaggaggagctgaaaatgctcccggacctgaaggccgataaccagcgcctgaaggacgagaatggcgccctgattcgagtgatctccaaacttagtaaatag

SEQ ID NO: 55602 - DNA, 2832 bp, Artificial Sequence
  derived and/or modified sequence
atggtgaagttcctggtggagaatggagccaacatcaaccagcctgacaatgaaggctggatccccctgcatgctgctgccagctgtggctacctggacattgctgagttcctgattggccagggcgcccacgtgggcgctgtgaacagcgagggggacacccccctggacattgctgaggaggaggccatggaggagctgctgcagaatgaggtgaaccggcagggcgtggacattgaagctgccaggaaggaggaggagcgcatcatgctgagagatgcccggcagtggctgaacagcggccacatcaatgatgtgagacatgccaagagcggcggcacagccctgcacgtggccgccgccaagggctacacagaggtgctgaagctgctgatccaggccggctatgatgtgaacatcaaggactatgatggctggacccccctgcatgctgctgcccactggggcaaggaggaggcctgccgcatcctggtggacaacctgtgtgacatggagatggtgaacaaggtgggccagacagcctttgatgtggctgatgaggacatcctgggctacctggaggagctgcagaagaagcagaacctgctgcacagcgagaagagggacaagaagagccccctgattgagagcacagccaacatggacaacaaccagagccagaagaccttcaagaacaaggagaccctcatcatcgagcctgagaagaatgccagcagaattgagagcctggagcaggagaaggtggatgaggaggaggagggcaagaaggatgagagcagctgcagcagcgaggaggatgaagaagatgacagcgagagcgaggccgagacagacaagaccaagcccctggcctctgtgaccaatgccaacaccagcagcacccaggccgcccctgtggccgtgaccacccccaccgtgagcagcggccaggccacccccaccagccccatcaagaagttccccaccacagccaccaagatcagccccaaggaggaggagaggaaggatgagagccctgccacctggaggctgggcctgaggaagacaggcagctatggagccctggccgagatcacagccagcaaggagggccagaaggagaaggacacagctggggtgaccaggtctgccagcagcccccggctgagcagcagcctggacaacaaggagaaggagaaggacagcaagggcacccggctggcctacgtggcccccaccatcccccggcggctggccagcaccagtgacatcgaggagaaggagaacagagacagcagcagcctgcggaccagcagcagctacaccaggaggaagtgggaggatgacctgaagaagaacagctctgtgaatgaaggcagcacctaccacaagagctgcagctttggccggcggcaggatgacctgatcagcagctctgtgcccagcaccaccagcacccccaccgtgaccagcgctgctggcctgcagaagagcctgctgagcagcaccagcaccaccaccaagatcaccaccggcagcagcagcgctggcacccagagcagcaccagcaaccggctgtgggccgaggacagcacagagaaggagaaggacagcgtgcccacagctgtgaccatccctgtggcccccaccgtggtgaatgctgctgccagcaccaccaccctgaccaccaccacagctggcaccgtgagcagcaccacagaggtgcgggagaggagaagaagctacctgacccctgtgagagatgaggagagcgagagccagaggaaggcccggagccggcaggcccggcagagccgccgcagcacccagggcgtgaccctgacagacctgcaggaggccgagaagaccatcggccgcagccgcagcaccaggacccgggagcaggagaatgaggagaaggagaaggaggagaaggagaagcaggacaaggagaagcaggaggagaagaaggagagcgagaccagccgggaggatgagtacaagcagaagtacagcaggacctatgatgagacctaccagcgctacagacctgtgtccaccagcagcagcaccacccccagcagcagcctgagcaccatgagcagcagcctgtatgccagcagccagctgaaccggcccaacagcctggtgggcatcaccagcgcctacagccggggcatcaccaaggaaaatgaaagagaaggagagaagcgggaggaggagaaggagggggaggacaagagccagcccaagagcatccgggagaggagaagaccccgggagaagagaagaagcactggagtgtccttctggacccaggacagtgatgaaaatgagcaggagcagcagagcgacacagaggagggcagcaacaagaaggagacccagacagacagcatcagccgctatgagaccagcagcaccagcgctggggacagatatgacagcctgctgggccgcagcggcagctacagctacctggaggagaggaagccctacagcagccggctggagaaggatgacagcacagacttcaagaagctgtatgagcagatcctggctgaaaatgagaagctgaaggcccagctgcatgacaccaacatggagctgacagacctgaagctgcagctggagaaggccacccagaggcaggagagatttgctgacaggagcctgctggagatggagaagcgggagcggcgggccctggagcggcgcatcagcgagatggaggaggagctgaagatgctgcctgacctgaaggctgacaaccagaggctgaaggatgaaaatggagccctgatccgggtcatcagcaagctgagcaagtag

SEQ ID NO: 55603 - DNA, 2832 bp, Artificial Sequence
  derived and/or modified sequence
atggtgaagttcctggtggagaacggcgccaacatcaaccagcccgataacgaaggttggatcccgctccacgccgctgcctcatgtggttatttagacattgctgagtttctgattggtcaaggcgcccacgtgggagctgtgaatagcgagggggacactccgctcgatatcgcagaggaggaagccatggaggagttgttacagaacgaggttaaccgacagggagtcgacattgaggccgcaagaaaagaggaggagcggattatgctgagggatgccaggcagtggctgaatagcggccacatcaacgatgtccgccacgccaaaagcggcggtactgctctgcacgtggccgccgccaaggggtacacagaggttctgaagctgttgattcaggctgggtacgacgtcaacataaaagactacgatgggtggacccctctgcacgccgccgctcactggggaaaagaagaggcgtgtcggattctggtggataacttgtgtgacatggagatggtaaataaggtgggacagaccgcctttgatgtagccgatgaggatattctaggttacctcgaagaactgcaaaagaaacaaaacttactccactctgaaaaaagagataaaaagtctcccctgatcgagagcactgctaacatggacaacaatcagtcgcagaagacctttaaaaataaggaaaccttgattatcgagcctgagaagaacgcttcccgcattgaaagccttgaacaagagaaagttgatgaagaagaggagggaaagaaagacgaatcatcctgttcctcagaagaggatgaggaagatgacagtgaatcagaagctgaaaccgacaaaacgaagccactggcctccgtgacaaatgcaaacaccagcagcactcaggctgctccagtggcagtgaccactccaacagttagcagcggacaggcaacgcctacatctcccataaaaaagttccctacaactgcaaccaaaatttcacccaaagaggaagaaagaaaagatgagagcccagcgacctggcgcctggggctccggaaaacagggagttacggggctcttgccgagatcactgctagcaaagagggacagaaggagaaagatactgccggggtgactcgttcggcatccagccctcgactttccagcagcctggataataaggagaaggagaaggattctaaggggacccgcctggcttacgtcgccccgaccatcccccgcagactggccagcacatcggacatcgaggagaaagagaatcgagattcttcctcattgcgcactagcagcagttacaccagaaggaagtgggaagacgacctgaaaaaaaatagctccgtgaacgagggctccacgtatcataaatcttgcagctttggaagacgccaggacgacctcatctcatccagtgtgccatctacaacctctacacctaccgtgacctctgcagcaggtctccagaaatccttgctttccagcacatccaccaccacaaaaatcacaacaggctccagttctgcaggcacacagtcctccacctccaataggctctgggcagaggacagtacggagaaagagaaggacagtgtgccaactgcagtaactattcccgtcgctccaactgtggtgaacgccgccgcctccactacaactttgaccacgactaccgccgggacagttagctcaaccacagaggttcgcgaacggaggcgctcatacctcacaccggttcgtgacgaggaaagcgagtcacaacggaaagctaggtctcgccaagctaggcagtcgaggcgttcaacccaaggcgtgacccttaccgacctgcaagaagccgaaaagacgataggccgctctaggtccacgaggacaagagaacaggagaatgaagagaaagagaaagaagaaaaggagaagcaggataaagagaaacaggaggagaagaaggagagtgaaacatcaagagaggacgagtataaacagaagtactctaggacatatgacgagacataccagcgatacagacccgtttcaacctcaagtagtaccaccccctcttccagtttgagtaccatgtcttcaagtctctatgcgagcagccagctcaatcgccccaacagtctcgtgggcatcacctccgcatatagtcgcggcatcaccaaggaaaacgagagagaaggcgaaaaacgggaggaagagaaggagggggaggacaagagtcaaccaaaatctattcgggagcgccgcagacccagagaaaagcgacgttccacgggcgtaagcttttggacacaggatagtgacgagaacgagcaagagcagcagtcagataccgaagaagggtctaacaaaaaggagacccagacagacagcattagcagatacgaaacatcatcaacctcagcaggcgatcgttatgattccctcctcggaagatccggaagttacagctatcttgaggaacggaagccctatagctccaggctcgaaaaggatgactccaccgacttcaagaaattgtatgagcagatattggctgaaaatgaaaagcttaaggcacagctgcacgacacgaacatggaactgaccgacctgaagcttcaactggaaaaggcaactcagagacaggaacggtttgccgataggtctctgcttgagatggaaaagcgtgagcggagggccctggagaggcgcatcagtgagatggaggaggagttaaaaatgctacccgatctgaaggccgacaaccagcggctcaaagatgagaatggagcactcattcgggtgattagtaagctgagcaagtag

SEQ ID NO: 55604 - DNA, 2832 bp, Artificial Sequence
  derived and/or modified sequence
atggtcaagttcctcgtagagaatggggcaaacattaaccagccagataacgagggctggattcccctgcacgctgcagccagttgtgggtatctcgatatcgcagagttcttgatcggccaaggggcacacgtcggggctgttaactccgagggggatacacctctcgatattgcggaagaggaggccatggaagagttgctgcagaacgaggttaatcgacagggggtggatatcgaggccgcacgaaaagaggaagagaggataatgctcagggacgctaggcagtggcttaattccggacatatcaatgatgtcaggcacgctaaatctgggggtaccgcccttcacgtagccgcagctaaggggtatactgaggttctgaagctcttaatccaggcaggatacgacgtgaacataaaggattacgacggttggacacccttacatgctgccgctcactggggtaaggaagaggcatgccgaattctcgttgataacctgtgtgacatggaaatggtaaataaggttggtcaaacagctttcgacgtcgctgatgaagacattctgggctacctggaggaacttcagaagaagcagaatctcctgcattctgaaaaacgcgataagaagtctccgctcattgagagcacagccaacatggacaataatcagtcacaaaaaacattcaaaaacaaggaaaccctgatcattgagccagagaagaatgcctctcggatcgaatccttagagcaggagaaggtggacgaagaagaagagggcaagaaggatgagagcagttgcagcagcgaggaggatgaggaggatgacagcgaaagtgaagcagagacagataaaactaaacccctcgcgtctgttaccaatgctaacacttcaagcactcaggccgctcccgttgcggtcaccaccccgacggtcagtagtgggcaggcgaccccaactagccctattaagaaatttccgactaccgctacaaagattagcccaaaggaggaagagcggaaagatgaaagccccgcaacttggcggctgggcttgaggaaaacagggtcctacggcgctctggctgaaatcactgccagcaaggagggacagaaggaaaaagacaccgccggagtcactaggagcgcttcatcgccacgcctgagtagcagcttggataacaaggagaaggaaaaagacagcaagggaacacgcttagcctacgttgccccaactatcccacggagactggccagcacgtccgatattgaggaaaaagagaatagggattcctcatccctgagaacatcctctagttacaccaggcggaagtgggaggatgatctgaaaaagaattcctccgttaatgaagggagcacttatcataaaagctgcagctttgggcgtaggcaggacgacctcatcagctccagcgtcccctctactacctcaacaccaacggtgacatcggccgcaggattgcagaagagcctcttaagttccacaagcactaccacaaagatcactaccgggagcagcagcgccggaactcagagctctactagtaatcgcctctgggccgaggattctacagaaaaggaaaaggacagtgtgcccacagccgtgaccattcccgtggcaccaacggtggtaaacgcagcagctagcacgacaacacttaccactactaccgccggaaccgtctcttccacgaccgaggttcgggaacggcgacggagctatttaacacctgtacgggacgaagaatccgagtctcagcgtaaggccaggtcgaggcaggctcgtcagagtcgacgtagcactcagggcgttacactaaccgatctgcaagaagccgagaagacaattgggagatcacggtcaactcgcactcgtgaacaggaaaacgaagagaaggagaaagaggaaaaggaaaagcaggataaggagaaacaggaagagaaaaaagaatcggaaacaagccgggaggacgagtacaagcagaaatactcccgtacctacgacgaaacgtatcagagatacagaccagtaagtacaagttcctcaactactccttctagcagtctgtcaacaatgagctccagcctgtacgcaagctcacagttgaatagacctaatagcctagtgggcatcacatccgcttactcacggggtattaccaaggagaatgagcgagagggagagaaaagagaggaggagaaagaaggagaggacaaatcacagccaaaatccatccgagagaggcgcagaccaagggaaaagcgaaggtcaaccggcgtgtctttttggactcaagattctgatgagaatgaacaggagcagcaatctgacacagaagaggggtcgaataaaaaggaaacgcaaacagatagtattagccgttacgagaccagtagtacaagtgcaggcgatagatacgactccctgttggggcgatcgggatcctactcctacctggaagaaagaaagccatactcctctcgactggagaaggatgattcaacagatttcaaaaagctatacgaacagattttggctgagaacgaaaaactgaaggcccagttacatgacacaaacatggaattgactgacctcaagcttcagcttgaaaaagctacccagcgtcaagaaaggtttgcggaccgctctctcttagagatggagaaacgagaaaggagggcgctagagagaagaatcagtgagatggaagaagaattaaagatgttaccagatcttaaagccgacaatcagcgacttaaggatgaaaacggggcacttatcagggtaattagcaagctgtccaagtag

SEQ ID NO: 55605 - DNA, 2832 bp, Artificial Sequence
  derived and/or modified sequence
atggtgaagttcctggtggagaacggcgccaacatcaaccagcccgacaacgagggctggatccccctgcacgccgccgccagctgcggctacctggacatcgccgagttcctgatcggccagggcgcccacgtgggcgccgtgaacagcgagggcgacacccccctggacatcgccgaggaggaggccatggaggagctgctgcagaacgaggtgaacagacagggcgtggacatcgaggccgccagaaaggaggaggagagaatcatgctgagagacgccagacagtggctgaacagcggccacatcaacgacgtgagacacgccaagagcggcggcaccgccctgcacgtggccgccgccaagggctacaccgaggtgctgaagctgctgatccaggccggctacgacgtgaacatcaaggactacgacggctggacccccctgcacgccgccgcccactggggcaaggaggaggcctgcagaatcctggtggacaacctgtgcgacatggagatggtgaacaaggtgggccagaccgccttcgacgtggccgacgaggacatcctgggctacctggaggagctgcagaagaagcagaacctgctgcacagcgagaagagagacaagaagagccccctgatcgagagcaccgccaacatggacaacaaccagagccagaagaccttcaagaacaaggagaccctgatcatcgagcccgagaagaacgccagcagaatcgagagcctggagcaggagaaggtggacgaggaggaggagggcaagaaggacgagagcagctgcagcagcgaggaggacgaggaggacgacagcgagagcgaggccgagaccgacaagaccaagcccctggccagcgtgaccaacgccaacaccagcagcacccaggccgcccccgtggccgtgaccacccccaccgtgagcagcggccaggccacccccaccagccccatcaagaagttccccaccaccgccaccaagatcagccccaaggaggaggagagaaaggacgagagccccgccacctggagactgggcctgagaaagaccggcagctacggcgccctggccgagatcaccgccagcaaggagggccagaaggagaaggacaccgccggcgtgaccagaagcgccagcagccccagactgagcagcagcctggacaacaaggagaaggagaaggacagcaagggcaccagactggcctacgtggcccccaccatccccagaagactggccagcaccagcgacatcgaggagaaggagaacagagacagcagcagcctgagaaccagcagcagctacaccagaagaaagtgggaggacgacctgaagaagaacagcagcgtgaacgagggcagcacctaccacaagagctgcagcttcggcagaagacaggacgacctgatcagcagcagcgtgcccagcaccaccagcacccccaccgtgaccagcgccgccggcctgcagaagagcctgctgagcagcaccagcaccaccaccaagatcaccaccggcagcagcagcgccggcacccagagcagcaccagcaacagactgtgggccgaggacagcaccgagaaggagaaggacagcgtgcccaccgccgtgaccatccccgtggcccccaccgtggtgaacgccgccgccagcaccaccaccctgaccaccaccaccgccggcaccgtgagcagcaccaccgaggtgagagagagaagaagaagctacctgacccccgtgagagacgaggagagcgagagccagagaaaggccagaagcagacaggccagacagagcagaagaagcacccagggcgtgaccctgaccgacctgcaggaggccgagaagaccatcggcagaagcagaagcaccagaaccagagagcaggagaacgaggagaaggagaaggaggagaaggagaagcaggacaaggagaagcaggaggagaagaaggagagcgagaccagcagagaggacgagtacaagcagaagtacagcagaacctacgacgagacctaccagagatacagacccgtgagcaccagcagcagcaccacccccagcagcagcctgagcaccatgagcagcagcctgtacgccagcagccagctgaacagacccaacagcctggtgggcatcaccagcgcctacagcagaggcatcaccaaggagaacgagagagagggcgagaagagagaggaggagaaggagggcgaggacaagagccagcccaagagcatcagagagagaagaagacccagagagaagagaagaagcaccggcgtgagcttctggacccaggacagcgacgagaacgagcaggagcagcagagcgacaccgaggagggcagcaacaagaaggagacccagaccgacagcatcagcagatacgagaccagcagcaccagcgccggcgacagatacgacagcctgctgggcagaagcggcagctacagctacctggaggagagaaagccctacagcagcagactggagaaggacgacagcaccgacttcaagaagctgtacgagcagatcctggccgagaacgagaagctgaaggcccagctgcacgacaccaacatggagctgaccgacctgaagctgcagctggagaaggccacccagagacaggagagattcgccgacagaagcctgctggagatggagaagagagagagaagagccctggagagaagaatcagcgagatggaggaggagctgaagatgctgcccgacctgaaggccgacaaccagagactgaaggacgagaacggcgccctgatcagagtgatcagcaagctgagcaagtag

SEQ ID NO: 55606 - protein, 450 aa, Artificial Sequence
  derived and/or modified sequence
MSDMEDDFMCDDEEDYDLEYSEDSNSEPNVDLENQYYNSKALKEDDPKAALSSFQKVLELEGEKGEWGFKALKQMIKINFKLTNFPEMMNRYKQLLTYIRSAVTRNYSEKSINSILDYISTSKQNSDFLCQMDLLQEFYETTLEALKDAKNDRLWFKTNTKLGKLYLEREEYGKLQKILRQLHQSCQTDDGEDDLKKGTQLLEIYALEIQMYTAQKNNKKLKALYEQSLHIKSAIPHPLIMGVIRECGGKMHLREGEFEKAHTDFFEAFKNYDESGSPRRTTCLKYLVLANMLMKSGINPFDSQEAKPYKNDPEILAMTNLVSAYQNNDITEFEKILKTNHSNIMDDPFIREHIEELLRNIRTQVLIKLIKPYTRIHIPFISKELNIDVADVESLLVQCILDNTIHGRIDQVNQLLELDHQKRGGARYTALDKWTNQLNSLNQAVVSKLA

SEQ ID NO: 55607 - DNA, 1353 bp, Artificial Sequence
  derived and/or modified sequence
atgtctgatatggaggacgattttatgtgtgatgacgaagaagattacgacctcgagtactcagaagattccaactctgagcctaacgttgatttggaaaatcagtattataattcaaaggccctgaaagaagacgatcctaaggctgccctgtcttctttccaaaaagtattggagctcgagggcgaaaaaggggaatgggggttcaaagcactgaagcaaatgatcaagattaacttcaagctcacaaatttccctgaaatgatgaaccgctataagcagctattaacctacatccgctctgctgtgacgcgcaactattccgaaaaaagcatcaactccatcctcgattacatatcgacgagtaaacagaactcagactttctgtgccaaatggatctcctgcaagaattctacgaaaccacgctcgaggccctaaaagatgcgaagaacgaccggttgtggttcaagaccaacaccaaactgggcaagttatatctcgagcgtgaagaatatgggaagctccagaagattctccgccagcttcaccaaagctgtcagactgacgatggcgaggatgatctcaagaagggcacacagctgctggagatttacgcactggagatacaaatgtatacagctcaaaagaataacaaaaaactgaaggcactctatgaacagagtctgcatattaagagcgctattccgcaccctctgatcatgggagtgatccgagagtgtggcggcaaaatgcacttgcgcgagggcgagtttgagaaggcacacacagacttctttgaagctttcaagaattacgatgagagcggttcgcctaggagaaccacatgtcttaagtatctggtgttagctaacatgcttatgaagagtggtatcaaccctttcgattctcaagaggccaagccttacaaaaacgatccagaaattctcgctatgaccaatcttgtttccgcttaccagaacaacgatatcaccgagttcgagaagattcttaaaactaaccattcaaacattatggacgacccattcatcagggagcatattgaggagctcctcaggaacatacgcactcaagttttgataaaactgattaaaccctacaccagaatacacatcccctttatatcaaaggaactaaacatagatgttgcagacgtggagagcctgctcgttcagtgcatattagacaatacaatccacggacggattgaccaggtgaaccagctgctggaactcgatcatcagaaacggggtggtgctcgctacactgcgctggataagtggacaaaccagctcaacagcttgaatcaggcggttgtgtccaagcttgcatag

SEQ ID NO: 55608 - DNA, 1353 bp, Artificial Sequence
  derived and/or modified sequence
atgtctgacatggaggatgacttcatgtgtgatgatgaggaggactatgacctggagtacagcgaggacagcaacagcgagcccaacgtggacctggagaaccagtactacaacagcaaggccctgaaggaggatgaccccaaggccgccctgagcagcttccagaaggtgctggagctggagggggagaagggggagtggggcttcaaggccctgaagcagatgatcaagatcaacttcaagctgaccaacttccctgagatgatgaaccgctacaagcagctgctgacctacatccgctctgctgtgaccaggaactacagcgagaagagcatcaacagcatcctggactacatcagcaccagcaagcagaacagcgacttcctgtgccagatggacctgctgcaggagttctatgagaccaccctggaggccctgaaggatgccaagaatgaccggctgtggttcaagaccaacaccaagctgggcaagctgtacctggagcgggaggagtatggcaagctgcagaagatcctgcggcagctgcaccagagctgccagacagatgatggagaagatgacctgaagaagggcacccagctgctggagatctatgccctggagatccagatgtacacagcccagaagaacaacaagaagctgaaggccctgtatgagcagagcctgcacatcaagagcgccatcccccaccccctcatcatgggcgtcatccgggagtgtggcggcaagatgcacctgcgggagggggagtttgagaaggcccacacagacttctttgaggccttcaagaactatgatgaaagtggcagccccaggaggaccacctgcctgaagtacctggtgctggccaacatgctgatgaagagcggcatcaacccctttgacagccaggaggccaagccctacaagaatgaccctgagatcctggccatgaccaacctggtgtctgcctaccagaacaatgacatcacagaatttgagaagatcctgaagaccaaccacagcaacatcatggatgaccccttcatccgggagcacatcgaggagctgctgaggaacatccgcacccaggtgctgatcaagctgatcaagccctacacccgcatccacatccccttcatcagcaaggagctgaacattgatgtggctgatgtggagagcctgctggtgcagtgcatcctggacaacaccatccacggcagaattgaccaggtgaaccagctgctggagctggaccaccagaagaggggcggggcccgctacacagccctggacaagtggaccaaccagctgaacagcctgaaccaggccgtggtgtccaagctggcctag

SEQ ID NO: 55609 - DNA, 1353 bp, Artificial Sequence
  derived and/or modified sequence
atgagcgacatggaggacgacttcatgtgcgacgacgaggaggactacgacctggaatattctgaggacagcaacagcgaacctaatgtagacctggagaaccaatattataacagtaaggcgttaaaagaggacgaccccaaagctgcactgtcttcatttcaaaaggtgctcgaactggagggcgagaagggtgaatggggcttcaaggccttgaaacaaatgataaagattaacttcaagctaaccaactttcccgagatgatgaatcggtacaagcagttgctaacttacatccgtagtgccgttacaagaaactattccgagaaaagtattaatagtatcctggactacattagcacttctaagcaaaattcggacttcctgtgccagatggatctgctccaggagttctacgagacaacactcgaggccttgaaagacgcgaagaatgacagactttggttcaaaacgaacacaaagttaggaaagctatatcttgagcgcgaagagtatggcaaactccaaaaaatcctcagacaactgcaccagtcttgccaaaccgacgatggcgaggatgatcttaagaaaggtactcaactcttagagatatatgccttggagatacagatgtacaccgcccagaagaataataaaaaattgaaggctctgtatgaacagtcccttcacattaagtctgccattcctcatccactgatcatgggtgtaattcgggaatgcggtgggaagatgcacctgcgagagggcgagttcgagaaagcacacacggattttttcgaagcctttaaaaactatgacgaatctggctctccaagaagaacgacttgcttgaagtacctggtgttggccaacatgcttatgaaatctggcattaacccctttgactctcaggaggctaagccttacaagaacgatccggagatcctcgccatgaccaatctcgtctccgcctatcagaacaacgacataactgaatttgagaagattctaaaaaccaatcactcaaacatcatggatgacccattcatcagagagcacatcgaagagcttctccggaatatccgaacccaggtcctgattaagcttattaagccatacacgagaatccatataccgttcatctcaaaagagctgaacatagacgtagcggatgtggagtctttgctcgtgcagtgcatcctagacaacactatccatggaaggatcgatcaggttaaccagcttctggaattggaccaccagaagaggggcggggctagatatactgcacttgacaaatggaccaaccagctaaattcacttaaccaggccgtagtgtctaagctagcctag

SEQ ID NO: 55610 - DNA, 1353 bp, Artificial Sequence
  derived and/or modified sequence
atgtccgatatggaagatgacttcatgtgtgacgacgaggaggattatgatttagaatacagcgaggattctaacagtgaacccaacgtcgacctggagaaccaatactacaactccaaagctcttaaagaggacgaccccaaggccgcactgagcagtttccagaaagtgctggagctcgagggcgagaagggtgagtggggcttcaaagcacttaagcagatgataaagattaattttaaactgaccaattttcctgaaatgatgaaccgctataagcaactgctgacttatatcagaagtgcagttacccggaactattccgagaaatccatcaacagtatccttgattacatttcaacatcaaagcagaattctgattttctgtgtcagatggacctcctgcaggagttctacgaaactaccctggaagccctcaaagatgctaagaacgaccgtctgtggtttaaaaccaacaccaagttagggaaactgtaccttgaacgggaagaatacggaaaattgcaaaagattctacgacagttacaccagagctgccagaccgacgacggagaggatgatctgaaaaagggtacccagctgctcgaaatctatgccctcgagattcaaatgtacaccgcacagaagaataacaagaagctgaaggccttgtacgagcagagcctacacataaaatcggccatccctcacccgctcatcatgggggtcatacgtgaatgcgggggaaaaatgcacctgcgggagggcgaattcgagaaagctcacaccgacttctttgaagcattcaaaaattatgacgagagcggatcacctagacggaccacctgtctgaagtacttagtacttgccaacatgctgatgaagtcagggatcaatcctttcgactctcaggaggccaaaccctataagaatgatccggaaatcctggcgatgacaaatttggtgagcgcttatcagaataacgatattactgagttcgagaaaattctgaagactaaccactctaacatcatggatgacccattcattagagagcacatcgaggagctcctacgaaacattagaacgcaggttctcatcaagctaattaagccctacacacgcattcacataccctttattagcaaagagctaaatatcgatgtggccgacgtcgaatctctgctcgtacagtgcattctggacaataccatccacggtcgaattgatcaagtcaatcagcttttggaactcgaccaccagaaaagggggggagcccgatataccgctttagacaaatggactaaccagttaaatagtttgaaccaagctgtggtctctaagctagcctag

SEQ ID NO: 55611 - DNA, 2036 bp, Artificial Sequence
  derived and/or modified sequence
aagaagctgagagtgacgcctctgagccgcggaggattgtgggaggaggttgtctccaatttctcctccccctcccggccaagatgtctgacatggaggatgatttcatgtgcgatgatgaggaggactacgacctggaatactctgaagatagtaactccgagccaaatgtggatttggaaaatcagtactataattccaaagcattaaaagaagatgacccaaaagcggcattaagcagtttccaaaaggttttggaacttgaaggtgaaaaaggagaatggggatttaaagcactgaaacaaatgattaagattaacttcaagttgacaaactttccagaaatgatgaatagatataagcagctattgacctatattcggagtgcagtcacaagaaattattctgaaaaatccattaattctattcttgattatatctctacttctaaacagaattctgattttttatgtcagatggatttactgcaggaattctatgaaacaacactggaagctttgaaagatgctaagaatgatagactgtggtttaagacaaacacaaagcttggaaaattatatttagaacgagaggaatatggaaagcttcaaaaaattttacgccagttacatcagtcgtgccagactgatgatggagaagatgatctgaaaaaaggtacacagttattagaaatatatgctttggaaattcaaatgtacacagcacagaaaaataacaaaaaacttaaagcactctatgaacagtcacttcacatcaagtctgccatccctcatccactgattatgggagttatcagagaatgtggtggtaaaatgcacttgagggaaggtgaatttgaaaaggcacacactgatttttttgaagccttcaagaattatgatgaatctggaagtccaagacgaaccacttgcttaaaatatttggtcttagcaaatatgcttatgaaatcgggaataaatccatttgactcacaggaggccaagccgtacaaaaatgatccagaaattttagcaatgacgaatttagtaagtgcctatcagaataatgacatcactgaatttgaaaagattctaaaaacaaatcacagcaacatcatggatgatcctttcataagagaacacattgaagagcttttgcgaaacatcagaacacaagtgcttataaaattaattaagccttacacaagaatacatattccttttatttctaaggagttaaacatagatgtagctgatgtggagagcttgctggtgcagtgcatattggataacactattcatggccgaattgatcaagtcaaccaactccttgaactggatcatcagaagaggggtggtgcacgatatactgcactagataaatggaccaaccaactaaattctctcaaccaggctgtagtcagtaaactggcttaacagagaacaagcttttacagacgtccttaaggcaacagtgcagagatgtaatccttaaaagaactgggaatggcaaaactactgtcggttgatgtgtcctgaaaattattggagttatggcagaagtgcttttttgatcaactggtttgtgttttgctgctgcatttatcccaagaaaaacagctttaatctccagaagaaaaccaaaataccatgggatttatgctgtattgacatcttgccctaaacgtacaacatcatagtaatttgtcatgggcaacatgaccagagagaagatttttgtcatgattttaaatacactgacacgctactgttggttaaatttaaacatgttttacctgcagaaattctctcacaaataacctgcaataacttgaaatgcatacccttttgaacacttccttttctcatgtataaattaaaatgtttgctgcattttgcaaaatgtcaattctctaaaaatgtgtccgtatatttctgtacctgcagtgtagtaaaggtttagacgaaaccccataattatagtggcatactgtcacttaggtttcaagcagcaaaataaacagtgcagctcagaaa

SEQ ID NO: 55612 - DNA, 1353 bp, Artificial Sequence
  derived and/or modified sequence
atgagcgacatggaggacgacttcatgtgcgacgacgaggaggactacgacctggagtacagcgaggacagcaacagcgagcccaacgtggacctggagaaccagtactacaacagcaaggccctgaaggaggacgaccccaaggccgccctgagcagcttccagaaggtgctggagctggagggcgagaagggcgagtggggcttcaaggccctgaagcagatgatcaagatcaacttcaagctgaccaacttccccgagatgatgaacagatacaagcagctgctgacctacatcagaagcgccgtgaccagaaactacagcgagaagagcatcaacagcatcctggactacatcagcaccagcaagcagaacagcgacttcctgtgccagatggacctgctgcaggagttctacgagaccaccctggaggccctgaaggacgccaagaacgacagactgtggttcaagaccaacaccaagctgggcaagctgtacctggagagagaggagtacggcaagctgcagaagatcctgagacagctgcaccagagctgccagaccgacgacggcgaggacgacctgaagaagggcacccagctgctggagatctacgccctggagatccagatgtacaccgcccagaagaacaacaagaagctgaaggccctgtacgagcagagcctgcacatcaagagcgccatcccccaccccctgatcatgggcgtgatcagagagtgcggcggcaagatgcacctgagagagggcgagttcgagaaggcccacaccgacttcttcgaggccttcaagaactacgacgagagcggcagccccagaagaaccacctgcctgaagtacctggtgctggccaacatgctgatgaagagcggcatcaaccccttcgacagccaggaggccaagccctacaagaacgaccccgagatcctggccatgaccaacctggtgagcgcctaccagaacaacgacatcaccgagttcgagaagatcctgaagaccaaccacagcaacatcatggacgaccccttcatcagagagcacatcgaggagctgctgagaaacatcagaacccaggtgctgatcaagctgatcaagccctacaccagaatccacatccccttcatcagcaaggagctgaacatcgacgtggccgacgtggagagcctgctggtgcagtgcatcctggacaacaccatccacggcagaatcgaccaggtgaaccagctgctggagctggaccaccagaagagaggcggcgccagatacaccgccctggacaagtggaccaaccagctgaacagcctgaaccaggccgtggtgagcaagctggcctag

SEQ ID NO: 55613 - protein, 352 aa, Artificial Sequence
  derived and/or modified sequence
MNTTSSAAPPSLGVEFISLLAIILLSVALAVGLPGNSFVVWSILKRMQKRSVTALMVLNLALADLAVLLTAPFFLHFLAQGTWSFGLAGCRLCHYVCGVSMYASVLLITAMSLDRSLAVARPFVSQKLRTKAMARRVLAGIWVLSFLLATPVLAYRTVVPWKTNMSLCFPRYPSEGHRAFHLIFEAVTGFLLPFLAVVASYSDIGRRLQARRFRRSRRTGRLVVLIILTFAAFWLPYHVVNLAEAGRALAGQAAGLGLVGKRLSLARNVLIALAFLSSSVNPVLYACAGGGLLRSAGVGFVAKLLEGTGSEASSTRRGGSLGQTARSGPAALEPGPSESLTASSPLKLNELN

SEQ ID NO: 55614 - protein, 102 aa, Artificial Sequence
  derived and/or modified sequence
MNTTSSAAPPSLGVEFISLLAIILLSVALAVGLPGNSFVVWSILKRMQKRSVTALMVLNLALADLAVLLTAPFFLHFLAQGTWSFGLAGCRLCHYVCGVSMY

SEQ ID NO: 55615 - DNA, 1059 bp, Artificial Sequence
  derived and/or modified sequence
atgaatactacatcgagtgctgctccacctagtcttggcgtcgaattcatcagtcttctcgctatcatactcttatccgtagcactggcggttggcttacctggtaattccttcgttgtgtggtcaatcctgaagcgcatgcagaagcggtcagtcaccgcactcatggttttaaacctggccctcgccgatctcgcggttctcctgacagctccattcttccttcatttcttggcgcagggtacttggagctttggtcttgccggatgtagattgtgtcattacgtgtgcggcgtgagtatgtatgctagtgtgttgctgatcaccgctatgagcctcgaccggagcttagctgttgcccgccctttcgtttctcaaaagctgagaactaaggccatggcccggcgggtgctggccggaatctgggttttatcatttttgttggcaacccctgtcctagcctacagaactgtggtgccttggaagactaatatgtccctatgttttcctcggtacccttcagagggccaccgcgccttccatttgatctttgaggccgtcactggattcctgctacccttcctggcggtagtggcatcttactcagatattggcagacgtctgcaagcgagaagatttcgacgaagccgacggaccggacggctggttgtgttgatcatcctcaccttcgctgccttctggctcccttatcacgttgtgaacctagctgaggctggtcgggcattggccggtcaggccgccgggctgggtctggtaggcaagaggctctcattggctagaaatgtgctcattgccctggcctttctgtcctcttcagtgaatcctgtcctgtacgcctgtgctggcggcggcctgctgcgcagcgcaggcgtcggatttgtcgccaaactgctggagggaaccggctcagaagcttcctcaactcgtagaggaggttccctcggccagaccgcacgcagtggtcctgccgctttagaacccggcccaagtgaatctctaaccgcatcatccccactgaagctgaacgaactgaattag

SEQ ID NO: 55616 - DNA, 1059 bp, Artificial Sequence
  derived and/or modified sequence
atgaacaccacatcttcagctgctcccccatcgctgggggtggagttcatcagcctcctggcgataatccttctgtccgttgccctagccgtcggtcttccggggaatagctttgtggtctggtccatccttaagagaatgcagaagagatccgttactgcactaatggtgttgaacctagccttagctgacctggcagtcctcctgaccgcacctttcttcctgcacttcctcgcccaggggacatggtccttcggcctggctggctgcagattgtgccactatgtgtgcggtgtgagcatgtacgccagcgtgctcctgatcactgcaatgtccctcgacaggtctctggccgtcgctaggccatttgtgagtcaaaaactccggactaaggcgatggcacgtagggttctcgccggcatctgggtattatcattcctgttggccactccagtcctggcataccgcaccgtggttccatggaaaaccaatatgtcactctgcttcccccgctatccgtcagagggccaccgcgcttttcacttgatctttgaggcagtaaccggttttctgctcccatttctggctgttgtggcctcatattccgatattgggaggcggcttcaagcaagaaggttccgacggtcccggcgtaccggtcgcctcgtagtcctgatcattctaactttcgccgccttctggctgccatatcacgtcgtgaacctagcagaggcagggcgtgcattggcggggcaggccgccggccttggcctggtggggaaacgccttagtctggcaaggaatgtacttatcgctctggcattcctgagttccagcgtgaacccggtgctatacgcatgcgctggcggggggctcctcaggtctgcaggcgtggggtttgttgctaagctactggaagggacaggcagtgaagcttcttccactagaagagggggtagcctaggccagacagcccggtctggcccagcagctctcgagccggggccttccgaaagtctgaccgcatcgtcaccactcaagctcaacgagctgaactag

SEQ ID NO: 55617 - DNA, 1059 bp, Artificial Sequence
  derived and/or modified sequence
atgaacactacaagctccgcagctcccccatccctgggcgtggaattcattagtttgctagccattatcctgctaagcgtcgcattggccgttggcctgccgggcaattctttcgttgtttggtcaattttgaagagaatgcaaaagcggtccgtgacggcactcatggtcctaaacttagcccttgccgaccttgccgtcctgctcaccgcccccttcttcctgcacttcttggcgcagggtacctggagctttggcttggccggatgtcgcttatgccattatgtgtgcggcgtttccatgtacgcatcagtcttactaatcacagctatgagtctggataggtccttggcagtggcaaggccctttgtttcacagaaactccggacgaaggcaatggctcgccgggtccttgcaggcatctgggtgttatccttcctgttagcgaccccagttctggcctacaggactgtagtcccttggaaaaccaacatgtctttgtgttttccacggtacccctcagagggacatcgtgcctttcatcttattttcgaggccgtcacaggcttcctattacccttcttggctgtggtcgcgagctactccgatattgggcggaggttgcaggcaagacgcttccggagatcacggagaacagggcgcttagtcgtgctgattattctgacattcgctgctttttggctcccatatcacgtggttaatctggccgaagctggtagggctctggccggccaagccgccggactggggcttgtgggcaaacgtctgagccttgcacgtaacgtcttaatcgcactagcattcttgagcagctcggtcaaccccgtgctgtatgcttgtgcaggcggaggactgctacgctctgcaggagtgggcttcgtggcgaagttgctggaaggaacaggcagcgaagccagcagcacaagaagaggtgggagcctcggccaaactgccagatcaggccccgcggccctcgagcccgggccctcggagagccttactgcttccagtccactgaagctgaacgagctgaactag

SEQ ID NO: 55618 - DNA, 309 bp, Artificial Sequence
  derived and/or modified sequence
atgaatactacctctagcgccgcacctccatccctgggggtcgagtttatatcactgctggccatcattctgttatctgtggccctagctgtcggactcccaggcaactccttcgtggtctggagtatcctgaagcgcatgcagaagagatccgtgacagctcttatggttctaaatctcgctttggccgacctagccgtcctcctgacggcaccattctttttacacttcctcgcccagggcacctggtcattcggactggccggttgccgcctctgccattacgtctgcggagtgagcatgtactag

SEQ ID NO: 55619 - DNA, 1059 bp, Artificial Sequence
  derived and/or modified sequence
atgaacaccaccagcagcgctgccccacccagcctgggcgtggagttcatcagcctgctggccatcatcctgctgtctgtggccctggccgtgggcctgcccggcaacagctttgtggtgtggagcatcctgaagaggatgcagaagaggtctgtgacagccctgatggtgctgaacctggccctggccgacctggccgtgctgctgacagcccccttcttcctgcacttcctggcccagggcacctggagctttggcctggccggctgccgcctgtgccactacgtgtgtggggtgtccatgtatgcctctgtgctgctgatcacagccatgagcctggacaggagcctggccgtggcccggccctttgtgtcccagaagctgcggaccaaggccatggccaggagagtgctggccggcatctgggtgctgtccttcctgctggccacccctgtgctggcctacagaacagtggtgccctggaagaccaacatgagcctgtgcttcccccgctaccccagcgagggccaccgggccttccacctgatctttgaggccgtgacaggcttcctgctgcccttcctggccgtggtggccagctacagcgacatcggccggcggctgcaggcccggcgcttccgccgcagcagaagaacaggccgcctggtggtgctgatcatcctgacctttgctgccttctggctgccctaccacgtggtgaacctggccgaggccggccgggccctggccggccaggccgccggcctgggcctggtgggcaagaggctgagcctggccagaaatgtgctgattgccctggccttcctgagcagctctgtgaaccctgtgctgtatgcctgtgccggcggcggcctgctgcggtctgctggggtgggctttgtggccaagctgctggagggcaccggcagcgaggccagcagcacccggcggggcggcagcctgggccagacagcccggagcggccctgctgccctggagcccggccccagcgagagcctgacagccagcagccccctgaagctgaatgagctgaactag

SEQ ID NO: 55620 - DNA, 309 bp, Artificial Sequence
  derived and/or modified sequence
atgaacaccaccagcagcgctgccccacccagcctgggcgtggagttcatcagcctgctggccatcatcctgctgtctgtggccctggccgtgggcctgcccggcaacagctttgtggtgtggagcatcctgaagaggatgcagaagaggtctgtgacagccctgatggtgctgaacctggccctggccgacctggccgtgctgctgacagcccccttcttcctgcacttcctggcccagggcacctggagctttggcctggccggctgccgcctgtgccactacgtgtgtggggtgtccatgtactag

SEQ ID NO: 55621 - DNA, 1616 bp, Artificial Sequence
  derived and/or modified sequence
ttcagttctagcgtcaacccggtgctctacgtcttcaccgctggagatctgctgccccgggcaggtccccgtttcctcacgcggctcttcgaaggctctggggaggcccgagggggcggccgctctagggaagggaccatggagctccgaactacccctcagctgaaagtggtggggcagggccgcggcaatggagacccggggggtgggatggagaaggacggtccggaatgggacctttgacagcagaccctacaacctgctgcccttccctgtccctttccaccccccacccaccctccagaggtcctcccgacggccatgaacactacatcttctgcagcacccccctcactaggtgtagagttcatctctctgctggctatcatcctgctgtcagtggcgctggctgtggggcttcccggcaacagctttgtggtgtggagtatcctgaaaaggatgcagaagcgctctgtcactgccctgatggtgctgaacctggccctggccgacctggccgtattgctcactgctccctttttccttcacttcctggcccaaggcacctggagttttggactggctggttgccgcctgtgtcactatgtctgcggagtcagcatgtacgccagcgtcctgcttatcacggccatgagtctagaccgctcactggcggtggcccgcccctttgtgtcccagaagctacgcaccaaggcgatggcccggcgggtgctggcaggcatctgggtgttgtcctttctgctggccacacccgtcctcgcgtaccgcacagtagtgccctggaaaacgaacatgagcctgtgcttcccgcggtaccccagcgaagggcaccgggccttccatctaatcttcgaggctgtcacgggcttcctgctgcccttcctggctgtggtggccagctactcggacatagggcgtcggctacaggcccggcgcttccgccgcagccgccgcaccggccgcctggtggtgctcatcatcctgaccttcgccgccttctggctgccctaccacgtggtgaacctggctgaggcgggccgcgcgctggccggccaggccgccgggttagggctcgtggggaagcggctgagcctggcccgcaacgtgctcatcgcactcgccttcctgagcagcagcgtgaaccccgtgctgtacgcgtgcgccggcggcggcctgctgcgctcggcgggcgtgggcttcgtcgccaagctgctggagggcacgggctccgaggcgtccagcacgcgccgcgggggcagcctgggccagaccgctaggagcggccccgccgctctggagcccggcccttccgagagcctcactgcctccagccctctcaagttaaacgaactgaactaggcctggtggaaggaggcgcactttcctcctggcagaatgctagctctgagccagttcagtacctggaggaggagcaggggcgtggagggcgtggagggcgtgggagcgtgggaggcgggagtggagtggaagaagagggagaggtggagcaaagtgagggccgagtgagagcgtgctccagcctggctcccacaggcagctttaaccattaaaactgaagtctgaaatttggtcaa

SEQ ID NO: 55622 - DNA, 1627 bp, Artificial Sequence
  derived and/or modified sequence
ctctctcactgctccttcctggtctcttctcatctggccccacctctaaggagtcctcctgccttctgggttgccctggaaaacagactatcccccctcctagtgaagggagtgggtaggggtttcagccccaccctcaggaagatgcgtcttccctgtcctctgctctgtggtacttcctctctggctgatttagcaaacagcacctagacctggggccaggcctttggcagtgggacagatccagggataggctacaccaccctgccctgaccctgggattggcatcagcttccaaccagttcctgccaaagcttgtcctcccgacggccatgaacactacatcttctgcagcacccccctcactaggtgtagagttcatctctctgctggctatcatcctgctgtcagtggcgctggctgtggggcttcccggcaacagctttgtggtgtggagtatcctgaaaaggatgcagaagcgctctgtcactgccctgatggtgctgaacctggccctggccgacctggccgtattgctcactgctccctttttccttcacttcctggcccaaggcacctggagttttggactggctggttgccgcctgtgtcactatgtctgcggagtcagcatgtacgccagcgtcctgcttatcacggccatgagtctagaccgctcactggcggtggcccgcccctttgtgtcccagaagctacgcaccaaggcgatggcccggcgggtgctggcaggcatctgggtgttgtcctttctgctggccacacccgtcctcgcgtaccgcacagtagtgccctggaaaacgaacatgagcctgtgcttcccgcggtaccccagcgaagggcaccgggccttccatctaatcttcgaggctgtcacgggcttcctgctgcccttcctggctgtggtggccagctactcggacatagggcgtcggctacaggcccggcgcttccgccgcagccgccgcaccggccgcctggtggtgctcatcatcctgaccttcgccgccttctggctgccctaccacgtggtgaacctggctgaggcgggccgcgcgctggccggccaggccgccgggttagggctcgtggggaagcggctgagcctggcccgcaacgtgctcatcgcactcgccttcctgagcagcagcgtgaaccccgtgctgtacgcgtgcgccggcggcggcctgctgcgctcggcgggcgtgggcttcgtcgccaagctgctggagggcacgggctccgaggcgtccagcacgcgccgcgggggcagcctgggccagaccgctaggagcggccccgccgctctggagcccggcccttccgagagcctcactgcctccagccctctcaagttaaacgaactgaactaggcctggtggaaggaggcgcactttcctcctggcagaatgctagctctgagccagttcagtacctggaggaggagcaggggcgtggagggcgtggagggcgtgggagcgtgggaggcgggagtggagtggaagaagagggagaggtggagcaaagtgagggccgagtgagagcgtgctccagcctggctcccacaggcagctttaaccattaaaactgaagtctgaaatttggtcaa

SEQ ID NO: 55623 - DNA, 4110 bp, Artificial Sequence
  derived and/or modified sequence
gccattctctcacatcccgtgcggtcaggaagcccttcctgaactctgacttcagttcttgctgcggtttctgcccatttttttcatatcctctgacagctgcgaggtcatctctgctctggcttttctccaagcagaacaagtgggggctctggaaaggttaagggacctcagtggccaccattatactttgcatctttcctgagaagtgagagttgaaagggaagcaggaaggcccatggtcagattgaaggaaggactttttagtttcttttttttttttttttttttttgagatggagtctcgctctgtcattcaggctggagtgcagtggtgcgatctcagctcactgcagcctccacttcctgggttcacatgattctcctgcctcagcctcccaagtagctgagactacaggcacatgccactacacccagctatcttttgtatttttagtagagacggggtttcaccatgttggccaggctggtctcaaactgctaacatcaagtgatctgctcccctcagcctcccaaagtgctgggattaccggtatgaaccaccacaacctgccaggaatttttagtttttagcttttgcaggagacttcaaggaaaggagacattcctctgtccaggaaacgggtaaggggaccatttctgcattgctggtttcccctcttggcagggtgggcatgaggcatcactgttcctgctccctcactcctgctcctcatgctcagcctgccagctcggcctcaactttgtgtgtctaaagtggaactgaatagtaggctgtgagaagataggaaagaggtagtgccaatctccttgcccagatcataaatccagactcagcagggtaaccacatgggcaagcacaaggtaggtgcttggggaaaggggaagtaattggcattctgtgtgataccaaggagaccatttggattttggcttctaccaaagagaatggagaattggttgacctaaatggaaccagtccctttaagtaaggggaggaaagggggtgctggaagatggccctcttcccaccacctagatcatagcttgaactgaagccaaggacagagtgctgcccccttcggcatttactgatgtgccctctttaaatcatgatgttatctaacccaaacccagacccaggacctagtcacagctccaacctacacttcctattaatcttaaaacaaagcaaaacaaaacaaaaagatatcagcattgtagcctccaatctgagcccatttcccttctctggctaccatacctccttctcctatatgataccattcactactttgttcaattatccagtctagacctgcatcttgaggccacacccagccttctcactccccacacccctctttcctctctcactgctccttcctggtctcttctcatctggccccacctctaaggagtcctcctgccttctgggttgccctggaaaacagactatcccccctcctagtgaagggagtgggtaggggtttcagccccaccctcaggaagatgcgtcttccctgtcctctgctctgtggtacttcctctctggctgatttagcaaacagcacctagacctggggccaggcctttggcagtgggacagatccagggataggctacaccaccctgccctgaccctgggattggcatcagcttccaaccagttcctgccaaagcttgtaagtcctcccgacggccatgaacactacatcttctgcagcacccccctcactaggtgtagagttcatctctctgctggctatcatcctgctgtcagtggcgctggctgtggggcttcccggcaacagctttgtggtgtggagtatcctgaaaaggatgcagaagcgctctgtcactgccctgatggtgctgaacctggccctggccgacctggccgtattgctcactgctccctttttccttcacttcctggcccaaggcacctggagttttggactggctggttgccgcctgtgtcactatgtctgcggagtcagcatgtacgccagcgtcctgcttatcacggccatgagtctagaccgctcactggcggtggcccgcccctttgtgtcccagaagctacgcaccaaggcgatggcccggcgggtgctggcaggcatctgggtgttgtcctttctgctggccacacccgtcctcgcgtaccgcacagtagtgccctggaaaacgaacatgagcctgtgcttcccgcggtaccccagcgaagggcaccgggccttccatctaatcttcgaggctgtcacgggcttcctgctgcccttcctggctgtggtggccagctactcggacatagggcgtcggctacaggcccggcgcttccgccgcagccgccgcaccggccgcctggtggtgctcatcatcctgaccttcgccgccttctggctgccctaccacgtggtgaacctggctgaggcgggccgcgcgctggccggccaggccgccgggttagggctcgtggggaagcggctgagcctggcccgcaacgtgctcatcgcactcgccttcctgagcagcagcgtgaaccccgtgctgtacgcgtgcgccggcggcggcctgctgcgctcggcgggcgtgggcttcgtcgccaagctgctggagggcacgggctccgaggcgtccagcacgcgccgcgggggcagcctgggccagaccgctaggagcggccccgccgctctggagcccggcccttccgagagcctcactgcctccagccctctcaagttaaacgaactgaactaggcctggtggaaggaggcgcactttcctcctggcagaatgctagctctgagccagttcagtacctggaggaggagcaggggcgtggagggcgtggagggcgtgggagcgtgggaggcgggagtggagtggaagaagagggagaggtggagcaaagtgagggccgagtgagagcgtgctccagcctggctcccacaggcagctttaaccattaaaactgaagtctgaaatttggtcaaccttgtgagtggggtacatgtgctgtgggtatcggggtgctcgtgggcgccctggtggggcccctctcggtagttgagagtcacgtcctttagttccccatgatttacaattttggaagggacacaaagaaacatagacttcccccatcccagatgattccgagtacatagtctgcagataatacttagcaaaacgcagtctacagactcctaaagcagcttgtctaggaagaccacccatgtgggcttatcactccaggttctgtgacccgggaccttctgagaaaacagcactgctgtgaaatatcttccttgaagcctgtgataagtctccttgttagaatgactccaacttcctgccaataatctttgtcctctccataggagatgttctaggggatgccttccttccctccatttcacaaagaggccagacttgaggactaagtcattagatcttatcccttagaattttgcatatcagcatctgctaacctccacaacacaccctggcacagggtggggctgagggccccaggaaacaaagattcccaaaagtgagagggatgagtcattatttcctagagatgactgttgttttagagaaccttggtccaactctgttctgacaaggttttaggaagatggcaacaacagtggcagcagtgtactttttggatctttctcataaaaaaacaaaagagcaagtaagagagggaaaccaaatatccacatgcaacatccgcaacaaatctagtatgtcaaggtttgacatactcccatggaccccaaagtatgagccagtgagaatgagtcatcaatatctcaagacccatataccagcatctgtgcagaaggatgcagaaggaagcaaagggatgttggatggacctaagaagaggagatccccaagctgtctacagatccttactggaaggtatggtgcaccaatttgagaacagcagctgaaactgggagggacctaacggagtatttcccagtcctctcgcccattctgtatggtgagcacataataggtacttatttagtgtttgtcgaattaataaagttcaaatgacatttccctgga

SEQ ID NO: 55624 - DNA, 431 bp, Artificial Sequence
  derived and/or modified sequence
gggcggagccggccaggcggcgcgagcgggaactacggccttggccttcttcagttctagcgtcaacccggtgctctacgtcttcaccgctggagatctgctgccccgggtcctcccgacggccatgaacactacatcttctgcagcacccccctcactaggtgtagagttcatctctctgctggctatcatcctgctgtcagtggcgctggctgtggggcttcccggcaacagctttgtggtgtggagtatcctgaaaaggatgcagaagcgctctgtcactgccctgatggtgctgaacctggccctggccgacctggccgtattgctcactgctccctttttccttcacttcctggcccaaggcacctggagttttggactggctggttgccgcctgtgtcactatgtctgcggagtcagcatgtacg

SEQ ID NO: 55625 - DNA, 1059 bp, Artificial Sequence
  derived and/or modified sequence
atgaacaccaccagcagcgccgccccccccagcctgggcgtggagttcatcagcttgctagctattatcttgctatctgtagcccttgccgtcgggctcccaggcaatagtttcgtcgtgtggtcgatcctcaagagaatgcagaaacgctctgtgacggccctgatggttctcaatttagctctggccgatctggcggttctgctgactgcgcccttctttctgcacttcctcgcacaggggacttggagcttcggccttgccggttgtcgcctctgccactacgtttgcggagtctccatgtatgcatcagttctgttgatcacagcaatgtccctggatcgctcactagcagtcgccaggcccttcgtctcccagaaacttcggaccaaggctatggctagaagagtcctggccggaatatgggtactttcctttctccttgcaacacctgttctggcgtaccggacagtggttccctggaagacaaacatgtcattgtgttttcccagatacccctctgagggtcatagagcctttcacttgatttttgaggctgttaccggttttctgttacccttcctagccgttgtggccagctactctgacatcggtaggcgcctccaggctaggcggttccggcggagccgacggactgggcgcctcgtcgtgcttatcatcctcacattcgcggctttctggctgccgtatcacgtggtgaacctggctgaagctggccgggcattggcgggccaggcagccggtctgggccttgtgggtaaacggctgagcctggcccggaacgtgctgatcgctttggcttttctgtcctctagcgtcaatcccgtgctgtatgcctgcgctggggggggactgttgcgtagtgccggcgtcggctttgtcgctaagctgttagagggcacgggcagtgaggcttcgtcgacgcgccggggtggctctctggggcagaccgctcgttcaggacccgcggcactcgagcctgggccctcggaatcccttactgcctctagtcccctgaagctcaacgagctgaattag

SEQ ID NO: 55626 - DNA, 1059 bp, Artificial Sequence
  derived and/or modified sequence
atgaacaccaccagcagcgccgccccccccagcctgggcgtggagtttatatctctcctggctataatcttactgtccgttgccctggccgttggccttccaggcaattcctttgttgtgtggtccatccttaagaggatgcagaagcggtctgttactgccttaatggtactgaacctcgccctagctgacctggccgtgctgctgactgccccattcttcctgcacttcctggcacagggtacatggtcttttggtttggcaggatgcaggctgtgtcactacgtatgcggggtctctatgtacgcctctgtattgttgattacagctatgagcctcgacagaagtctcgctgttgctcgccctttcgttagtcagaagctccggaccaaagccatggctagaagggtgctggctggaatctgggtgctgtccttcttattggcgacccctgtgttggcctatagaactgtggtgccatggaagaccaacatgagtctgtgctttccacggtacccatccgagggccacagggcgttccacttaatttttgaggccgtcactggatttctcttgccgttccttgcagttgtggccagttatagtgacatcgggcgaagactgcaggcgaggaggtttcggcggagcaggcgaacgggaaggttggtcgttttaattatcctcacatttgcagccttctggctgccctatcacgtggtcaatttggccgaggctggacgggcgcttgccggacaggcagccggactcggactggtgggcaagcggctctcccttgctaggaatgtgttgattgccctggctttcctgtccagtagcgtgaatccagttctctacgcttgtgccggaggcggactgttgagatcagctggagtcgggttcgttgcaaaattgctggagggcaccgggtccgaagcctcaagtacgaggcggggaggttcattgggacagactgcccggtccgggccagcagcattagaacctgggccttccgagtcattgaccgcaagtagcccgctaaagctgaatgaactgaactag

SEQ ID NO: 55627 - DNA, 1059 bp, Artificial Sequence
  derived and/or modified sequence
atgaacaccaccagcagcgccgccccccccagcctgggcgtggagtttatctcactgctcgcaatcatcctcctgtccgtagccctagctgttggactgcctgggaacagcttcgtcgtgtggtctattctgaagcgcatgcagaagcgaagtgtaactgcactcatggtccttaacctggcgttggccgacctggccgttttactgaccgcaccctttttcttacacttcctggcacaagggacctggtcttttggcttggccggatgcagactctgtcactatgtctgcggagtgtctatgtacgcatctgtgctgctcattacagccatgagcctggaccgtagcctcgccgtggccagaccctttgtgtctcagaaactgcggaccaaagcgatggcccggcgcgtgctggctggcatatgggttctgtcctttctgctcgcaacaccggtgctcgcctaccggacagtggtaccatggaagacgaatatgagcctttgcttcccacgctacccttcagagggccatagggcattccacctcatcttcgaagctgtaactggattcttgctcccattcctcgcagtggtggcctcttacagcgatatcgggcgccgtcttcaggcccgcagatttcgacgaagccgacgaactggccgactggtagtgttaattatcctgactttcgccgccttttggcttccttatcatgtggtaaacctcgctgaagctgggagggccctggctgggcaggcagccggactggggttagtgggcaagaggctatcactggccagaaatgtgttaattgcgttagcattcctctcaagttcagtcaatccagtgctgtacgcgtgtgccggcgggggccttctgcgcagcgcaggagtcggattcgtcgcaaagctgctcgagggaactggtagtgaggcatcaagcacccgtagaggtgggtcgctgggtcagacagctcgctcagggcctgccgcactggagcccgggccatctgaaagcttgaccgcttcttcccctctcaagctcaatgaactgaattag

SEQ ID NO: 55628 - DNA, 309 bp, Artificial Sequence
  derived and/or modified sequence
atgaacaccaccagcagcgccgccccccccagcctgggcgtggagttcatcagtcttctggccataatcctgttatctgtggcactcgccgtgggcctcccaggtaactcctttgtagtctggtccattctcaaacgcatgcagaaaaggtctgtaacagcgctgatggtccttaatttggcattagccgatctcgctgtcctactgacagcacctttttttctgcatttcctcgcgcaggggacttggtcatttgggctggccgggtgcaggctctgccactacgtctgtggtgtctctatgtactag

SEQ ID NO: 55629 - DNA, 1059 bp, Artificial Sequence
  derived and/or modified sequence
atgaacaccacttcctccgcagccccacccagcctgggagtcgaattcatcagcctactggcaattattctactgtctgtcgcactggcagtcggtcttcctggcaactcctttgtggtttggagcatcctgaaacggatgcagaaaagatccgtcaccgcacttatggtcctaaatctggctttggctgacctggccgtattgttaactgctcctttctttctccacttcttggcacagggaacctggagcttcgggctggctggttgccgcctgtgtcactatgtttgtggtgtcagtatgtacgccagtgtcctgctgatcaccgctatgtccctggaccggtcccttgcagtggctaggcccttcgtttcacagaagttacgcactaaggccatggccaggcgagtcctcgccggaatttgggtgctctcatttctcttagccactcccgtcctggcctatcgcactgtagtaccctggaaaactaatatgagcctctgtttcccacgttatcccagcgaagggcacagagctttccatctgattttcgaagcggtgacgggtttccttttgccatttctcgcagtggtcgcctcctactctgacatcgggcgaaggctccaggcacgaaggtttcgacggtctagacggactggcagactggtggttttaatcattcttacctttgccgctttttggttgccttaccacgtggtcaaccttgccgaggctggtcgggctctcgcaggacaggctgccggtctaggacttgtcggtaagagactcagccttgccaggaatgtgctgatcgcactggcttttttgtcctcctccgtcaaccccgtgctgtacgcttgcgcagggggagggttactcagaagtgcaggcgtaggtttcgtggcaaaacttttggaaggtactggctcagaggctagcagcacgcgaaggggcggatccttgggacaaaccgcaaggtctggccctgccgcattagagcccggacctagcgagagtttgacggcatcaagtccactgaagctcaacgagctgaattag

SEQ ID NO: 55630 - DNA, 1059 bp, Artificial Sequence
  derived and/or modified sequence
atgaacaccacctcaagtgcggctccgcctagtctgggcgttgaattcatcagtctgctggccattattctcctgtccgtcgcactggcggtgggcttaccagggaattctttcgtagtctggtctatactcaagagaatgcagaagagaagcgtcacagctttaatggttttgaatttagctctcgcagacctcgcggtgctgctcaccgctcctttttttcttcacttccttgctcagggcacgtggtctttcggactcgcaggatgtcgtctctgccactatgtgtgtggagtgagcatgtatgcttccgtgctcctgattacggctatgagcttggacaggagcctggccgtcgccagaccgttcgtgtcacagaaactgcgtactaaagcaatggccagaagagtactcgctggtatctgggtgctttcttttcttttagctactccagtgctggcatataggactgtggtaccttggaagaccaatatgtccctctgctttccaaggtatcctagtgaaggacacagagcgtttcatctaattttcgaggctgtcaccggttttctcctgccctttttagctgtggtggccagctattctgatattggacggaggctccaagctagacgtttccgtaggagtcgtcggacaggaaggctggtggttttgattatccttacctttgcggcattctggctgccttatcatgtggtgaacctggcagaagccggtcgagcgctggcaggacaggccgctggattaggcctggtgggtaagagactgagcctagcgcgtaatgtcctgatcgcactagcgttcttgtcctctagtgttaaccccgtcctctacgcttgcgcagggggagggttgttaaggagcgccggtgtgggattcgtggcaaaattgcttgaggggaccggcagcgaggctagctccactaggcgcggaggctccctgggtcagacagctcgatctgggccagcagctctcgagccaggaccaagtgagagtctaacagcctccagcccactcaaattgaacgagctcaattag

SEQ ID NO: 55631 - DNA, 1059 bp, Artificial Sequence
  derived and/or modified sequence
atgaatactacctcaagtgctgccccaccatccctgggagtggaatttatctctctcctggcaataatactcctgtctgtggcactagccgtggggctgcctggcaatagctttgttgtgtggagtattctgaagcgtatgcagaaacgatcagttacagcgctgatggtgctgaacctggctctcgccgacctcgccgtcttgctgacagctcccttttttcttcacttccttgcacagggcacgtggtcttttggtctcgcgggatgccggctgtgtcattacgtctgcggcgttagtatgtatgctagcgtgctgctgatcacggccatgtccttagatcgcagtttggcggtggctcggcctttcgtttcacagaagctacggaccaaagcaatggccagacgggtgctggcaggaatttgggtcctgtccttcctgcttgcaacaccagtcctggcttaccggaccgttgtgccctggaagacgaatatgtcactgtgcttcccgaggtacccaagcgagggacacagagccttccatttgatcttcgaagccgtgaccggatttctgctgccttttttggctgtagttgcctcctattccgatataggcagaaggctccaggcgcgacgttttcgtagaagccgaaggacgggacgcttagtggtactgatcattctgactttcgccgctttctggttaccctaccatgtggtgaacctggcagaggccggtcgagccttagccggacaggccgcagggctgggcctcgtggggaagagactgtcgttggccagaaacgttctcattgcactagcctttctcagctcatccgtgaaccccgtgctgtacgcctgtgccggaggcggactactgaggtcagcgggtgtagggtttgttgccaaactgctggaaggcaccgggagcgaggccagcagcacacgtagagggggtagtctgggccagaccgctaggagcggccctgccgcactcgagcctggaccttctgagtctctgaccgccagctcgcccctgaaactgaatgaattaaattag

SEQ ID NO: 55632 - DNA, 309 bp, Artificial Sequence
  derived and/or modified sequence
atgaatacaacctcctcagccgctcctccgtctctcggagtggaatttataagtttacttgccatcatcctgttgtccgtagccttggcagttggattgcctggcaactccttcgtggtgtggtcaattctcaagaggatgcaaaagcgcagtgttacggccctcatggtgctgaatctagccctggcggatctagcggtactgctgacagctccattcttcctgcacttcctggcccagggcacctggtcctttggactggcaggatgccgtctgtgccattatgtgtgtggggtgtccatgtactag

SEQ ID NO: 55633 - DNA, 1059 bp, Artificial Sequence
  derived and/or modified sequence
atgaacaccaccagcagcgccgccccccccagcctgggcgtggagttcatcagcctgctggccatcatcctgctgagcgtggccctggccgtgggcctgcccggcaacagcttcgtggtgtggagcatcctgaagagaatgcagaagagaagcgtgaccgccctgatggtgctgaacctggccctggccgacctggccgtgctgctgaccgcccccttcttcctgcacttcctggcccagggcacctggagcttcggcctggccggctgcagactgtgccactacgtgtgcggcgtgagcatgtacgccagcgtgctgctgatcaccgccatgagcctggacagaagcctggccgtggccagacccttcgtgagccagaagctgagaaccaaggccatggccagaagagtgctggccggcatctgggtgctgagcttcctgctggccacccccgtgctggcctacagaaccgtggtgccctggaagaccaacatgagcctgtgcttccccagataccccagcgagggccacagagccttccacctgatcttcgaggccgtgaccggcttcctgctgcccttcctggccgtggtggccagctacagcgacatcggcagaagactgcaggccagaagattcagaagaagcagaagaaccggcagactggtggtgctgatcatcctgaccttcgccgccttctggctgccctaccacgtggtgaacctggccgaggccggcagagccctggccggccaggccgccggcctgggcctggtgggcaagagactgagcctggccagaaacgtgctgatcgccctggccttcctgagcagcagcgtgaaccccgtgctgtacgcctgcgccggcggcggcctgctgagaagcgccggcgtgggcttcgtggccaagctgctggagggcaccggcagcgaggccagcagcaccagaagaggcggcagcctgggccagaccgccagaagcggccccgccgccctggagcccggccccagcgagagcctgaccgccagcagccccctgaagctgaacgagctgaactag

SEQ ID NO: 55634 - DNA, 309 bp, Artificial Sequence
  derived and/or modified sequence
atgaacaccaccagcagcgccgccccccccagcctgggcgtggagttcatcagcctgctggccatcatcctgctgagcgtggccctggccgtgggcctgcccggcaacagcttcgtggtgtggagcatcctgaagagaatgcagaagagaagcgtgaccgccctgatggtgctgaacctggccctggccgacctggccgtgctgctgaccgcccccttcttcctgcacttcctggcccagggcacctggagcttcggcctggccggctgcagactgtgccactacgtgtgcggcgtgagcatgtactag

SEQ ID NO: 55635 - protein, 640 aa, Artificial Sequence
  derived and/or modified sequence
MENQLAKSTEERTFQYQDSLPSLPVPSLEESLKKYLESVTRTCYQIRGLDPDAKRGFLDLTREGIQVKPFANQEEYKKTEEIVQKFQSGIGEKLHQKLLERAKGKRNWLEEWWLNVAYLDVRIPSQLNVNFAGPAAHFEHYWPPKEGTQLERGSITLWHNLNYWQLLRKEKVPVHKVGNTPLDMNQFRMLFSTCKVPGITRDSIMNYFRTESEGRSPNHIVVLCRGRAFVFDVIHEGCLVTPPELLRQLTYIHKKCHSEPDGPGIAALTSEERTRWAKAREYLIGLDPENLALLEKIQSSLLVYSMEDSSPHVTPEDYSEIIAAILIGDPTVRWGDKSYNLISFSNGVFGCNCDHAPFDAMIMVNISYYVDEKIFQNEGRWKGSEKVRDIPLPEELIFIVDEKVLNDINQAKAQYLREASDLQIAAYAFTSFGKKLTKNKMLHPDTFIQLALQLAYYRLHGHPGCCYETAMTRHFYHGRTETMRSCTVEAVRWCQSMQDPSVNLRERQQKMLQAFAKHNKMMKDCSAGKGFDRHLLGLLLIAKEEGLPVPELFTDPLFSKSGGGGNFVLSTSLVGYLRVQGVVVPMVHNGYGFFYHIRDDRFVVACSAWKSCPETDAEKLVQLTFCAFHDMIQLMNSTHL

SEQ ID NO: 55636 - DNA, 1923 bp, Artificial Sequence
  derived and/or modified sequence
atggagaaccagctggccaagagcaccgaggagagaaccttccagtaccaggacagcctgcccagcctgcccgtgcccagcctggaggagagcctgaagaagtacctggagagcgtgaccagaacctgctaccagatcagaggcctggaccccgacgccaagagaggcttcctggacctgaccagagagggcatccaggtgaagcccttcgccaaccaggaggagtacaagaagaccgaggagatcgtgcagaagttccagagcggcatcggcgagaagctgcaccagaagctgctggagagagccaagggcaagagaaactggctggaggagtggtggctgaacgtggcctacctggacgtgagaatccccagccagctgaacgtgaacttcgccggccccgccgcccacttcgagcactactggccccccaaggagggcacccagctggagagaggcagcatcaccctgtggcacaacctgaactactggcagctgctgagaaaggagaaggtgcccgtgcacaaggtgggcaacacccccctggacatgaaccagttcagaatgctgttcagcacctgcaaggtgcccggcatcaccagagacagcatcatgaactacttcagaaccgagagcgagggcagaagccccaaccacatcgtggtgctgtgcagaggcagagccttcgtgttcgacgtgatccacgagggctgcctggtgaccccccccgagctgctgagacagctgacctacatccacaagaagtgccacagcgagcccgacggccccggcatcgccgccctgaccagcgaggagagaaccagatgggccaaggccagagagtacctgatcggcctggaccccgagaacctggccctgctggagaagatccagagcagcctgctggtgtacagcatggaggacagcagcccccacgtgacccccgaggactacagcgagatcatcgccgccatcctgatcggcgaccccaccgtgagatggggcgacaagagctacaacctgatcagcttcagcaacggcgtgttcggctgcaactgcgaccacgcccccttcgacgccatgatcatggtgaacatcagctactacgtggacgagaagatcttccagaacgagggcagatggaagggcagcgagaaggtgagagacatccccctgcccgaggagctgatcttcatcgtggacgagaaggtgctgaacgacatcaaccaggccaaggcccagtacctgagagaggccagcgacctgcagatcgccgcctacgccttcaccagcttcggcaagaagctgaccaagaacaagatgctgcaccccgacaccttcatccagctggccctgcagctggcctactacagactgcacggccaccccggctgctgctacgagaccgccatgaccagacacttctaccacggcagaaccgagaccatgagaagctgcaccgtggaggccgtgagatggtgccagagcatgcaggaccccagcgtgaacctgagagagagacagcagaagatgctgcaggccttcgccaagcacaacaagatgatgaaggactgcagcgccggcaagggcttcgacagacacctgctgggcctgctgctgatcgccaaggaggagggcctgcccgtgcccgagctgttcaccgaccccctgttcagcaagagcggcggcggcggcaacttcgtgctgagcaccagcctggtgggctacctgagagtgcagggcgtggtggtgcccatggtgcacaacggctacggcttcttctaccacatcagagacgacagattcgtggtggcctgcagcgcctggaagagctgccccgagaccgacgccgagaagctggtgcagctgaccttctgcgccttccacgacatgatccagctgatgaacagcacccacctgtag

SEQ ID NO: 55637 - DNA, 1923 bp, Artificial Sequence
  derived and/or modified sequence
atggaaaaccagctggccaagagcaccgaggagcgcacatttcaataccaggactctttgccatccctccctgtaccaagtcttgaagagtccctgaagaaatatctcgagtctgttacgagaacctgctatcaaatccgtggattagatcctgacgcaaagcgggggtttcttgatctgactagagagggcatacaagtgaagcccttcgcgaaccaggaggaatataaaaaaactgaggagatcgtgcaaaagtttcagtctggaattggggagaagttacaccagaaactgctggagagagcaaaaggtaagagaaactggctcgaagaatggtggttgaacgttgcttatttagacgttcgcatcccatctcaacttaacgtgaacttcgcgggaccagctgctcatttcgaacattactggccacccaaggaaggtacccagctagagagggggagcattactctgtggcacaacctgaattattggcagcttctcagaaaagagaaggtccccgtgcacaaagtgggcaataccccactggacatgaaccaattcagaatgctgttcagtacatgcaaagtgcctggaatcacccgcgacagtataatgaactatttccgaacagagtccgaaggtaggtctcctaaccatattgtcgttctgtgccgaggaagagctttcgtctttgacgtaatccatgaggggtgtcttgtgacacctcctgaactcctccgccagctgacttatatccacaagaaatgccattccgaacccgacggcccgggcatcgctgcactgaccagtgaagagcggacaagatgggccaaagcgagagaatacctaattggcctggaccccgaaaatttggcgctgctggagaagattcagagctcattgcttgtgtatagcatggaagacagttcaccccacgtcaccccagaggattatagcgaaatcatcgccgccatcttgataggcgaccctaccgtccgctggggtgataaatcttacaacttgattagttttagtaatggcgtgttcggctgcaattgcgatcacgccccctttgacgcaatgattatggttaacatcagttattatgtggatgaaaaaatttttcagaacgaaggaagatggaaagggagcgagaaagtacgggacatccccctgcctgaggagttgatctttattgtggatgagaaggtgttaaacgatattaatcaggcaaaggcgcagtatctcagggaagcaagcgatctgcagatcgccgcatatgcattcaccagcttcggtaaaaagcttacaaaaaataaaatgctccacccagacacctttattcagttggcgctgcagcttgcatattaccgactgcacggccacccagggtgctgctacgagaccgcaatgaccagacacttctaccacggtcggaccgagactatgcgatcatgcaccgtcgaggctgtgcgctggtgccagtccatgcaggaccccagcgtgaacttgcgagaacgtcagcaaaagatgctgcaggcatttgcaaagcacaataaaatgatgaaggactgttctgccggtaaaggctttgataggcatttgttaggcctgctcctgattgcaaaagaggaaggtctcccagtgcctgaattgttcacagatcccctgttcagtaaaagcggaggggggggaaacttcgtgctgagcaccagtctcgtggggtatctgcgggtgcagggggtcgtggtgccaatggttcataacgggtacggattcttctatcatatccgcgatgaccgattcgtggtagcctgttctgcctggaaatcttgcccggagaccgatgccgaaaagctcgtgcagcttaccttctgtgcctttcacgacatgatccagttgatgaactcaactcatctctag

SEQ ID NO: 55638 - DNA, 1923 bp, Artificial Sequence
  derived and/or modified sequence
atggagaaccagctggccaagagcacagaggagaggaccttccagtaccaggacagcctgcccagcctgcctgtgcccagcctggaggagagcctgaagaagtacctggagagcgtgaccaggacctgctaccagatccggggcctggaccctgatgccaagaggggcttcctggacctgacccgggagggcatccaggtgaagccctttgccaaccaggaggagtacaagaagacagaggagatcgtgcagaagttccagagcggcatcggggagaagctgcaccagaagctgctggagcgggccaagggcaagaggaactggctggaggagtggtggctgaatgtggcctacctggatgtgcgcatccccagccagctgaatgtgaactttgctggccctgctgcccactttgagcactactggccacccaaggagggcacccagctggagcggggcagcatcaccctgtggcacaacctgaactactggcagctgctgaggaaggagaaggtgcctgtgcacaaggtgggcaacacccccctggacatgaaccagttcaggatgctgttcagcacctgcaaggtgcccggcatcacccgggacagcatcatgaactacttcagaacagagagcgagggccgcagccccaaccacatcgtggtgctgtgccggggccgggcctttgtgtttgatgtgattcatgagggctgcctggtgaccccacctgagctgctgcggcagctgacctacatccacaagaagtgccacagcgagccagatggccctggcattgctgccctgaccagcgaggagaggacccgctgggccaaggcccgggagtacctgattggcctggaccctgagaacctggccctgctggagaagatccagagcagcctgctggtgtacagcatggaggacagcagcccccacgtgaccccagaggactacagcgagatcatcgccgccatcctgattggagaccccaccgtgcgctggggagacaagagctacaacctgatctccttcagcaatggagtgtttggctgcaactgtgaccacgccccctttgatgccatgatcatggtgaacatctcctactacgtggatgagaagatcttccagaatgaaggccgctggaagggcagcgagaaggtgcgggacatccccctgcctgaggagctgatcttcatcgtggatgagaaggtgctgaatgacatcaaccaggccaaggcccagtacctgcgggaggccagtgacctgcagattgctgcctatgccttcaccagctttgggaagaagctgaccaagaacaagatgctgcacccagacaccttcatccagctggccctgcagctggcctactaccgcctgcacggccaccctggctgctgctatgaaacagccatgaccaggcacttctaccacggccgcacagagaccatgaggagctgcaccgtggaggccgtgcgctggtgccagagcatgcaggaccccagcgtgaacctgcgggagcggcagcagaagatgctgcaggcctttgccaagcacaacaagatgatgaaggactgcagcgctggaaaaggatttgacagacacctgctgggcctgctgctgattgccaaggaggagggcctgcctgtgcctgagctgttcacagaccccctcttcagcaagagcggcggcggcggcaactttgtgctgagcaccagcctggtgggctacctgcgggtgcagggcgtggtggtgcccatggtgcacaacggctacggcttcttctaccacatcagagatgacagatttgtggtggcctgcagcgcctggaagagctgcccagagacagatgctgagaagctggtgcagctgaccttctgtgccttccatgacatgatccagctgatgaacagcacccacctgtag

SEQ ID NO: 55639 - DNA, 1923 bp, Artificial Sequence
  derived and/or modified sequence
atggagaaccagctggccaagagcaccgaggagcggaccttccagtatcaagactccttgccgtctctgcccgtccctagtctggaggagtctctgaagaagtatctggagtcagtgacaaggacatgctatcaaatccgaggactagatccagacgccaagcggggctttttggatttgacacgagagggtattcaggtcaagccttttgcaaaccaagaagaatataaaaagacagaggagatagtgcaaaaattccagtcgggcattggtgagaagctgcatcagaagctgctcgaacgcgcaaagggcaagaggaactggctggaggagtggtggttaaatgtagcttatttagacgtgaggataccatcacaactgaacgtaaacttcgcagggccagcagcccacttcgaacactattggccacccaaagagggaacccaactggaaagaggctctatcaccttatggcataatctcaattactggcaactgctgcgcaaggaaaaagtgccagtccacaaagttggtaatactcctctcgacatgaaccagtttagaatgttattctccacctgcaaagttcctggtattacgagggactcaataatgaactacttccgtaccgagagcgaaggacggagccccaatcacatagttgttctctgccgcggccgggcattcgtcttcgacgtcattcatgaggggtgtctggtgaccccccctgaactgctccgtcaattgacttacatccacaagaaatgccactctgaacctgacgggcccggaatagctgctctgaccagtgaagaacggaccagatgggctaaggctcgcgagtaccttattggactcgaccctgaaaacctggcactactcgaaaagatacagtcttccttactggtctacagtatggaggattctagccctcatgtgacccccgaggactacagtgagattatagcagcgattctgataggcgaccctaccgtaagatggggcgacaaatcatacaatctgatcagcttttcaaatggggtttttggctgcaattgcgaccatgcaccttttgacgccatgatcatggtgaatatctcttattacgtggacgagaagatttttcaaaacgaggggcggtggaaaggcagtgaaaaagttcgcgatattccattgcctgaggagctgattttcattgtggatgaaaaggtgctgaatgacatcaaccaagcaaaagcccaatacctgcgcgaggcctctgatctgcaaatcgccgcttatgctttcacatcatttgggaaaaagctcacgaagaacaagatgctgcacccggatacattcattcagctcgctcttcagctggcctattacagattacatgggcacccaggctgctgttacgaaaccgctatgacgcgccatttctaccatggccgcacagagaccatgcggtcatgtaccgtggaggcagtgagatggtgtcagagtatgcaggatccctcagtcaacctgagagaaaggcagcaaaaaatgttacaggctttcgcaaaacacaataaaatgatgaaagattgtagcgccggaaaaggattcgacagacatctgctgggactcttgctaattgcaaaggaggagggacttcccgttcctgaactatttaccgatcccctttttagtaagtccggtggaggtgggaattttgttcttagcactagcctggtaggatatcttcgggtgcagggcgtcgtggtgccgatggtgcacaacgggtacggcttcttctatcacataagagatgatcggtttgttgtggcgtgttccgcgtggaaatcttgcccggagactgatgctgagaagcttgtccagctgacgttttgtgcctttcatgatatgatccaattaatgaatagcacacacctctag

SEQ ID NO: 55640 - DNA, 2959 bp, Artificial Sequence
  derived and/or modified sequence
tttgaggcccaagggggagcgagccggtgctgctgcaggctgaggctgcggcagaggcggcgaggcgcgggcggtgaggacggacagtcaccgacttagtccagttccctgtgatctcaaaacaattgttgcagcaggctcctggcagtctcaagcagttcatcttcttggtgtactggtttcctattgtgattttatcatggaaaatcaattggctaaatcaactgaagaacgaacatttcagtaccaggattctcttccatcactgcctgttccttcacttgaagaatcattaaaaaaataccttgaatcagtcaccagaacatgctaccagataaggggtcttgatccagatgctaagagagggttcttggatctcacgcgggaaggaattcaagtgaaaccatttgcaaatcaagaagaatataagaaaactgaagaaatagttcaaaaatttcaaagtgggattggagaaaaattgcaccagaaattgcttgaaagagcaaaaggaaaaagaaattggctggaagagtggtggctgaatgttgcctatctggatgttcgtataccatcacaattgaatgtcaactttgcgggtcctgcagctcattttgaacactactggcctccaaaggaagggactcaattagaaagaggaagtataactctttggcataacttgaactactggcagctattaagaaaagaaaaagtgcctgttcataaagttggaaatactcctctagatatgaatcaattccgaatgctattttctacctgcaaggttccaggaattactagagactccattatgaattattttaggactgagagtgaagggcgttccccaaaccacattgtagtgctgtgtcgaggccgagcttttgtctttgatgtaatacatgaaggatgtttggtcaccccgccagagcttctcagacaactgacatatatccacaagaagtgccatagtgaacctgatggacctgggattgcagcattaactagtgaggagcgaactcgatgggctaaggcacgagaatatctgattggtcttgatccagagaacttggctttgttagaaaaaattcagagtagtttactggtatattccatggaggatagcagtccacatgtaacaccagaggattattctgagattattgcagccatccttattggagatccaacagtacgctggggtgacaaatcctataacttgatttccttttctaatggagtatttggctgtaattgtgatcatgctccttttgatgcaatgattatggtgaacatcagttattatgtggatgagaaaatttttcagaatgaaggaagatggaagggttcagagaaggtacgagatataccacttccagaagagctcattttcattgtggatgagaaagttttaaatgacatcaaccaagctaaagcccagtatctcagggaggcatctgatctacagattgcggcttatgcctttacatcttttggcaaaaagctaaccaagaacaagatgcttcacccggatacgtttattcagcttgcacttcagctggcctattacagacttcatggacaccctggttgttgctatgaaacagctatgacaagacatttttatcatggccgtacagagactatgcgatcatgcacagttgaagcagtgaggtggtgccagtccatgcaggatccttctgtcaatcttcgtgagcggcagcaaaagatgttacaagcttttgcaaagcataataaaatgatgaaagattgttcagctggaaaaggatttgatcgtcaccttttaggtctcttactcatagcaaaagaggaaggtcttcctgttccagaactctttacggacccacttttttccaaaagcggaggaggtggaaattttgttctctcaacaagtctggttggctatttacgagtccagggagtggtagttcccatggtacacaatggttatggatttttctaccatatcagagatgacaggtttgttgtggcctgttcagcctggaaatcctgtcccgagactgatgcggaaaagctagttcagctgactttttgtgcttttcatgatatgatacagctgatgaactctactcatctttagagatgaatcatctattaagcacttaccaaaacatatcattaaactgagtgctgggagtgagttggtaatatgagatgggaaggaatgttgacttgctaacattcctttaacaagttaagaaaacttgttaaatgtagaaattagtagaatcatgctctctaaatttattctgccatagaaggtagaaatatttttaagctcctctgatgcagcagcaatgcaaattatgacatagtgaatatagaactatgcagtatttaagcctcaacaatccaaatctacaaactttaacaatgcaagtcttactctaatttttaagtatttttgttggtacttacatgggttataaatcctctctctggacatcaatgtagagtccatctttcaagcactttaatttttttagctgccaaagggtatgaattacattattgtatgctaatttccctgaaatcaatgccttctatgttcaccacagggatacaagcctgttatgtttgatgggaaagaccactacaatctaatggtgatctaaaataacttttttgggctgggtgcagtggctcatgcctataatcttagcactttgggaggccaaggtaggaggattgcttgaagctaggagtttgagaccagcctgggcaacagggtaaggtcctgtctctacaagatcaaaaacttagccgggtatggtggtgcatgtgtgcctgtagtccaagctacttgaaggctgagacaggaggatcggttgagcccaggaggttgtggctgcagtgagctgtgatgtgcccttatgctatagcctgggcaagagcgtgagaccctgtctcaaagaag

SEQ ID NO: 55641 - DNA, 1923 bp, Artificial Sequence
  derived and/or modified sequence
atggaaaaccagctcgccaaatccaccgaagagcgcacattccaataccaagactccctcccttcactgcctgtgccatcactggaggagtcactgaagaagtacttagagtccgtgacaaggacttgttatcagatccggggactggatcccgatgctaaacgagggtttttggatctgacgagggaagggatccaggtgaaaccatttgcaaaccaggaggaatacaagaaaaccgaggagattgttcagaaatttcaatctggcattggcgagaagctgcaccagaaattgctcgaacgcgcaaaagggaaaaggaattggctggaggaatggtggctgaatgtcgcctacctcgacgtccgcatcccgtcacaactaaatgtcaactttgccggtccagctgctcacttcgagcactattggccgccaaaggaggggacgcaactggaacggggatccattaccttatggcacaacttgaactactggcagctgctgaggaaggagaaagtgcccgtgcacaaagtgggtaacacacccctggacatgaatcaatttcgtatgttgttttcaacttgcaaagttccgggaatcacacgcgatagcataatgaattacttcagaaccgaatctgaaggcagaagccccaaccacattgtggtcctttgtcgaggacgcgctttcgtctttgatgttatccacgagggctgcctagtcactcccccagagcttcttcggcaattgacctacatacacaaaaaatgccattctgagcccgacggccctggcatagctgcccttacctccgaggagcgcaccaggtgggccaaagctcgggagtacctcattggcttagatccagagaaccttgctttgctggaaaaaatccaaagttctctgttggtgtactccatggaggactcatctccacacgtaacgccggaagactactccgaaatcatagcagccatcctcattggtgatcccacggttcggtggggagacaaatcttacaatctgatctcattctctaatggagtctttgggtgcaactgcgatcacgcgccatttgatgcaatgattatggtgaatatctcgtattacgttgatgaaaaaatattccagaatgaagggagatggaagggctcagaaaaagtgcgagacatcccacttcctgaagagcttatcttcattgtggacgagaaagtgctgaatgatattaaccaggcgaaagcccagtacttgcgggaagccagcgatctgcaaatagccgcatatgccttcacttcatttggaaaaaaattgaccaagaataagatgctacaccccgacacgtttattcagctggccttgcaactggcttattaccgtctccatggtcaccccggatgttgttacgagaccgccatgacaaggcatttctaccacggcaggacggagaccatgaggtcatgtacagtggaagctgtcagatggtgtcagtcaatgcaagacccctctgtcaatctgcgtgaaaggcagcaaaaaatgctccaggcctttgcaaaacacaacaaaatgatgaaggactgtagtgcgggtaaaggctttgaccgccatcttctcggtctgttactgattgctaaagaggagggcctgcctgttcccgagttattcactgacccccttttcagtaaaagcggcggtggcggaaattttgtattgtcaacctccttggtgggatacttgcgagtgcagggtgtcgtcgtgcctatggtccacaatggatacgggttcttttaccacattagggacgatcgttttgtggtggcttgtagcgcctggaaaagctgcccggaaacagacgcggaaaaattagtccaactgactttttgtgccttccacgatatgatccaactcatgaacagtactcatctgtag

SEQ ID NO: 55642 - protein, 164 aa, Artificial Sequence
  derived and/or modified sequence
MFRNQYDNDVTVWSPQGRIHQIEYAMEAVKQGSATVGLKSKTHAVLVALKRAQSELAAHQKKILHVDNHIGISIAGLTADARLLCNFMRQECLDSRFVFDRPLPVSRLVSLIGSSILFMIWALTFSKPVHLLTILTAEPCPLEPVPNQLVLTWRDICLNLWSVI

SEQ ID NO: 55643 - DNA, 495 bp, Artificial Sequence
  derived and/or modified sequence
atgtttagaaatcaatacgacaacgatgtaaccgtgtggagcccccagggtcgcatccatcagattgagtatgccatggaagcggtcaagcaaggctccgccactgtgggactcaaaagcaagactcatgctgtgctggtggccttgaagagagcgcaatctgaactggctgcacaccagaagaaaatattgcacgtggacaatcatatcggaatctctatcgccggactcaccgcggacgctcgtttgttgtgtaatttcatgaggcaggaatgtctcgactcaagattcgtcttcgataggcctctccccgtgtctcgtctagtctccctgattgggtcatcaatcctgttcatgatctgggccttaactttcagcaagcctgtacacttgttaactatactgaccgccgagccttgccccctagagcccgtccccaatcagctagtgctaacctggcgggacatctgcctgaatctctggtcggttatttag

SEQ ID NO: 55644 - DNA, 495 bp, Artificial Sequence
  derived and/or modified sequence
atgttcaggaaccagtatgacaatgatgtgacagtgtggagcccccagggccgcatccaccagatcgagtatgccatggaggccgtgaagcagggcagcgccaccgtgggcctgaagagcaagacccatgctgtgctggtggccctgaagagggcccagagcgagctggccgcccaccagaagaagatcctgcacgtggacaaccacatcggcatcagcattgctggcctgacagcagatgcccggctgctgtgcaacttcatgaggcaggagtgcctggacagcagatttgtgtttgaccggcccctgcctgtgtcccggctggtgtccctcatcggcagcagcatcctcttcatgatctgggccctgaccttcagcaagcctgtgcacctgctgaccatcctgacagctgagccctgccccctggagcctgtgcccaaccagctggtgctgacctggagggacatctgcctgaacctgtggagcgtcatctag

SEQ ID NO: 55645 - DNA, 495 bp, Artificial Sequence
  derived and/or modified sequence
atgttccggaaccagtacgacaacgacgtgaccgtgtggagcccccagggtcgcattcatcagattgagtatgccatggaagctgttaagcagggtagtgcgactgtcggtctcaagagcaagacacatgccgtgctggtggctcttaaaagggcacaaagcgagttagctgctcatcagaaaaagatactccatgtcgacaatcacatagggatttcgatagcagggcttacagcagatgcacgccttctgtgtaacttcatgcggcaggagtgtttagattccaggttcgtattcgaccgccccttaccggtctctagactagttagtcttatcgggtcctccatcctgtttatgatttgggcattaaccttctcaaagcctgtccacctgctgacaatcctcactgcggagccctgtcctttagaaccggtgcctaaccagctggtgctaacatggcgagatatatgtctcaacctatggagcgtgatttag

SEQ ID NO: 55646 - DNA, 495 bp, Artificial Sequence
  derived and/or modified sequence
atgttcaggaaccaatatgataatgatgtcaccgtgtggagcccgcagggacgaatccaccagatcgagtacgcaatggaagcagtgaaacagggcagtgccactgtaggcctcaagtccaaaacacacgcagtgttagtggctctgaaaagggcacagtcagaactagcagcccaccaaaagaagattttgcacgtggataaccatattggtatatctatcgcgggattgactgcggatgccaggctgctgtgcaatttcatgagacaggaatgtctggattctcggtttgtgttcgataggccactcccagtcagccggctggttagcctgattggctctagcatcctgttcatgatatgggctctcaccttctcaaagccagtccacctgcttactattcttactgccgagccttgccctttggagcctgtaccaaatcagctggtgctaacgtggagggacatctgtcttaacctgtggtctgttatctag

SEQ ID NO: 55647 - DNA, 495 bp, Artificial Sequence
  derived and/or modified sequence
atgttcagaaaccagtacgacaacgacgtgaccgtgtggagcccccagggcagaatccaccagatcgagtacgccatggaggccgtgaagcagggcagcgccaccgtgggcctgaagagcaagacccacgccgtgctggtggccctgaagagagcccagagcgagctggccgcccaccagaagaagatcctgcacgtggacaaccacatcggcatcagcatcgccggcctgaccgccgacgccagactgctgtgcaacttcatgagacaggagtgcctggacagcagattcgtgttcgacagacccctgcccgtgagcagactggtgagcctgatcggcagcagcatcctgttcatgatctgggccctgaccttcagcaagcccgtgcacctgctgaccatcctgaccgccgagccctgccccctggagcccgtgcccaaccagctggtgctgacctggagagacatctgcctgaacctgtggagcgtgatctag

SEQ ID NO: 55648 - protein, 208 aa, Artificial Sequence
  derived and/or modified sequence
MNNEEDLLQEDSTRDEGNETEANSMNTLRRTRKKVTKPYVCSTEVGETDMSNSNDCMRDSSQILTPPQLSSRMKHIRQAMAKNRLQFVRFEATDLHGVSRSKTIPAHFFQEKVSHGVCMPRGYLEVIPNPKDNEMNNIRATCFNSDIVLMPELSTFRVLPWADRTARVICDTFTVTVSGMSIGRKTCSAALLELSSSRSLGKNGWQDS

SEQ ID NO: 55649 - DNA, 627 bp, Artificial Sequence
  derived and/or modified sequence
atgaacaacgaggaggacctgctgcaggaggacagcaccagagacgagggcaacgagaccgaggccaacagcatgaacaccctgagaagaaccagaaagaaggtgaccaagccctacgtgtgcagcaccgaggtgggcgagaccgacatgagcaacagcaacgactgcatgagagacagcagccagatcctgacccccccccagctgagcagcagaatgaagcacatcagacaggccatggccaagaacagactgcagttcgtgagattcgaggccaccgacctgcacggcgtgagcagaagcaagaccatccccgcccacttcttccaggagaaggtgagccacggcgtgtgcatgcccagaggctacctggaggtgatccccaaccccaaggacaacgagatgaacaacatcagagccacctgcttcaacagcgacatcgtgctgatgcccgagctgagcaccttcagagtgctgccctgggccgacagaaccgccagagtgatctgcgacaccttcaccgtgaccgtgagcggcatgagcatcggcagaaagacctgcagcgccgccctgctggagctgagcagcagcagaagcctgggcaagaacggctggcaggacagctag

SEQ ID NO: 55650 - DNA, 627 bp, Artificial Sequence
  derived and/or modified sequence
atgaacaacgaggaagatctactacaggaagattcaacccgggatgaaggtaacgagactgaggccaacagcatgaacaccttacgccggacccgaaagaaagtgacaaagccctacgtgtgttcaacggaagtgggggagactgatatgagtaactccaatgactgtatgcgggactcttcccagatcctgaccccaccccaactctcatcccgtatgaagcatatcagacaagccatggctaagaatcgcctgcagtttgtaaggttcgaagctaccgatctgcacggagtgtccagaagtaaaacgataccggcgcatttcttccaggagaaggtctcccatggggtgtgtatgccacgcggctacctggaggtgatccctaaccccaaggacaacgagatgaacaatattcgggcaacatgtttcaatagcgacattgtcctgatgccagaactttccacttttcgtgtgctcccatgggcagaccggaccgcccgggtaatctgcgacactttcaccgtgactgtcagtggcatgagtatcggtcggaagacatgctccgctgctttattggagctctcttccagtcggtcattaggaaagaatggatggcaggacagctag

SEQ ID NO: 55651 - DNA, 627 bp, Artificial Sequence
  derived and/or modified sequence
atgaacaatgaggaggacctgctgcaggaggacagcaccagagatgagggcaatgaaacagaggccaacagcatgaacaccctgcggaggaccaggaagaaggtgaccaagccctacgtgtgcagcacagaggtgggggagacagacatgagcaacagcaatgactgcatgagggacagcagccagatcctgaccccaccccagctgagcagcaggatgaagcacatccggcaggccatggccaagaaccggctgcagtttgtgcgctttgaggccacagacctgcacggcgtgagccgcagcaagaccatcccagcccacttcttccaggagaaggtgtcccatggagtgtgcatgccccggggctacctggaggtgatccccaaccccaaggacaatgagatgaacaacatccgggccacctgcttcaacagcgacatcgtgctgatgcctgagctgagcaccttccgggtgctgccctgggccgacagaacagcccgggtcatctgtgacaccttcaccgtgacagtgtctggcatgagcatcggcaggaagacctgcagcgctgccctgctggagctgagcagcagccgcagcctgggcaagaatggctggcaggacagctag

SEQ ID NO: 55652 - DNA, 5213 bp, Artificial Sequence
  derived and/or modified sequence
gtggtttctaacgctgaacttaaaaagtgttgagatgaataatgaagaggaccttctgcaggaggactcaacaagagatgaaggcaatgagactgaagccaacagcatgaacacattaagaaggacaaggaagaaagtcactaaaccatatgtttgttcaactgaagtgggagaaacggatatgtccaattcaaatgattgcatgagggacagcagtcaaattttgaccccacctcaactctcttctagaatgaaacacattagacaagccatggccaaaaatcgcctccagtttgtacgatttgaagcaacagacctccacggcgtgtccaggtctaagactatccctgcacacttttttcaagagaaagtgagccatggtgtttgcatgccccgaggttatcttgaagtgataccaaatccaaaggacaatgaaatgaataacataagagccacatgttttaatagcgacatagtcctaatgccagagttatcaacctttagagttttgccatgggctgacagaactgcaagagtgatatgtgataccttcactgtgactgtctctgggatgtcgataggaagaaaaacatgttctgcagcacttctggaactgagcagctcacgatcactgggaaaaaatggttggcaggactcttgaagcactctgctgcgctcagctgcctgatggcgccttctgttagctgccgaaagcgttattccaaggacaggaaagacctgaagaagagtgtgcctacaacatggggatacaatgacaacagctgtatatttaatatcaaatgtcatggagagaaaggcacccggatagaaaataaactaggctcagcaacagcaaacccttacttggtgctggctgcaactgttgctgccggcttagatggacttcatagcagtaatgaggtcttggctggtccagatgagagcacagacttttaccaagtggaaccttctgagatccctttaaaactagaagatgcccttgtggcactggaagaagatcaatgcctgagacaggctctaggagaaacctttattcgatattttgttgccatgaagaaatatgagttggagaatgaagaaatagctgcagagagaaataaattcttagagtattttatttagaatagagctcacaactactcctttagacatgtaattgttacttaaagctaatctaccaaaacaaaaagactgaacttttgtaattaacaacagcaacaataacaagattacgaatgcttttgacttttttttttgtccatggaatatttgacagatgaagtaggactgctgagaagattctgataacagaaacaaacaacaaagttgtggtgaagctataatatgcaaacttaccagatcttgtcagtcatttcctatgtgtatgttgacctggataagaatatccaattttgggtggcaataaatatattcgcacattaagaaaaaaaagacttaagcattagaaagcaaaatttaaatgactaaaaaagaaaaaaaagaaaaggagaaaaaattttaatggtacacataggttatgatttccagggagacaaatatactaatatagtctcgctaatcaaataatattgtgaatccaggttgtatgcaccattatggtctttctaaacaagttaaataaacttttgccaaaatataatgacaggtaggcagttttcccctaagtctcttctcttttcacccttctccactagctcctgaaaagcttatgaacttcaaggttataatgtcctcaagaaacaaatccctaaggaatagaattggagctgagaacaacgaggtcagattttaaaagtagttaaagcctttcttttaacaatgcctcatatagaagttcaatacacaaagtatagatagaaagatgtttgtgtgtgagggtaggtgggctctgtctactctgcttcattctttgaaactagatgttcctctgaaacctctagtgctctgtggagtgtgagaacaactgcctggctagccagggctatgtttggagtttaagtttgttattcaaattactgaatctgctgctcacagaggttggtacctccccagagaatattacctgttccaggcctttgtttgaatgagataatattgtaactatcacaaaagtttagctgcttttgggaagaagtccaaaatccacttactagcaaatgaaacattattctactgcttaggatcaaacagcagattttatgttcaattaaaactgactgtagtctcaatttagatagcaattgcacaagcagaggattagaatttggctcagatcctcttattaaaattcatattactcagtagcttaaatagtgaaagtcagtctatccttcactaattactcccttcttttttcctttgagcaggagaagtgtgtttggatacataagaagaaagttcccagcactttgggaggccaaggcaggaggattgcttgaggccaggagtttgagtccagcctggaccacatagtgagacccctgtttctacaaaaaaaaaaaaaaaaatgcctcgcatggtggcacatgcctgtagtcccagctacgtgggaggctgagaagggaggatcgcttgagcctgggagtttcaggctgcagtgagccataatcacaccactgcactccagcttgggtgacagagtgagacactgtcttaaaaaaaagagaagaataaaattcatggatgcatatggggtagagagaaagatagtgtagggtagctgggggaaggaagggaacctgtcctgaaacctccagaatgaaatcccacacattacatcatgggagggataaggaagactctcatgccaattttctagctgtctgctagaaaattcccctctgttcattttcccctctgttctcagtaataaaacctcaatatgttctttgaaagcaatgaaaaatgaaatgatatttctgagccttcattaaggttggatgtggtcatgttattaggttcagtgcaaagaggtgaaagtagaagtgttgcatataagttctttaggacattttcttttcttttcttgtattttttttttttttccgagatggagtctcgctttgtcacccaggctgaagtgcaatgtgggggggtcttggctcactgcaacctctgccccctgggttcaagtaattctcctgcctcagcctcccaagtagctgggatcccaggtgcctgctaccatgcctggccttttagtagagatggggtttcaccatattggccagtctggtcttgaactcctgaactcaggtgatcagcctgccttggcctcccaaagtgctaggattacaggcatgagccaccatgccctaccacactttagaacatttttttaaatgacggatgctgtgtgctctgccctttctttctcttgctgccttcacccttcctgctgagtggcctacagataatgtggctaggattatgtccttgggaagggaggtttgctccacagggtacagtaataaggtggaatctctgctttgtagagcagtttgacttgcctacatccagatgtttacctgagagagaaccaaacttctatcttctttaagccacaatgattttgattctttgttagttgcaatgaaatttattttctcttttccatgtgtgtgttgtatgtgtgtttgtgtgtgagtgtgtgcatatgagtggggaatttgagggatttggggatgaaagaacaaaggtataagaaccagtgaaagacgacttcctcaatattcccacttctagagaggataatctgagttaatcaaagggatccacacatccaaaaaatgggattggctctaacccatccctataaagtggcatatccctttatagtccacgggccttaatgaaacatgtctaatgcattgacttcattttaccataatgagtaaagatgctgtaaaaagtctgataatcacagtgtttgaagccgttttttcccctttcgcattattagcataacttaaaaacacagtactcaggatgccatgtgaaggaattatataactaggaatattatcttcagtattaagtgtacagtcgtgagtcaaagaaaatattcagccatagattacaaatcagttgataacgtaagttggtgtggcagtttccaccaagatttcagttaggtgtgtgctgatgtatattcttgttctttaaggcaacccaaaaagaggcattggccagcagagttcagggccaaagacaaattggggtaggtacatgtaaaaatcagttatctatttttctatttctttcatctgttcataggctttctattgttgaaaggactttctgctgatgcttctaccttcttggtctgggttaagagggtcagacattcattcagcagcacttattgagcaccatttgtgtgctaagccttcagctgggagccatcatactaggggagaccaaaacaaagatgagcagacaatgaaagagttttggatctgtgtatcttaagcagaacataaataattttttttgtagacctaatgctgaaaaaagctatttggaaagcttctttatggctcgaaaagggtgccttataaatagctttacaaaaattgctttcttattttcatttactataattgttctaatcaaagcttaggggaaaaatgtgattactgaatttaaagttggtaattaaatgagtatacataagaaatgtaaattaaaagcgataatattttaagactagaaattaaaacattagtattgtagtaacaagtttctattttcaaggacattctataatctaaaatttcattttacagtgtgtgaataacaacaacgcttgaaatgattatttgaaggcaatgaaagatcaaaaaactttaatctgaataaaaattgaaagcatacagtgaagtctgagcttatcagtaaaacagaacagtctattgacatatctccagtcacctgtttgacaaaatacactcaccaatatgtttatgatataggtatgactggacaatacctttaaccttgggttttctatgacaggggtaagaatttgtgtctttaaacattacctatgtgcacagtgccttccctgttaaagctcttctcatgctgcctataattaggggtttacatgatacttcctaattgctaattaggatgtgaattctcagaataaaaggtacagatcttactta

SEQ ID NO: 55653 - DNA, 627 bp, Artificial Sequence
  derived and/or modified sequence
atgaacaacgaggaggacctgctgcaggaggacagcacccgggacgagggaaatgagactgaagcgaactcaatgaacacacttcggagaacacgaaaaaaggtaacaaaaccgtacgtatgcagcacagaggttggagagacagatatgtctaacagcaatgattgcatgcgagactctagtcagatactgacaccccctcagctcagcagtagaatgaaacatataaggcaggccatggctaaaaaccgccttcagtttgtgcgattcgaagctaccgacctacacggggtgtcaagaagtaaaaccatccccgctcacttcttccaggaaaaggtttcacacggggtatgtatgccccggggctatcttgaagttatccctaatccaaaggacaacgaaatgaacaatatcagagcaacctgcttcaatagcgacatcgtgttgatgcctgagctgtccacttttcgtgtgctgccttgggccgaccggaccgctcgggttatttgtgataccttcactgtcaccgtatcggggatgtcaattggaaggaagacctgctctgccgctctgcttgaattgtcctcatcaaggagcctgggtaaaaacggttggcaagattcatag

SEQ ID NO: 55654 - DNA, 627 bp, Artificial Sequence
  derived and/or modified sequence
atgaacaacgaggaagacttgttgcaggaggatagcactagggacgaagggaatgaaacagaagccaatagcatgaataccttgaggcggaccaggaagaaagtaaccaagccctatgtgtgctcgaccgaggtcggggagacggatatgagcaactctaatgactgcatgagggacagcagccagattttaaccccacctcagcttagcagcagaatgaagcacatccggcaggctatggcaaagaaccggttgcagttcgttcggttcgaggcgactgaccttcacggagtgtccaggagcaagaccattcctgcacatttctttcaggagaaggtttcccatggagtatgtatgccacgtggttacctcgaagtgatccccaaccccaaggacaacgagatgaacaacatacgtgccacctgctttaactcggatattgtcttaatgccggaattatccacctttcgagttctcccctgggcggatcgaactgcacgcgtaatctgcgatacattcaccgtgaccgtgagtggaatgtctattgggcgaaagacgtgtagtgccgctctgctggaactatcctcatcgcggtccctggggaagaatggttggcaagacagttag

SEQ ID NO: 55655 - DNA, 606 bp, Artificial Sequence
  derived and/or modified sequence
atggaggcccaggagtacatcgccaacgtgaccagcagcagcagcgccaagttcgaggccgccctgacctggatcctgagcagcaacaaggacgtgggcatctggctgaagggcgaggaccagagcgagctggtgaccaccgtggacaaggtggtgtgcctggagagcgcccaccccagaatgggcgtgggctgcagactgagcagagccctgctgaccgccgtgaccaacgtgctgatcttcttctggtgcctggccttcctgtggggcctgctgatcctgctgaagtacagatggagaaagctggaggaggaggagcaggccatgtacgagatggtgaagaagatcatcgacgtggtgcaggaccactacgtggactgggagcaggacatggagagatacccctacgtgggcatcctgcacgtgagagacagcctgatccccccccagagcagaagaagaatgaagagagtgtgggacagagccgtggagttcctggccagcaacgagagcagaatccagaccgagagccacagagtggccggcgaggacatgctggtgtggagatggaccaagcccagcagcttcagcgacagcgagagatag

SEQ ID NO: 55656 - DNA, 165 bp, Artificial Sequence
  derived and/or modified sequence
atggaggcccaggagtacatcgccaacgtgaccagcagcagcagcgccaagttcgaggccgccctgacctggatcctgagcagcaacaaggacgtgggcatctggctgaagggcgaggaccagagcgagctggtgaccaccgtggacaaggtggtgtgcctgtag

SEQ ID NO: 55657 - DNA, 606 bp, Artificial Sequence
  derived and/or modified sequence
atggaggcccaagagtacatcgccaacgtgaccagcagctcatcagccaaattcgaagctgcactgacttggattttatcaagcaacaaggatgttggcatctggctcaaaggggaggaccagtccgagctcgtcaccactgtggataaggtagtgtgtctggagagtgcccaccctcggatgggagtcgggtgccgcctctctcgggcactgctaaccgccgtgacaaacgtccttatatttttttggtgccttgcattcttgtgggggttactcatcctgctcaagtacaggtggcgcaagctggaggaggaagaacaggctatgtatgagatggttaaaaaaatcatcgatgtagtacaagatcattacgtggactgggaacaggacatggagagatatccctatgtgggaattcttcacgtaagagattcattgatccccccacagtcccggcggcggatgaagcgcgtgtgggatcgggcggtggagtttctagcttcgaacgagtctcgcatccaaactgagtcccacagggtagccggtgaggatatgcttgtgtggcgatggacaaagcctagctctttttccgacagcgaacggtag

SEQ ID NO: 55658 - DNA, 165 bp, Artificial Sequence
  derived and/or modified sequence
atggaggcacaggaatacatcgcgaatgtcacctcatcatcctccgccaagttcgaagcagcacttacatggattctgagcagtaacaaggacgtgggaatctggctgaagggcgaggaccagagcgaactcgtaactaccgtagacaaggtggtctgcttgtag

SEQ ID NO: 55659 - DNA, 606 bp, Artificial Sequence
  derived and/or modified sequence
atggaggcccaggagtacatcgccaacgtgaccagcagcagcagcgccaagtttgaggccgccctgacctggatcctgagcagcaacaaggatgtgggcatctggctgaagggggaggaccagagcgagctggtgaccaccgtggacaaggtggtgtgcctggagagcgcccaccccaggatgggcgtgggctgccgcctgagccgggccctgctgacagctgtgaccaacgtgctgatcttcttctggtgcctggccttcctgtggggcctgctgatcctgctgaagtaccgctggaggaagctggaggaggaggagcaggccatgtatgagatggtgaagaagatcattgatgtggtgcaggaccactacgtggactgggagcaggacatggagcgctacccctacgtgggcatcctgcacgtgcgggacagcctcatccccccccagagcagaagaaggatgaagagggtgtgggacagagctgtggagttcctggccagcaatgaaagccgcatccagacagagagccaccgggtggccggggaggacatgctggtgtggcgctggaccaagcccagcagcttcagtgacagcgagaggtag

SEQ ID NO: 55660 - DNA, 165 bp, Artificial Sequence
  derived and/or modified sequence
atggaggcccaggagtacatcgccaacgtgaccagcagcagcagcgccaagtttgaggccgccctgacctggatcctgagcagcaacaaggatgtgggcatctggctgaagggggaggaccagagcgagctggtgaccaccgtggacaaggtggtgtgcctgtag

SEQ ID NO: 55661 - DNA, 606 bp, Artificial Sequence
  derived and/or modified sequence
atggaggcccaggagtacatcgccaacgtgaccagcagcagcagcgccaagttcgaggcagctctgacttggatcctgtctagcaataaagatgtgggtatatggctgaagggggaggatcagtctgagttagtaacgaccgtagataaagttgtgtgcctcgaatcggctcaccctagaatgggggtagggtgccgtctttctcgcgccctgctgacggccgtcaccaacgtgctgatcttcttttggtgtttagcttttctgtggggccttctcattttgctgaagtaccgttggcgcaaactcgaagaggaggagcaggctatgtacgagatggttaaaaagataattgacgttgtgcaggatcattacgtggattgggagcaggacatggaacgatatccctatgtgggtatattgcatgtgcgggactccctgattcctccacagagccgtcgccgaatgaagagggtatgggaccgggcggtcgagtttctggcttcaaatgagagtcggattcagaccgagtctcatcgggtggcaggagaggatatgctcgtttggcgatggactaagcccagctctttctcagattctgaacgctag

SEQ ID NO: 55662 - DNA, 165 bp, Artificial Sequence
  derived and/or modified sequence
atggaggcccaggagtacatcgccaacgtgaccagcagcagcagcgcaaaattcgaggcagccctaacatggatcctaagctctaataaggacgtggggatctggcttaaaggggaggatcagagtgaattggtaactacggtggataaagtcgtgtgcctgtag

SEQ ID NO: 55663 - DNA, 606 bp, Artificial Sequence
  derived and/or modified sequence
atggaagcgcaagaatatatcgccaacgtgacaagctcttcaagcgccaaatttgaagctgcactgacttggatcctatcatctaacaaggatgtaggtatctggttgaagggcgaggaccagtctgaactggttacaacagttgataaagtcgtgtgtctggagtctgcccaccctaggatgggtgtggggtgcagactttctagggccttgttgacagcggtgaccaatgtcctcatctttttctggtgtctggcctttttgtggggactgttgatcctgctcaagtataggtggcgcaaactcgaggaagaagagcaggccatgtacgagatggtcaagaagataattgatgtagtacaggatcactacgtggactgggagcaagacatggaaagatacccttacgtgggtatactccacgttagagactccctcatccccccacagtcccgacgccgtatgaagagggtgtgggatcgcgcagtggaattcttggccagtaacgagtcacgcatacagactgagtctcaccgtgttgccggagaggacatgctggtgtggagatggactaagccctcttcttttagcgactctgaaaggtag

SEQ ID NO: 55664 - DNA, 165 bp, Artificial Sequence
  derived and/or modified sequence
atggaagctcaggaatatatcgcaaatgtcacatccagttcgagcgccaagtttgaggctgcactcacctggatactgagctctaataaggatgtcggaatctggctcaaaggcgaagatcagagtgagcttgtgaccacggttgataaggtagtgtgcctctag

SEQ ID NO: 55665 - protein, 415 aa, Artificial Sequence
  derived and/or modified sequence
MDRSLRNVLVVSFGFLLLFTAYGGLQSLQSSLYSEEGLGVTALSTLYGGMLLSSMFLPPLLIERLGCKGTIILSMCGYVAFSVGNFFASWYTLIPTSILLGLGAAPLWSAQCTYLTITGNTHAEKAGKRGKDMVNQYFGIFFLIFQSSGVWGNLISSLVFGQTPSQGSGVLAVLMIAAFLQPIRDVQRESEGEKKSVPFWSTLLSTFKLYRDKRLCLLILLPLYSGLQQGFLSSEYTRSYVTCTLGIQFVGYVMICFSATDALCSVLYGKVSQYTGRAVLYVLGAVTHVSCMIALLLWRPRADHLAVFFVFSGLWGVADAVWQTQNNALYGVLFEKSKEAAFANYRLWEALGFVIAFGYSMFLCVHVKLYILLGVLSLTMVAYGLVECVESKNPIRPHAPGQVNQAEDEEIQTKM

SEQ ID NO: 55666 - DNA, 1248 bp, Artificial Sequence
  derived and/or modified sequence
atggacagaagcctgagaaacgtgctggtggtgagcttcggcttcctgctgctgttcaccgcctacggcggcctgcagagcctgcagagcagcctgtacagcgaggagggcctgggcgtgaccgccctgagcaccctgtacggcggcatgctgctgagcagcatgttcctgccccccctgctgatcgagagactgggctgcaagggcaccatcatcctgagcatgtgcggctacgtggccttcagcgtgggcaacttcttcgccagctggtacaccctgatccccaccagcatcctgctgggcctgggcgccgcccccctgtggagcgcccagtgcacctacctgaccatcaccggcaacacccacgccgagaaggccggcaagagaggcaaggacatggtgaaccagtacttcggcatcttcttcctgatcttccagagcagcggcgtgtggggcaacctgatcagcagcctggtgttcggccagacccccagccagggcagcggcgtgctggccgtgctgatgatcgccgccttcctgcagcccatcagagacgtgcagagagagagcgagggcgagaagaagagcgtgcccttctggagcaccctgctgagcaccttcaagctgtacagagacaagagactgtgcctgctgatcctgctgcccctgtacagcggcctgcagcagggcttcctgagcagcgagtacaccagaagctacgtgacctgcaccctgggcatccagttcgtgggctacgtgatgatctgcttcagcgccaccgacgccctgtgcagcgtgctgtacggcaaggtgagccagtacaccggcagagccgtgctgtacgtgctgggcgccgtgacccacgtgagctgcatgatcgccctgctgctgtggagacccagagccgaccacctggccgtgttcttcgtgttcagcggcctgtggggcgtggccgacgccgtgtggcagacccagaacaacgccctgtacggcgtgctgttcgagaagagcaaggaggccgccttcgccaactacagactgtgggaggccctgggcttcgtgatcgccttcggctacagcatgttcctgtgcgtgcacgtgaagctgtacatcctgctgggcgtgctgagcctgaccatggtggcctacggcctggtggagtgcgtggagagcaagaaccccatcagaccccacgcccccggccaggtgaaccaggccgaggacgaggagatccagaccaagatgtag

SEQ ID NO: 55667 - DNA, 1248 bp, Artificial Sequence
  derived and/or modified sequence
atggaccgcagccttagaaacgtgttggtcgtgagcttcggatttttacttttatttaccgcgtacggagggctccagagcctacaatcctccttatatagtgaggaaggactcggagtgactgccctctctacactgtatggtggtatgctcctgagttccatgttcctccctccactcctcatcgaacgcctgggctgcaaggggaccattatcctgagcatgtgcgggtacgtagccttttctgtgggcaatttcttcgcatcatggtacacactgatcccgaccagcatcctcctgggtctgggagccgccccgctgtggagcgctcagtgcacatacctaacgatcacagggaatacccatgcagagaaagcaggaaagaggggcaaagacatggtgaatcagtactttgggatcttcttcctaatatttcagagctccggcgtgtggggaaatctaatttcaagccttgtgtttgggcaaacaccgagccagggctctggagtccttgcagttctgatgattgctgcttttttacagccaatcagggacgtccagagagaatccgaaggagaaaagaaaagtgtacctttctggtctaccctcttatctactttcaaattgtatagggataaaaggctctgtctactaattttgctcccactatactctggattgcagcagggattcctttcctctgaatacacaagaagttacgttacatgtacgctgggtattcagttcgtaggttacgtaatgatttgtttttctgctacagatgcgctgtgttcagttctttatggtaaggtcagtcagtacactggccgggccgtgttgtacgtgctgggcgcagtcacacacgtttcctgtatgattgcccttcttctctggcgcccgcgcgccgaccatttagctgtgtttttcgtctttagcggcctgtggggtgtggcagacgccgtgtggcagacccagaataacgccctgtatggagtattgttcgaaaagtctaaggaagccgcatttgctaactacagattgtgggaagccctaggctttgtcatagcctttggttacagtatgtttctgtgtgtgcacgtcaaactttacattctgctgggtgtactgagtcttactatggtggcttacggactcgttgaatgtgtcgaaagcaaaaacccaattcggcctcatgcacccgggcaggtgaaccaggcagaagatgaggaaattcagaccaagatgtag

SEQ ID NO: 55668 - DNA, 1248 bp, Artificial Sequence
  derived and/or modified sequence
atggacaggagcctgagaaatgtgctggtggtgtcctttggcttcctgctgctcttcaccgcctacggcggcctgcagagcctgcagagcagcctgtacagcgaggagggcctgggcgtgacagccctgagcaccctgtatggaggcatgctgctgagctccatgttcctgccccccctgctgattgaaaggctgggctgcaagggcaccatcatcctgtccatgtgtggctacgtggccttctctgtgggcaacttctttgcctcctggtacaccctcatccccaccagcatcctgctgggcctgggcgccgcccccctgtggagcgcccagtgcacctacctgaccatcaccggcaacacccatgctgagaaggccggcaagaggggcaaggacatggtgaaccagtacttcggcatcttcttcctgatcttccagagcagcggcgtgtggggcaacctgatcagcagcctggtgtttggccagacccccagccagggcagcggcgtgctggccgtgctgatgattgctgccttcctgcagcccatcagagatgtgcagcgggagagcgagggggagaagaagtctgtgcccttctggagcaccctgctgagcaccttcaagctgtacagagacaagaggctgtgcctgctgatcctgctgcccctgtacagcggcctgcagcagggcttcctgagcagcgagtacaccaggagctatgtgacctgcaccctgggcatccagtttgtgggctacgtgatgatctgcttcagcgccacagatgccctgtgcagcgtgctgtatggcaaggtgtcccagtacacaggccgggctgtgctgtatgtgctgggcgctgtgacccacgtgtcctgcatgattgccctgctgctgtggaggcccagggctgaccacctggccgtgttctttgtgttcagcggcctgtggggcgtggctgatgctgtgtggcagacccagaacaatgccctgtatggagtgctgtttgagaagagcaaggaggccgcctttgccaactaccgcctgtgggaggccctgggctttgtgattgccttcggctacagcatgttcctgtgtgtgcacgtgaagctgtacatcctgctgggcgtgctgagcctgaccatggtggcctacggcctggtggagtgtgtggagagcaagaaccccatccggccccacgcccctggccaggtgaaccaggctgaagatgaggagatccagaccaagatgtag

SEQ ID NO: 55669 - DNA, 1248 bp, Artificial Sequence
  derived and/or modified sequence
atggaccggagcctgcggaacgtgctggtggtgagcttcggcttcttgctgcttttcaccgcctacggagggcttcagtcccttcagtcttctctgtatagcgaagaaggtctgggtgtgaccgcactctctaccctgtatggcggcatgctgttgtcatctatgtttttaccccccttattgatcgaaagactggggtgtaagggaaccatcatactgagtatgtgcgggtacgtggcctttagcgtgggaaatttcttcgcctcttggtacaccttaatccctactagcattctgctggggttgggcgcagcacctctgtggtcagcccagtgtacatatctcacgatcactggaaatacgcacgccgaaaaggcgggtaagcgggggaaagacatggtgaatcagtattttggtatcttcttcctgatcttccagtcatccggagtgtggggaaacctgatcagctcactggtgttcggtcagacaccgtctcagggatctggggtgctggctgttctgatgatagccgcctttctgcagccaatacgcgacgtgcagcgggagtctgaaggcgagaaaaagtcagtccccttctggagcacactcctgtccacgtttaagctataccgtgacaaaagactttgtctgctgattttgctgccactatattcagggctgcagcagggcttcctgtcatcagaatacaccagatcctacgtgacctgcaccctcgggatccagtttgttggctatgtgatgatatgtttcagcgcaaccgacgctttgtgtagcgtgctgtatggcaaggtgtctcagtacacggggcgagcagtgctttacgtccttggcgcagttacacatgttagctgcatgattgcattgttgttgtggagacccagagccgaccacctcgccgtctttttcgttttctctggcctctggggagtggccgacgcggtttggcagacccagaacaacgccctttacggagtgctgtttgagaagtccaaagaggctgctttcgccaactacagactttgggaagctctgggcttcgtaatcgccttcggatatagtatgtttttgtgcgtacacgtgaagctttacatattactgggggtgctgtccctgaccatggtcgcttatggactggtggaatgtgtggaatccaaaaacccgatccgaccccatgcgcccggtcaggttaaccaggctgaagatgaagaaatacaaacaaaaatgtag

SEQ ID NO: 55670 - DNA, 1248 bp, Artificial Sequence
  derived and/or modified sequence
atggatcgatccctccggaatgtgctggtcgtgtcattcggtttccttttactgtttactgcgtatgggggactgcagagcctccagtcgtccttatattcagaggaagggcttggcgtgactgcactgagcacactctatggaggcatgctcctgtcatccatgtttctgccccctctcttgatcgagaggctcggctgcaaaggtacgattatattgagcatgtgtggctatgtagcatttagcgtgggcaattttttcgcaagctggtacaccctcatccccacaagcatacttctggggctcggagctgctcccttatggagcgcccagtgcacgtacttgacgatcacaggtaatactcacgctgagaaagccggaaagcggggtaaagacatggtaaaccagtattttgggatcttcttcctcatcttccaatcatcgggcgtgtggggtaacctcataagcagcctggtatttggacaaaccccctcccagggcagtggcgtcctggcagtcctcatgatcgccgcttttctccagcctataagggacgtgcagcgggagtccgaaggcgagaaaaaatcggtgccattctggagcacactgctcagtacctttaagctgtatagagataagcgcttatgccttctcattcttttgcccctgtattctggcctgcagcagggtttcctctcctccgagtatactcgtagctatgtgacctgcacgctgggcattcaattcgttggctacgtcatgatctgcttttcagcgacggacgctctttgctctgtactctatggtaaggtgagccagtacacagggagagccgttctgtacgtgctgggagccgttactcatgtcagctgcatgatcgctcttctgttgtggaggccaagggccgaccacctggctgtattcttcgtcttttctgggctgtggggagtggctgacgctgtttggcagactcagaacaatgctctttatggagtattgttcgaaaaatccaaggaagctgctttcgctaactatcgtctgtgggaagccctgggtttcgtgattgcattcggttactccatgtttctgtgtgtgcacgtgaaattgtacatactgctcggtgtgctttccttgaccatggtagcctatggcctggttgagtgtgtggagagtaagaatcccatccggcctcacgctccaggacaggttaatcaagctgaagatgaggaaattcaaaccaagatgtag

SEQ ID NO: 55671 - DNA, 1810 bp, Artificial Sequence
  derived and/or modified sequence
ggtgattgatcttttcatccagcacaatggacagaagtctaaggaacgtccttgtggtttcctttgggttcctgcttctctttacagcctatggaggtctgcagagcctgcagagcagcctgtacagcgaggagggcctgggtgtcacagcgctcagcaccctctatggaggcatgctcctgtcctccatgttcctcccaccgctcctcatcgagaggctgggctgcaaggggaccatcatcctctccatgtgtggctacgtggccttctccgtgggcaacttcttcgccagctggtacactttgatccccacctccatactgctgggactcggggccgccccgctgtggtctgcacagtgcacatacctcacgatcacgggaaacacacatgcagagaaggcgggaaagcgtggcaaagacatggtgaaccagtattttggcatcttcttcctcatattccagtcatccggtgtgtggggcaacttgatctcatcgctggtatttggccagactcccagccaagggagtggtgtcctggctgtcctgatgatagctgcgttcctccaacccatacgagatgttcagcgggaaagtgaaggagagaagaaatcagtacctttctggtccactttactgtcgactttcaagctatatagagataaacgtctgtgcctcttaattctgctgccgctgtacagtggattgcagcaaggattcctctccagcgaatacacaaggtcctatgtcacctgcaccctgggcatccagttcgtcggctacgtgatgatctgcttctcggccactgacgcgctgtgctccgtgttgtatggaaaggtctcgcagtacacgggcagggctgtgctgtacgtgctgggcgcggtgacccacgtgtcctgcatgattgccctactgctgtggagacctcgtgctgaccatctggcagtgttcttcgtattctctggcctgtggggcgtggcagatgccgtctggcagacacaaaacaatgctctctacggcgttctgtttgagaagagcaaggaagctgccttcgccaattaccgcctgtgggaggccctgggcttcgtcattgccttcgggtacagcatgtttttgtgcgtgcacgtcaagctctacattctgctgggggtcctgagcctgaccatggtggcgtatgggcttgtggagtgcgtggagtccaagaacccgatcagaccccacgctccaggacaggtcaaccaggcagaggatgaagaaatacaaacaaaaatgtgagagcagtgaggtccgaggaggatgaactcagaaagcaccagccagagaattttcttagaagatgcctcaggacatagagcggctcctcatcaccatctcagcacaatttggccattctgaagagatcatgttatttcactcttcatgtattttttttctattctaacaaatttttcgtccaccatcttaacagagatcaagtgtatacatgaaggtatcagttcatttaattttagatgcaaaagaaaaaggtctaacgtacaatcagccaattagaatttgcctgaaatcatagactcaccctagttttattgctgtagttgtttttaagaattggaagcctgcttaaaaaatgtagttgagccccataattttacaaatgggcgaacttttaaacttctaactctacttggatcaaaacctcatacattttacaaaggggtcctgacaagtcagctgactcaacctcacagagtcagggggtgacaaagccagactggggctcaggattcctgaaacgtgtggggtctgcgttt

SEQ ID NO: 55672 - protein, 248 aa, Artificial Sequence
  derived and/or modified sequence
MTKTSTCIYHFLVLSWYTFLNYYISQEGKDEVKPKILANGARWKYMTLLNLLKNRTAGFDIYQPGSFRQLLQTIFYGVTCLDDVLKRTKGGKDIKFLTAFRDLLFTTLAFPVSTFVFLAFWILFLYNRDLIYPKVLDTVIPVWLNHAMHTFIFPITLAEVVLRPHSYPSKKTGLTLLAAASIAYISRILWLYFETGTWVYPVFAKLSLLGLAAFFSLSYVFIASIYLLGEKLNHWKWGDMRQPRKKRK

SEQ ID NO: 55673 - DNA, 747 bp, Artificial Sequence
  derived and/or modified sequence
atgacaaagacctccacctgcatctatcactttcttgtcctgagttggtacaccttcctcaattactacattagtcaggaaggaaaggacgaggtaaaaccaaaaatactggcaaacggagcccgctggaaatatatgacactgctgaatttgctgaagaaccgaaccgccggcttcgatatttatcaaccaggttcattcaggcagctgcttcagaccatattttacggcgtgacctgcctcgatgacgtactcaagaggaccaaaggaggtaaggacatcaagttcctgacggcctttagggatttgctgttcactactctcgcctttccggtcagcacatttgtattcctcgccttttggatacttttcctgtacaaccgagacctgatatatccaaaagtgctggatacagtcattcctgtttggctaaaccacgcaatgcacaccttcatattccccattactctagcggaagtggtgttgcggcctcattcctaccctagtaagaagactggcctgaccctgctggctgctgcctccatcgcatacatttctcgcatcctgtggctgtacttcgaaaccggaacctgggtgtaccccgttttcgcaaagttgagcttactgggtcttgccgcctttttctctctgtcttacgtgtttatcgctagcatatatctattaggtgagaaactcaaccactggaagtggggggatatgcgacagcccagaaagaagcgcaaatag

SEQ ID NO: 55674 - DNA, 747 bp, Artificial Sequence
  derived and/or modified sequence
atgaccaagaccagcacctgcatctaccacttcctggtgctgtcctggtacaccttcctgaactactacatcagccaggagggcaaggatgaggtgaagcccaagatcctggccaatggagcccgctggaagtacatgaccctgctgaacctgctgaagaacagaacagctggctttgacatctaccagcccggcagcttccggcagctgctgcagaccatcttctacggcgtgacctgcctggatgatgtgctgaagaggaccaagggcggcaaggacatcaagttcctgacagccttccgggacctgctcttcaccaccctggccttccctgtgtccacctttgtgttcctggccttctggatcctcttcctgtacaacagagacctgatctaccccaaggtgctggacaccgtcatccctgtgtggctgaaccacgccatgcacaccttcatcttccccatcaccctggccgaggtggtgctgcggccccacagctaccccagcaagaagacaggcctgaccctgctggccgccgccagcatcgcctacatcagccgcatcctgtggctgtactttgaaacaggcacctgggtgtaccctgtgtttgccaagctgagcctgctgggcctggccgccttcttcagcctgtcctatgtgttcatcgccagcatctacctgctgggggagaagctgaaccactggaagtggggagacatgaggcagcccaggaagaagaggaagtag

SEQ ID NO: 55675 - DNA, 747 bp, Artificial Sequence
  derived and/or modified sequence
atgaccaagaccagcacctgcatctaccacttcctggtgctgagctggtatacttttctgaactattatatatctcaggaggggaaagacgaagtgaaacccaagatcctcgctaatggagcccgctggaaatatatgacgctcctcaatcttttgaaaaaccggacagccggatttgatatctaccagcccgggtctttcagacagctgctgcagacgattttttatggggtcacatgtcttgacgacgtgttaaaacgaactaaagggggaaaagatataaagtttctgactgcgtttagggacctgctctttactacactggcattccccgtgtcgactttcgtgtttttggcattctggatcctgttcctgtacaatagagacctcatctaccccaaggtactggacactgtgattccagtttggctcaaccacgccatgcataccttcatctttccaatcactctggctgaagtggttctccgccctcattcatatccaagcaaaaagacagggttaacattgctcgccgccgcctccatagcctacatatctcgcatcttatggctctacttcgagactggtacatgggtctacccagtcttcgccaaactttccctgctcggtctcgctgctttctttagtctatcatatgtgttcattgcctcaatctacctgctcggggaaaaacttaaccattggaagtggggcgacatgcggcaacctcgcaaaaagcgcaaatag

SEQ ID NO: 55676 - DNA, 747 bp, Artificial Sequence
  derived and/or modified sequence
atgaccaaaacctcgacctgtatctatcactttcttgtcctcagctggtacactttcttgaattattacatctctcaggagggtaaggatgaggttaagcctaaaatcttggccaatggagctagatggaagtatatgaccctcttaaatctgctgaagaacaggactgctggtttcgacatttaccaacccggatcatttcgacagttgctgcaaaccattttctacggtgttacctgtcttgacgacgttctcaaacggacaaagggcggaaaggacataaagttcctaacagctttccgcgacttgctgttcaccacattagcattcccagtgtcgacctttgtcttcctagcgttttggatcctgttcctgtataaccgggatttgatctaccccaaagtcttggacaccgtgattccagtgtggttgaaccacgccatgcacacatttatttttccaatcaccctggctgaagtggttcttcggccacactcatacccctctaaaaaaacaggcctgactctcctcgcggcagctagtatcgcctacatctctaggatactgtggctttatttcgagaccggaacatgggtttaccccgtgttcgccaaattgtcactgctgggcctagccgctttctttagcctctcttatgttttcatcgcaagcatatatctgcttggagaaaaactcaaccactggaagtggggagatatgagacagccacgaaagaagcgtaagtag

SEQ ID NO: 55677 - DNA, 891 bp, Artificial Sequence
  derived and/or modified sequence
agaaagtactcaagacattcacggtgccccggtcagcactcgccatgacgaagacttctacatgcatataccacttccttgttctgagctggtatactttcctcaattattacatctcacaggaaggaaaagacgaggtgaaacccaaaatcttggcaaatggtgcaaggtggaaatatatgacgctgcttaatctgctcaagaacaggactgctgggtttgacatctaccagccaggaagctttaggcagctcttgcagaccattttctacggggtcacctgcctggatgatgtgctgaaaagaaccaaagggggaaaagacattaagttcctaactgccttcagagacctgcttttcaccactctggcttttcctgtatccacgtttgtatttttggcattctggatcctctttctctacaatcgagatctcatttaccccaaggtcctagatactgtcatccccgtgtggctgaatcatgcaatgcacactttcatattccccatcacattggctgaagtcgtcctcaggcctcactcctatccatcaaagaagacaggactcaccttgctggctgctgccagcattgcttacatcagccgcatcctatggctctactttgagacgggtacctgggtgtatcctgtgtttgccaaactcagcctcttgggtctagcagctttcttctctctcagctacgtcttcatcgccagcatctacctacttggagagaagctcaaccactggaaatggggtgacatgaggcagccacggaagaagaggaagtaattgcacaccattttccaagaaccaagaaagaagaaaacacaagagatttttctcatcttttttttttttttctggtggagggaggtggtggaggaacata

SEQ ID NO: 55678 - DNA, 747 bp, Artificial Sequence
  derived and/or modified sequence
atgaccaagaccagcacctgcatctaccacttcctggtgctgagctggtacaccttcctgaactactacatcagccaggagggcaaggacgaggtgaagcccaagatcctggccaacggcgccagatggaagtacatgaccctgctgaacctgctgaagaacagaaccgccggcttcgacatctaccagcccggcagcttcagacagctgctgcagaccatcttctacggcgtgacctgcctggacgacgtgctgaagagaaccaagggcggcaaggacatcaagttcctgaccgccttcagagacctgctgttcaccaccctggccttccccgtgagcaccttcgtgttcctggccttctggatcctgttcctgtacaacagagacctgatctaccccaaggtgctggacaccgtgatccccgtgtggctgaaccacgccatgcacaccttcatcttccccatcaccctggccgaggtggtgctgagaccccacagctaccccagcaagaagaccggcctgaccctgctggccgccgccagcatcgcctacatcagcagaatcctgtggctgtacttcgagaccggcacctgggtgtaccccgtgttcgccaagctgagcctgctgggcctggccgccttcttcagcctgagctacgtgttcatcgccagcatctacctgctgggcgagaagctgaaccactggaagtggggcgacatgagacagcccagaaagaagagaaagtag

SEQ ID NO: 55679 - protein, 325 aa, Artificial Sequence
  derived and/or modified sequence
MAMNYNAKDEVDGGPPCAPGGTAKTRRPDNTAFKQQRLPAWQPILTAGTVLPIFFIIGLIFIPIGIGIFVTSNNIREIEGNVFMYYGLSNFYQNHRRYVKSRDDSQLNGDSSALLNPSKECEPYRRNEDKPIAPCGAIANSMFNDTLELFLIGNDSYPIPIALKKKGIAWWTDKNVKFRNPPGGDNLEERFKGTTKPVNWLKPVYMLDSDPDNNGFINEDFIVWMRTAALPTFRKLYRLIERKSDLHPTLPAGRYSLNVTYNYPVHYFDGRKRMILSTISWMGGKNPFLGIAYIAVGSISFLLGVVLLVINHKYRNSSNTADITI

SEQ ID NO: 55680 - protein, 77 aa, Artificial Sequence
  derived and/or modified sequence
MYYGLSNFYQNHRRYVKSRDDSQLNGDSSALLNPSKECEPYRRNEDKPIAPCGAIANSMFNDTLELFLIGNDSYPIP

SEQ ID NO: 55681 - DNA, 729 bp, Artificial Sequence
  derived and/or modified sequence
atgtactacggcctgagcaacttctaccagaaccacagaagatacgtgaagagcagagacgacagccagctgaacggcgacagcagcgccctgctgaaccccagcaaggagtgcgagccctacagaagaaacgaggacaagcccatcgccccctgcggcgccatcgccaacagcatgttcaacgacaccctggagctgttcctgatcggcaacgacagctaccccatccccatcgccctgaagaagaagggcatcgcctggtggaccgacaagaacgtgaagttcagaaacccccccggcggcgacaacctggaggagagattcaagggcaccaccaagcccgtgaactggctgaagcccgtgtacatgctggacagcgaccccgacaacaacggcttcatcaacgaggacttcatcgtgtggatgagaaccgccgccctgcccaccttcagaaagctgtacagactgatcgagagaaagagcgacctgcaccccaccctgcccgccggcagatacagcctgaacgtgacctacaactaccccgtgcactacttcgacggcagaaagagaatgatcctgagcaccatcagctggatgggcggcaagaaccccttcctgggcatcgcctacatcgccgtgggcagcatcagcttcctgctgggcgtggtgctgctggtgatcaaccacaagtacagaaacagcagcaacaccgccgacatcaccatctag

SEQ ID NO: 55682 - DNA, 978 bp, Artificial Sequence
  derived and/or modified sequence
atggccatgaactacaacgccaaggacgaggtggacggcggccccccctgcgcccccggcggcaccgccaagaccagaagacccgacaacaccgccttcaagcagcagagactgcccgcctggcagcccatcctgaccgccggcaccgtgctgcccatcttcttcatcatcggcctgatcttcatccccatcggcatcggcatcttcgtgaccagcaacaacatcagagagatcgagggcaacgtgttcatgtactacggcctgagcaacttctaccagaaccacagaagatacgtgaagagcagagacgacagccagctgaacggcgacagcagcgccctgctgaaccccagcaaggagtgcgagccctacagaagaaacgaggacaagcccatcgccccctgcggcgccatcgccaacagcatgttcaacgacaccctggagctgttcctgatcggcaacgacagctaccccatccccatcgccctgaagaagaagggcatcgcctggtggaccgacaagaacgtgaagttcagaaacccccccggcggcgacaacctggaggagagattcaagggcaccaccaagcccgtgaactggctgaagcccgtgtacatgctggacagcgaccccgacaacaacggcttcatcaacgaggacttcatcgtgtggatgagaaccgccgccctgcccaccttcagaaagctgtacagactgatcgagagaaagagcgacctgcaccccaccctgcccgccggcagatacagcctgaacgtgacctacaactaccccgtgcactacttcgacggcagaaagagaatgatcctgagcaccatcagctggatgggcggcaagaaccccttcctgggcatcgcctacatcgccgtgggcagcatcagcttcctgctgggcgtggtgctgctggtgatcaaccacaagtacagaaacagcagcaacaccgccgacatcaccatctag

SEQ ID NO: 55683 - DNA, 234 bp, Artificial Sequence
  derived and/or modified sequence
atgtactacggcctgagcaacttctaccagaaccacagaagatacgtgaagagcagagacgacagccagctgaacggcgacagcagcgccctgctgaaccccagcaaggagtgcgagccctacagaagaaacgaggacaagcccatcgccccctgcggcgccatcgccaacagcatgttcaacgacaccctggagctgttcctgatcggcaacgacagctaccccatcccctag

SEQ ID NO: 55684 - DNA, 729 bp, Artificial Sequence
  derived and/or modified sequence
atgtactacggactgtctaatttctaccagaaccaccgccgctacgtgaaaagtcgtgacgacagtcagctcaacggtgactcctctgctctgctgaacccctctaaggaatgtgagccataccggagaaatgaggacaagccaatcgcaccttgtggagctattgctaactccatgtttaacgacaccctggagctgtttctcataggaaatgatagttatcccattccgattgcactcaaaaagaaggggatcgcgtggtggacagacaaaaatgtaaagtttcgaaaccccccaggcggggacaacttggaggaaagattcaaagggaccacaaaacccgtcaactggctgaagcccgtatatatgcttgactcagaccctgacaataacggattcattaacgaagatttcatcgtatggatgcgcacagctgccctgccgacgtttcgaaagctttacagactgatcgagcgcaagtccgatctgcatccgacactgccggccgggcggtactccctgaatgtcacctataattatccggtgcactacttcgatgggcgtaagcgtatgatcctcagcacaatcagctggatggggggaaaaaacccgttcttgggtatcgcctacattgccgtgggcagtataagtttcctgctgggagtcgttctgctagttatcaaccataaatacagaaattcctcaaacactgccgatatcactatctag

SEQ ID NO: 55685 - DNA, 978 bp, Artificial Sequence
  derived and/or modified sequence
atggccatgaactacaacgcaaaggatgaagtggatggagggccaccatgcgctccaggcggaactgctaagacccgtcgcccggataataccgccttcaagcagcagaggctcccagcttggcagcccatcttaacagctggaaccgtgctgcctattttcttcataataggactgatttttatacccatcggcattggtatattcgtgacctctaataatatcagagagatcgaaggaaacgtgttcatgtattacggcctctccaatttctaccagaatcacaggcggtacgtgaagtctcgggatgatagccagcttaatggcgattccagcgccttgttgaaccctagcaaggaatgcgagccctaccgccggaacgaggataaacccatcgcgccatgtggcgcgatagccaattctatgtttaacgacaccctggaattgttcctgatcggcaacgactcctacccaatccccatcgccctaaagaagaaagggattgcatggtggacagacaaaaacgtgaagttcagaaacccccccggaggcgacaacctggaggaacggtttaagggtaccaccaaacctgtgaattggctgaagccggtatatatgctggactccgatcctgacaacaatgggtttattaacgaggactttattgtctggatgaggacggccgccttaccgacctttcggaagttgtacaggctcatagaacggaagagcgatctacatccgactcttccggctggtcggtatagtctcaacgtaacctataactatcccgtgcattattttgacggacgaaagcgtatgattttgagtaccataagctggatgggtgggaaaaatccttttctgggcattgcctacattgcagttggctccatcagcttcctgctcggagtcgtgttgctggtcattaaccataagtaccgcaacagcagcaacaccgccgacatcaccatctag

SEQ ID NO: 55686 - DNA, 234 bp, Artificial Sequence
  derived and/or modified sequence
atgtactacgggttatctaacttttaccagaaccaccgccggtacgtcaagtcccgcgacgacagccaattaaatggagactcgagtgccctcctgaatccgtctaaagagtgtgaaccctacaggcgtaacgaagacaagccgattgcaccatgcggggccatcgcgaatagcatgttcaacgacacactggagctgtttttaatcggtaacgactcttaccctattccatag

SEQ ID NO: 55687 - DNA, 729 bp, Artificial Sequence
  derived and/or modified sequence
atgtactacggcctgagcaacttctaccagaaccacagaagatatgtgaagagcagagatgacagccagctgaatggagacagcagcgccctgctgaaccccagcaaagaatgtgagccctacagaagaaatgaagacaagcccatcgccccctgtggggccatcgccaacagcatgtttaatgacaccctggagctgttcctgattggaaatgacagctaccccatccccatcgccctgaagaagaagggcatcgcctggtggacagacaagaatgtgaagttcaggaaccccccaggaggagacaacctggaggagcgcttcaagggcaccaccaagcctgtgaactggctgaagcctgtgtacatgctggacagcgaccctgacaacaacggcttcatcaatgaagacttcatcgtgtggatgaggacagctgccctgcccaccttcaggaagctgtaccgcctgattgaaaggaagagtgacctgcaccccaccctgcctgctggccgctacagcctgaatgtgacctacaactaccctgtgcactactttgatggcaggaagaggatgatcctgagcaccatctcctggatgggcggcaagaaccccttcctgggcatcgcctacatcgctgtgggcagcatctccttcctgctgggcgtggtgctgctggtgatcaaccacaagtacagaaacagcagcaacacagctgacatcaccatctag

SEQ ID NO: 55688 - DNA, 978 bp, Artificial Sequence
  derived and/or modified sequence
atggccatgaactacaatgccaaggatgaggtggatggcggccccccctgtgcccctgggggcacagccaagacccggcggccagacaacacagccttcaagcagcagaggctgcctgcctggcagcccatcctgacagctggcaccgtgctgcccatcttcttcatcatcggcctcatcttcatccccatcggcatcggcatctttgtgaccagcaacaacatccgggagattgagggcaatgtgttcatgtactacggcctgagcaacttctaccagaaccaccggcgctacgtgaagagcagagatgacagccagctgaatggagacagcagcgccctgctgaaccccagcaaagaatgtgagccctacagaagaaatgaagacaagcccatcgccccctgtggggccatcgccaacagcatgtttaatgacaccctggagctgttcctgattggaaatgacagctaccccatccccatcgccctgaagaagaagggcatcgcctggtggacagacaagaatgtgaagttcagaaatcctcctggaggagacaacctggaggagcgcttcaagggcaccaccaagcctgtgaactggctgaagcctgtgtacatgctggacagcgaccctgacaacaacggcttcatcaatgaagacttcatcgtgtggatgaggacagctgccctgcccaccttcaggaagctgtaccgcctcatcgagaggaagagtgacctgcaccccaccctgcctgctggccgctacagcctgaatgtgacctacaactaccctgtgcactactttgatggcaggaagaggatgatcctgagcaccatctcctggatgggcggcaagaaccccttcctgggcatcgcctacatcgctgtgggcagcatctccttcctgctgggcgtggtgctgctggtgatcaaccacaagtacagaaacagcagcaacacagctgacatcaccatctag

SEQ ID NO: 55689 - DNA, 234 bp, Artificial Sequence
  derived and/or modified sequence
atgtactacggcctgagcaacttctaccagaaccacagaagatatgtgaagagcagagatgacagccagctgaatggagacagcagcgccctgctgaaccccagcaaagaatgtgagccctacagaagaaatgaagacaagcccatcgccccctgtggggccatcgccaacagcatgtttaatgacaccctggagctgttcctgattggaaatgacagctaccccatcccctag

SEQ ID NO: 55690 - DNA, 729 bp, Artificial Sequence
  derived and/or modified sequence
atgtactacggcctgagcaacttctaccagaaccaccggcggtacgtgaagtcccgtgatgatagccagctcaacggagacagttctgcacttcttaacccctctaaggaatgtgagccctatcgacgaaacgaggacaaacctatcgcaccttgtggagctattgctaacagcatgtttaacgatacgctggaactgttcctaatcggcaacgatagttacccaatcccaattgccctgaagaaaaaagggatcgcgtggtggacggataagaacgtgaagtttcgtaaccctcctggcggcgataaccttgaagaacgtttcaaaggaactactaaacccgtcaattggctgaaacctgtttacatgctggatagtgacccagataacaacggctttattaatgaagattttatagtgtggatgagaaccgcggctctcccaacttttagaaagctgtatcgcctaatcgagagaaagagcgatttacacccgacactccccgccggccgatattccttgaatgtcacctataactaccctgtacattactttgatggaagaaaaaggatgatcctgagtactatttcctggatgggtgggaagaacccattcctgggaattgcatatatcgcagtgggctccatcagctttttattgggcgtcgtgttattggtcataaatcataaatatcgcaattcctcaaacactgcagacataacaatttag

SEQ ID NO: 55691 - DNA, 978 bp, Artificial Sequence
  derived and/or modified sequence
atggccatgaactacaacgccaaggacgaggtggacggcggccccccatgcgcgcccggcggtactgcaaaaacccgccggccagacaatacagcctttaagcaacaacgcctgcccgcctggcagcctattctgaccgccgggactgtactgccaatcttcttcatcattgggctgatatttatccctatcggtataggcatatttgttacttccaacaacattagggaaatcgaaggtaacgtgtttatgtactatggactttcaaatttctatcaaaatcaccgcaggtatgtgaagtcccgcgacgattctcaattgaacggcgacagttccgcgcttttgaatccttctaaggagtgtgagccttaccgacgaaacgaagataagcccattgctccatgtggagcaattgccaattcaatgttcaacgatacacttgagctgttcctgatcgggaatgattcctatccaattcccattgcactaaagaagaagggtatcgcctggtggacagataaaaatgtcaaattcaggaatccgccgggcggtgacaatctggaggaacggtttaagggaaccaccaaacctgtaaactggctcaagcccgtgtatatgttagattcagacccggataacaatggattcatcaacgaagactttattgtgtggatgaggactgctgcgttaccaacatttcgaaagctgtacagactgatcgagcgcaaatccgatcttcaccctaccctgcccgctgggaggtattcactaaatgtaacatacaactatcccgttcattatttcgatggccgaaagcggatgatcttaagtacaatcagctggatggggggcaagaacccatttctggggattgcctatattgcagtaggttccatctcattcctccttggagtggtactgctggtcatcaaccataagtaccgcaacagcagtaatactgccgatatcacaatatag

SEQ ID NO: 55692 - DNA, 234 bp, Artificial Sequence
  derived and/or modified sequence
atgtactacggcctgagcaacttctaccagaaccaccggcggtacgtcaaaagtagagatgactcccagctcaatggagattcgagcgctctgctcaacccgagcaaagagtgcgagccataccggcgcaatgaagataagccgatcgctccctgcggcgctattgccaacagtatgttcaatgacaccctcgagctgtttctaataggcaacgactcttatcctataccatag

SEQ ID NO: 55693 - DNA, 729 bp, Artificial Sequence
  derived and/or modified sequence
atgtattacgggctcagcaacttttatcagaatcaccggaggtacgtcaaatctagagacgatagtcagctgaatggcgattcctctgccctcctcaacccgagtaaggaatgcgagccttatagaaggaacgaagataagccgattgcgccatgtggcgcaatcgcaaatagcatgttcaatgacactctcgaacttttcctcattgggaacgactcttacccgattccaatcgcactcaaaaagaaaggaatcgcctggtggacagacaaaaatgtcaaatttcggaatccacccggaggtgataatctggaagaacgctttaaaggaacaacaaaacccgtgaactggctcaagcctgtatatatgctggacagtgatcctgacaataacggatttataaacgaggacttcatcgtttggatgcggacagccgctctccctactttcagaaagctttaccgtctgatcgaacggaagtccgatctccaccctacattgccagccggaagatattctctcaacgttacctataattacccagtgcactatttcgacggaaggaagcgtatgatactttccacaataagttggatggggggaaagaatccattcctgggtattgcgtatatcgctgttggctccattagttttcttctcggtgtggtgctgctggtgatcaatcacaagtaccgcaactccagcaacactgctgatatcaccatttag

SEQ ID NO: 55694 - DNA, 978 bp, Artificial Sequence
  derived and/or modified sequence
atggcgatgaactacaatgctaaggatgaggtagacgggggtccaccctgtgcccctggcggtacagccaagactagaaggcctgacaatacagccttcaagcagcagcggcttcctgcctggcagcctatcctgaccgcaggcaccgtgctgccgattttcttcattattggactgatatttattccaatcgggatcggaatattcgttacgtccaacaacatccgggagatcgagggtaacgtattcatgtattatgggctgtctaacttttatcagaatcacagaaggtatgtgaagagcagggatgattctcaactcaacggcgattcatcagctttgttgaaccctagcaaggaatgcgagccttatcgcaggaacgaagataagccaatcgcaccctgtggcgcaattgccaattccatgtttaatgatacactcgagctatttcttatcgggaacgacagctaccccatcccaattgccctaaagaaaaagggaattgcctggtggacagataaaaacgtgaagtttaggaacccacccggtggtgataatcttgaagaacgcttcaaagggactaccaagcctgtgaattggctcaaacctgtttatatgctcgactctgacccagacaataatggcttcattaatgaagactttatcgtatggatgagaacagccgctctcccaactttccgaaagttatacaggcttatcgaaaggaagtccgacttgcaccctacgctcccagcgggaagatatagcctcaatgtgacttacaactaccctgtccactattttgacggcagaaaaaggatgattctaagcaccatctcttggatgggtggcaaaaaccccttcctggggatcgcgtacatagctgttggatccatctcattccttctgggagtggtgttactggttattaatcataagtatagaaacagctcaaatacagctgacatcacaatctag

SEQ ID NO: 55695 - DNA, 234 bp, Artificial Sequence
  derived and/or modified sequence
atgtactacggcctatcgaatttttatcagaatcatcggaggtatgttaaatcccgagacgactcgcagctgaacggagatagctcagccttgctgaaccctagcaaggaatgtgagccataccgccgtaatgaggataaacctattgcaccatgcggtgcgattgccaattctatgtttaatgacactcttgagctgttcctcattggtaatgattcttatccaattccatag

SEQ ID NO: 55696 - DNA, 2791 bp, Artificial Sequence
  derived and/or modified sequence
cagggtgcgtccgccttttcgttcccgcttctatcctcctcccctttcccctccccatgtccctccttcttctccctcctccctctctccctccctctggcgtctccagccgactttcgcttcccgtcagcagcctttggcggaagagtgtcccgcctcttccgctctacagcggaggtggctgtggcggtggcgctggtggctgcggcggcggcggcggcagcggcgctcgagcggttcctgtcagggtcagccggcgggccccctgggtggtccacctgcaaatcgcggagcggcgccccagggatcgatggcgatgaactataacgcgaaggatgaagtggacggtgggcccccgtgtgctccggggggcaccgcgaagactcggagaccggataacacggccttcaaacagcaacggctgccagcttggcagcccatccttacggctggcacggtgctacctattttcttcatcatcggtctcatcttcattcccatcggcattggcatttttgtcacctccaacaacatccgcgagatcgagggcaacgtgtttatgtattatggactgtctaatttctatcaaaaccatcgtcgttacgtgaaatctcgagatgatagtcaactaaatggagattctagtgctttgcttaatcccagtaaggaatgtgaaccttatcgaagaaatgaagacaaaccaattgctccttgtggagctattgccaacagcatgtttaatgatacattagaattgtttctcattggcaatgattcttatcctatacctatcgctttgaaaaagaaaggtattgcttggtggacagataaaaatgtgaaattcagaaatccccctggaggagacaacctggaagaacgatttaaaggtacaacaaagcctgtgaactggcttaaaccagtttacatgctggattctgacccagataataatggattcataaatgaggattttattgtttggatgcgtactgcagcattacctacttttcgcaagttgtatcgtcttatagaaaggaaaagtgatttacatccaacattaccagctggccgatactctttgaatgtcacatacaattaccctgtacattattttgatggacgaaaacggatgatcttgagcactatttcatggatgggaggaaaaaatccatttttggggattgcttacatcgctgttggatccatctccttccttctgggagttgtactgctagtaattaatcataaatatagaaacagtagtaatacagctgacattaccatttaattttatattatgaaagcaaatcatctgcatgtgcatcaaggccagtcctattcaacctagctttcgaatgctgatatctggttagtatgtcattttgaagttggcacataacttttctaaaaaaaagcagtctttgttgtttgcttcttccctacggatgacttctaaaaatatatgacgggtataaaaaaattagctatattgatcatatcaacactgtaactgctgaaatggcattctaatgtttgctttttattcggacaggccacatgatgcatagagcctctttcatgtgacttgtgtctactgcttaaatctttatgctgtgttgatgatattatattgacatatgaagctgtatatgtgtatgtattttgtggagaaagggattacaagatgtatgagtataatgacttgctaacctttcaggattcagagaaagatgaagaaagaccatatctaaataatacacttcatcattttcatgtgtataaatgcttaaagtaccatctttgttgaggtggttcatgtatccagtttatccagtacagttatttgtcaagcttagctttgatttcaaaggacacgcttaccttgtctggcataagaattaatgctcatgtctgcagtggttgggtaggtcctgcttaggagaattaaaaaattcctctttccgtttggttgaatgttgcagtcaggaaccccaactcacttggaatgtttttatatgtaatcatttcccttgaagcttatactttataagggaagaaagaattcaggtgatatgggaaaactgcttggcagaccttcatcttctgcctcaactgtaaaccacatgtaagtgcttaatggagactgttttcattcttgtgatatttaacattcagaaaattacttcagctttggaaatactcaggctgtttttattctgcaggtaagtgttttgacttaagtactaatattccagaaatttttgaaagcagtaaccttaatttcctatgtatttcattccacttttgcatataggtcaaatagcaatgtgtatgcacattctctttagttaaggcaccaattgttttggttggttttcctaagacatactttaaaaagatgttctataaatttcctaattaaattatggggattttggagtatgtacatgataaattataatatgtatatggttgaagttattttattttttactaatgaattattttaatattccttattgaataaatgctgtaacttgtttgctatggaacttattcttaaagttctagttaaaaataatttttccacatgcatgaaaatatgtattaatcagaggtggcttaattacattgaaattgcttttttgttgttgtttttttactgaaataactcatgtttgtgtagaagaatgcctgtttactcagagtttatattttccttcagttatattttaaatcaaaaggtctgggtaatgtatacttttgattaatatatactttttttaaaaaa

SEQ ID NO: 55697 - protein, 1248 aa, Artificial Sequence
  derived and/or modified sequence
MVVALRYVWPLLLCSPCLLIQIPEELMEPPVITEQSPRRLVVFPTDDISLKCEASGKPEVQFRWTRDGVHFKPKEELGVTVYQSPHSGSFTITGNNSNFAQRFQGIYRCFASNKLGTAMSHEIRLMAEGAPKWPKETVKPVEVEEGESVVLPCNPPPSAEPLRIYWMNSKILHIKQDERVTMGQNGNLYFANVLTSDNHSDYICHAHFPGTRTIIQKEPIDLRVKATNSMIDRKPRLLFPTNSSSHLVALQGQPLVLECIAEGFPTPTIKWLRPSGPMPADRVTYQNHNKTLQLLKVGEEDDGEYRCLAENSLGSARHAYYVTVEAAPYWLHKPQSHLYGPGETARLDCQVQGRPQPEVTWRINGIPVEELAKDQKYRIQRGALILSNVQPSDTMVTQCEARNRHGLLLANAYIYVVQLPAKILTADNQTYMAVQGSTAYLLCKAFGAPVPSVQWLDEDGTTVLQDERFFPYANGTLGIRDLQANDTGRYFCLAANDQNNVTIMANLKVKDATQITQGPRSTIEKKGSRVTFTCQASFDPSLQPSITWRGDGRDLQELGDSDKYFIEDGRLVIHSLDYSDQGNYSCVASTELDVVESRAQLLVVGSPGPVPRLVLSDLHLLTQSQVRVSWSPAEDHNAPIEKYDIEFEDKEMAPEKWYSLGKVPGNQTSTTLKLSPYVHYTFRVTAINKYGPGEPSPVSETVVTPEAAPEKNPVDVKGEGNETTNMVITWKPLRWMDWNAPQVQYRVQWRPQGTRGPWQEQIVSDPFLVVSNTSTFVPYEIKVQAVNSQGKGPEPQVTIGYSGEDYPQAIPELEGIEILNSSAVLVKWRPVDLAQVKGHLRGYNVTYWREGSQRKHSKRHIHKDHVVVPANTTSVILSGLRPYSSYHLEVQAFNGRGSGPASEFTFSTPEGVPGHPEALHLECQSNTSLLLRWQPPLSHNGVLTGYVLSYHPLDEGGKGQLSFNLRDPELRTHNLTDLSPHLRYRFQLQATTKEGPGEAIVREGGTMALSGISDFGNISATAGENYSVVSWVPKEGQCNFRFHILFKALGEEKGGASLSPQYVSYNQSSYTQWDLQPDTDYEIHLFKERMFRHQMAVKTNGTGRVRLPPAGFATEGWFIGFVSAIILLLLVLLILCFIKRSKGGKYSVKDKEDTQVDSEARPMKDETFGEYSDNEEKAFGSSQPSLNGDIKPLGSDDSLADYGGSVDVQFNEDGSFIGQYSGKKEKEAAGGNDSSGATSPINPAVALE

SEQ ID NO: 55698 - DNA, 3747 bp, Artificial Sequence
  derived and/or modified sequence
atggtggtggccctgagatacgtgtggcccctgctgctgtgcagcccctgcctgctgatccagatccccgaggagctgatggagccccccgtgatcaccgagcagagccccagaagactggtggtgttccccaccgacgacatcagcctgaagtgcgaggccagcggcaagcccgaggtgcagttcagatggaccagagacggcgtgcacttcaagcccaaggaggagctgggcgtgaccgtgtaccagagcccccacagcggcagcttcaccatcaccggcaacaacagcaacttcgcccagagattccagggcatctacagatgcttcgccagcaacaagctgggcaccgccatgagccacgagatcagactgatggccgagggcgcccccaagtggcccaaggagaccgtgaagcccgtggaggtggaggagggcgagagcgtggtgctgccctgcaaccccccccccagcgccgagcccctgagaatctactggatgaacagcaagatcctgcacatcaagcaggacgagagagtgaccatgggccagaacggcaacctgtacttcgccaacgtgctgaccagcgacaaccacagcgactacatctgccacgcccacttccccggcaccagaaccatcatccagaaggagcccatcgacctgagagtgaaggccaccaacagcatgatcgacagaaagcccagactgctgttccccaccaacagcagcagccacctggtggccctgcagggccagcccctggtgctggagtgcatcgccgagggcttccccacccccaccatcaagtggctgagacccagcggccccatgcccgccgacagagtgacctaccagaaccacaacaagaccctgcagctgctgaaggtgggcgaggaggacgacggcgagtacagatgcctggccgagaacagcctgggcagcgccagacacgcctactacgtgaccgtggaggccgccccctactggctgcacaagccccagagccacctgtacggccccggcgagaccgccagactggactgccaggtgcagggcagaccccagcccgaggtgacctggagaatcaacggcatccccgtggaggagctggccaaggaccagaagtacagaatccagagaggcgccctgatcctgagcaacgtgcagcccagcgacaccatggtgacccagtgcgaggccagaaacagacacggcctgctgctggccaacgcctacatctacgtggtgcagctgcccgccaagatcctgaccgccgacaaccagacctacatggccgtgcagggcagcaccgcctacctgctgtgcaaggccttcggcgcccccgtgcccagcgtgcagtggctggacgaggacggcaccaccgtgctgcaggacgagagattcttcccctacgccaacggcaccctgggcatcagagacctgcaggccaacgacaccggcagatacttctgcctggccgccaacgaccagaacaacgtgaccatcatggccaacctgaaggtgaaggacgccacccagatcacccagggccccagaagcaccatcgagaagaagggcagcagagtgaccttcacctgccaggccagcttcgaccccagcctgcagcccagcatcacctggagaggcgacggcagagacctgcaggagctgggcgacagcgacaagtacttcatcgaggacggcagactggtgatccacagcctggactacagcgaccagggcaactacagctgcgtggccagcaccgagctggacgtggtggagagcagagcccagctgctggtggtgggcagccccggccccgtgcccagactggtgctgagcgacctgcacctgctgacccagagccaggtgagagtgagctggagccccgccgaggaccacaacgcccccatcgagaagtacgacatcgagttcgaggacaaggagatggcccccgagaagtggtacagcctgggcaaggtgcccggcaaccagaccagcaccaccctgaagctgagcccctacgtgcactacaccttcagagtgaccgccatcaacaagtacggccccggcgagcccagccccgtgagcgagaccgtggtgacccccgaggccgcccccgagaagaaccccgtggacgtgaagggcgagggcaacgagaccaccaacatggtgatcacctggaagcccctgagatggatggactggaacgccccccaggtgcagtacagagtgcagtggagaccccagggcaccagaggcccctggcaggagcagatcgtgagcgaccccttcctggtggtgagcaacaccagcaccttcgtgccctacgagatcaaggtgcaggccgtgaacagccagggcaagggccccgagccccaggtgaccatcggctacagcggcgaggactacccccaggccatccccgagctggagggcatcgagatcctgaacagcagcgccgtgctggtgaagtggagacccgtggacctggcccaggtgaagggccacctgagaggctacaacgtgacctactggagagagggcagccagagaaagcacagcaagagacacatccacaaggaccacgtggtggtgcccgccaacaccaccagcgtgatcctgagcggcctgagaccctacagcagctaccacctggaggtgcaggccttcaacggcagaggcagcggccccgccagcgagttcaccttcagcacccccgagggcgtgcccggccaccccgaggccctgcacctggagtgccagagcaacaccagcctgctgctgagatggcagccccccctgagccacaacggcgtgctgaccggctacgtgctgagctaccaccccctggacgagggcggcaagggccagctgagcttcaacctgagagaccccgagctgagaacccacaacctgaccgacctgagcccccacctgagatacagattccagctgcaggccaccaccaaggagggccccggcgaggccatcgtgagagagggcggcaccatggccctgagcggcatcagcgacttcggcaacatcagcgccaccgccggcgagaactacagcgtggtgagctgggtgcccaaggagggccagtgcaacttcagattccacatcctgttcaaggccctgggcgaggagaagggcggcgccagcctgagcccccagtacgtgagctacaaccagagcagctacacccagtgggacctgcagcccgacaccgactacgagatccacctgttcaaggagagaatgttcagacaccagatggccgtgaagaccaacggcaccggcagagtgagactgccccccgccggcttcgccaccgagggctggttcatcggcttcgtgagcgccatcatcctgctgctgctggtgctgctgatcctgtgcttcatcaagagaagcaagggcggcaagtacagcgtgaaggacaaggaggacacccaggtggacagcgaggccagacccatgaaggacgagaccttcggcgagtacagcgacaacgaggagaaggccttcggcagcagccagcccagcctgaacggcgacatcaagcccctgggcagcgacgacagcctggccgactacggcggcagcgtggacgtgcagttcaacgaggacggcagcttcatcggccagtacagcggcaagaaggagaaggaggccgccggcggcaacgacagcagcggcgccaccagccccatcaaccccgccgtggccctggagtag

SEQ ID NO: 55699 - DNA, 3747 bp, Artificial Sequence
  derived and/or modified sequence
atggtggtggcactgcgctacgtgtggccgctcctcctgtgttcgccttgcctgctcattcaaattcctgaggagttgatggagcctccagtgataacagagcagtccccccgtcgccttgtggttttccccactgacgatatctcattgaagtgtgaggcctccggaaagccagaagtgcagttcaggtggacacgcgatggcgtgcatttcaaacccaaggaggagttgggggttacagtctaccagagtccccatagcggctcattcactatcactggtaacaactctaacttcgcgcagcggtttcagggaatatatcggtgcttcgccagcaacaagttgggaactgcaatgtctcacgagattcggcttatggcagaaggcgccccaaagtggcctaaagaaacggtgaagcccgtggaagtggaggagggagagagcgtggtgctgccttgtaacccaccccctagcgcggaacccttgcgcatctactggatgaacagcaagatcctgcatataaaacaggatgagcgagttacaatgggtcaaaacgggaatctctattttgctaatgtgctgacttctgataatcattctgactatatctgtcacgctcactttcctggtaccaggacgatcatccagaaagagcctatcgacctgcgggtgaaggcgacgaatagcatgattgacaggaagcccaggttgctgtttcccaccaactcatcttcccacctcgtggcactgcagggtcagcccctggttctggaatgtattgccgagggctttcccacacctacaattaagtggctgcggcccagcggccctatgcccgcagaccgggtaacttaccagaatcacaacaagaccctgcaactcttaaaggttggcgaagaggacgacggcgagtaccggtgtctcgctgaaaactctctcggttctgctagacatgcctactacgtcaccgtggaggcagctccttactggcttcataagccacagtctcatctgtacggtccaggagagactgcccgtctggactgccaggttcagggtagaccccaacctgaggttacctggcggattaatggcatccccgtggaagagcttgccaaggaccagaagtatagaatccagcggggcgcactcattctgagcaacgtccagccaagcgacacaatggtgacgcagtgtgaggctcggaacagacatggcctgctgctggcgaatgcctacatatacgtggtacagttgcctgcaaaaatcctcaccgcagataatcagacctatatggccgttcagggttccaccgcgtacctcctttgcaaggcttttggtgcgccggtgccgtctgtacagtggctggacgaggatggaaccaccgtactgcaagacgagcggttctttccgtacgcgaacggaacattggggattcgcgacttacaggccaacgacactgggcggtacttctgcctggccgccaacgatcagaacaacgtgacaattatggccaatcttaaggttaaagatgctacacagattacgcagggaccacggtctaccattgaaaaaaaaggaagccgggtcactttcacctgccaggcaagctttgatccttcgttacagcctagcatcacatggcggggcgatggtcgggatttacaggaactgggagatagcgacaaatattttattgaggatggacggctggtcattcattcgctggactattcggaccagggcaactacagctgtgttgccagcactgagctggatgtagtagagtcaagagcccagctcctggtagtcggcagccctggtcctgtgcctcggctcgtgctgagtgacctccatcttctgacccagtctcaggtgcgtgtgtcgtggtctcccgccgaagaccataacgctccaatcgagaaatatgatatcgaatttgaggacaaggagatggctcctgagaagtggtacagtctgggaaaggttcccggcaatcagacgagcacgactcttaagctcagtccttacgtccattatactttccgggtgaccgctatcaataaatacggaccgggggagcctagcccagtttctgagactgtggtaaccccagaagctgcccccgaaaagaatcctgttgacgtaaagggggaagggaatgagactactaatatggtgattacctggaaaccacttagatggatggattggaatgcaccccaggtccagtaccgggtacagtggcgcccccagggaactcgggggccctggcaggaacagatcgtgtccgatccatttcttgtggtttctaatacatcaacttttgttccctacgagattaaggtccaggctgttaacagccaggggaaaggacccgaaccacaggtgacaatcggctactctggggaagactatccacaagcgatacccgaactggagggtatcgagatccttaattctagtgctgtcctggtaaagtggcgtccagtggaccttgctcaggtgaaaggccatttgcgcgggtataacgtcacttattggcgagaaggttcccagagaaagcacagcaagcgacacattcacaaggaccacgttgtcgttccggctaacaccacctctgtcattctctctgggctccgcccctactcatcttaccacctagaggtgcaggcctttaacgggcgcggtagcggaccagcctccgaatttacattctcaacaccagaaggagtacccggtcacccagaagctcttcacctagagtgtcaaagtaatactagtctgctgctgcggtggcaaccccctctaagtcacaatggtgtgctcactgggtatgtgctgagctaccacccattggatgagggtgggaaggggcagctgtcttttaacttgagagaccccgaactaaggacacacaatctgaccgatttgagccctcacctgcgataccggttccagttgcaggctacaacgaaagaagggcccggggaggccatcgtgcgcgaggggggaaccatggctctttccggcatttcagacttcgggaacatttctgcaaccgcaggggaaaattactcagtggtcagctgggtgcctaaggagggtcagtgcaacttccgattccatatcctttttaaggctttgggcgaggaaaaaggtggagcaagccttagcccccagtacgtgagttataaccaaagttcatacacccagtgggacctccagcctgatacggattacgaaattcacctgttcaaagaacggatgttccgccatcagatggcagttaaaactaatggaacaggtcgcgtgcgtctgcccccggctggcttcgcgactgaggggtggttcattggcttcgtttctgccatcatcctcttgttattggtgctactcattctgtgcttcatcaaacggtcaaaaggaggaaagtacagtgtgaaagacaaagaggacacccaggtggactccgaggctcggccaatgaaagatgaaacattcggggaatatagcgacaacgaggagaaggcgttcggatcatcccagccatcgctcaacggagacatcaaaccgctcgggtctgacgacagtctcgcggactacgggggctctgtcgacgttcagttcaacgaagacggttcattcattggccagtattccgggaaaaaagaaaaggaagccgccgggggaaacgattcctcgggcgcaacctcaccaatcaatcccgccgtcgcactcgagtag

SEQ ID NO: 55700 - DNA, 3747 bp, Artificial Sequence
  derived and/or modified sequence
atggtggtggccctgcgctacgtgtggcccctgctgctgtgcagcccctgcctgctgatccagatccctgaggagctgatggagccccctgtgatcacagagcagagcccccggcggctggtggtgttccccacagatgacatcagcctgaagtgtgaggccagcggcaagccagaggtgcagttccgctggaccagagatggagtgcacttcaagcccaaggaggagctgggcgtgacagtgtaccagagcccccacagcggcagcttcaccatcactggaaacaacagcaactttgcccagcgcttccagggcatctaccgctgctttgccagcaacaagctgggcacagccatgagccatgagatccggctgatggccgagggcgcccccaagtggcccaaggagaccgtgaagcctgtggaggtggaggagggggagagcgtggtgctgccctgcaaccccccacccagcgctgagcccctgcgcatctactggatgaacagcaagatcctgcacatcaagcaggatgagcgggtgaccatgggccagaatggaaacctgtactttgccaacgtgctgaccagtgacaaccacagcgactacatctgccacgcccacttccctggcaccaggaccatcatccagaaggagcccatcgacctgcgggtgaaggccaccaacagcatgattgacaggaagccccggctgctcttccccaccaacagcagcagccacctggtggccctgcagggccagcccctggtgctggagtgcatcgccgagggcttccccacccccaccatcaagtggctgcggcccagcggccccatgcctgctgacagagtgacctaccagaaccacaacaagaccctgcagctgctgaaggtgggggaggaggatgatggagagtaccgctgcctggccgagaacagcctgggcagcgcccggcatgcctactacgtgacagtggaggccgccccctactggctgcacaagccccagagccacctgtatggccctggagaaacagcccggctggactgccaggtgcagggccggccccagcctgaggtgacctggaggatcaatggcatccctgtggaggagctggccaaggaccagaagtaccgcatccagagaggagccctgatcctgagcaatgtgcagcccagcgacaccatggtgacccagtgtgaggccaggaacagacatggcctgctgctggccaatgcctacatctacgtggtgcagctgcctgccaagatcctgacagctgacaaccagacctacatggctgtgcagggcagcacagcctacctgctgtgcaaggccttcggggcccctgtgcccagcgtgcagtggctggatgaagatggcaccaccgtgctgcaggatgagcgcttcttcccctatgccaacggcaccctgggcatccgggacctgcaggccaatgacaccggccgctacttctgcctggccgccaatgaccagaacaacgtgaccatcatggccaacctgaaggtgaaggatgccacccagatcacccagggccccaggagcaccatcgagaagaagggcagccgggtgaccttcacctgccaggccagctttgaccccagcctgcagcccagcatcacctggagaggagatggccgggacctgcaggagctgggggacagcgacaagtacttcattgaagatggccgcctggtgatccacagcctggactacagcgaccagggcaactacagctgtgtggccagcacagagctggatgtggtggagagccgggcccagctgctggtggtgggcagccctggccctgtgccccggctggtgctgagtgacctgcacctgctgacccagagccaggtgcgggtgtcctggagccctgctgaggaccacaatgcccccatcgagaagtatgacattgaatttgaggacaaggagatggcccctgagaagtggtacagcctgggcaaggtgcccggcaaccagaccagcaccaccctgaagctgagcccctacgtgcactacaccttccgggtgacagccatcaacaagtatggccctggagagcccagccctgtgtctgaaacagtggtgaccccagaggccgcccctgagaagaaccctgtggatgtgaagggggagggcaatgagaccaccaacatggtgatcacctggaagcccctgcgctggatggactggaatgccccccaggtgcagtacagagtgcagtggaggccccagggcacccggggcccctggcaggagcagatcgtgtctgaccccttcctggtggtgagcaacaccagcacctttgtgccctatgagatcaaggtgcaggccgtgaacagccagggcaaaggacctgagccccaggtgaccatcggctacagcggggaggactacccccaggccatccctgagctggagggcatcgagatcctgaacagcagcgctgtgctggtgaagtggaggcctgtggacctggcccaggtgaagggccacctgcggggctacaacgtgacctactggagggagggcagccagaggaagcacagcaagaggcacatccacaaggaccacgtggtggtgcctgccaacaccaccagcgtcatcctgagcggcctgcggccctacagcagctaccacctggaggtgcaggccttcaacggccggggcagcggccctgccagcgagttcaccttcagcaccccagagggcgtgcccggccaccctgaggccctgcacctggagtgccagagcaacaccagcctgctgctgcgctggcagccccccctgagccacaacggggtgctgaccggctacgtgctgagctaccaccccctggatgagggcggcaagggccagctgtccttcaacctgcgggaccctgagctgcggacccacaacctgacagacctgagcccccacctgcgctaccgcttccagctgcaggccaccaccaaggagggccctggagaggccatcgtgcgggagggcggcaccatggccctgagcggcatcagtgactttggaaacatcagcgccacagctggggagaactacagcgtggtgtcctgggtgcccaaggagggccagtgcaacttccgcttccacatcctcttcaaggccctgggggaggagaagggcggggccagcctgagcccccagtatgtgtcctacaaccagagcagctacacccagtgggacctgcagcctgacacagattatgagatccacctgttcaaggagaggatgttccgccaccagatggctgtgaagaccaacggcaccggccgggtgcggctgcccccagctggctttgccacagagggctggttcatcggctttgtgtctgccatcatcctgctgctgctggtgctgctgatcctgtgcttcatcaagaggagcaagggcggcaagtacagcgtgaaggacaaggaggacacccaggtggacagcgaggcccggcccatgaaggatgagaccttcggggagtacagcgacaatgaggagaaggccttcggcagcagccagcccagcctgaatggagacatcaagcccctgggcagtgatgacagcctggccgactatggaggctctgtggatgtgcagttcaatgaagatggcagcttcatcggccagtacagcggcaagaaggagaaggaggccgccggcggcaatgacagcagcggggccaccagccccatcaacccagctgtggccctggagtag

SEQ ID NO: 55701 - DNA, 5000 bp, Artificial Sequence
  derived and/or modified sequence
tgcccccactcccaactcccgccccaagccgcccaccagcccccttcccctccggccggagcctgaaccgagcccggctggctgtgctgcgcggtgccgccgggaaagatggtcgtggcgctgcggtacgtgtggcctctcctcctctgcagcccctgcctgcttatccagatccccgaggaattgatggagccacctgtcatcacggaacagtctccacggcgcctggttgtcttccccacagatgacatcagcctcaagtgtgaggccagtggcaagcccgaagtgcagttccgctggacgagggatggtgtccacttcaaacccaaggaagagctgggtgtgaccgtgtaccagtcgccccactctggctccttcaccatcacgggcaacaacagcaactttgctcagaggttccagggcatctaccgctgctttgccagcaataagctgggcaccgccatgtcccatgagatccggctcatggccgagggtgcccccaagtggccaaaggagacagtgaagcccgtggaggtggaggaaggggagtcagtggttctgccttgcaaccctcccccaagtgcagagcctctccggatctactggatgaacagcaagatcttgcacatcaagcaggacgagcgggtgacgatgggccagaacggcaacctctactttgccaatgtgctcacctccgacaaccactcagactacatctgccacgcccacttcccaggcaccaggaccatcattcagaaggaacccattgacctccgggtcaaggccaccaacagcatgattgacaggaagccgcgcctgctcttccccaccaactccagcagccacctggtggccttgcaggggcagccattggtcctggagtgcatcgccgagggctttcccacgcccaccatcaaatggctgcgccccagtggccccatgccagccgaccgtgtcacctaccagaaccacaacaagaccctgcagctgctgaaagtgggcgaggaggatgatggcgagtaccgctgcctggccgagaactcactgggcagtgcccggcatgcgtactatgtcaccgtggaggctgccccgtactggctgcacaagccccagagccatctatatgggccaggagagactgcccgcctggactgccaagtccagggcaggccccaaccagaggtcacctggagaatcaacgggatccctgtggaggagctggccaaagaccagaagtaccggattcagcgtggcgccctgatcctgagcaacgtgcagcccagtgacacaatggtgacccaatgtgaggcccgcaaccggcacgggctcttgctggccaatgcctacatctacgttgtccagctgccagccaagatcctgactgcggacaatcagacgtacatggctgtccagggcagcactgcctaccttctgtgcaaggccttcggagcgcctgtgcccagtgttcagtggctggacgaggatgggacaacagtgcttcaggacgaacgcttcttcccctatgccaatgggaccctgggcattcgagacctccaggccaatgacaccggacgctacttctgcctggctgccaatgaccaaaacaatgttaccatcatggctaacctgaaggttaaagatgcaactcagatcactcaggggccccgcagcacaatcgagaagaaaggttccagggtgaccttcacgtgccaggcctcctttgacccctccttgcagcccagcatcacctggcgtggggacggtcgagacctccaggagcttggggacagtgacaagtacttcatagaggatgggcgcctggtcatccacagcctggactacagcgaccagggcaactacagctgcgtggccagtaccgaactggatgtggtggagagtagggcacagctcttggtggtggggagccctgggccggtgccacggctggtgctgtccgacctgcacctgctgacgcagagccaggtgcgcgtgtcctggagtcctgcagaagaccacaatgcccccattgagaaatatgacattgaatttgaggacaaggaaatggcgcctgaaaaatggtacagtctgggcaaggttccagggaaccagacctctaccaccctcaagctgtcgccctatgtccactacacctttagggttactgccataaacaaatatggccccggggagcccagcccggtctctgagactgtggtcacacctgaggcagccccagagaagaaccctgtggatgtgaagggggaaggaaatgagaccaccaatatggtcatcacgtggaagccgctccggtggatggactggaacgccccccaggttcagtaccgcgtgcagtggcgccctcaggggacacgagggccctggcaggagcagattgtcagcgaccccttcctggtggtgtccaacacgtccaccttcgtgccctatgagatcaaagtccaggccgtcaacagccagggcaagggaccagagccccaggtcactatcggctactctggagaggactacccccaggcaatccctgagctggaaggcattgaaatcctcaactcaagtgccgtgctggtcaagtggcggccggtggacctggcccaggtcaagggccacctccgcggatacaatgtgacgtactggagggagggcagtcagaggaagcacagcaagagacatatccacaaagaccatgtggtggtgcccgccaacaccaccagtgtcatcctcagtggcttgcggccctatagctcctaccacctggaggtgcaggcctttaacgggcgaggatcggggcccgccagcgagttcaccttcagcaccccagagggagtgcctggccaccccgaggcgttgcacctggagtgccagtcgaacaccagcctgctgctgcgctggcagcccccactcagccacaacggcgtgctcaccggctacgtgctctcctaccaccccctggatgaggggggcaaggggcaactgtccttcaaccttcgggaccccgaacttcggacacacaacctgaccgatctcagcccccacctgcggtaccgcttccagcttcaggccaccaccaaagagggccctggtgaagccatcgtacgggaaggaggcactatggccttgtctgggatctcagattttggcaacatctcagccacagcgggtgaaaactacagtgtcgtctcctgggtccccaaggagggccagtgcaacttcaggttccatatcttgttcaaagccttgggagaagagaagggtggggcttccctttcgccacagtatgtcagctacaaccagagctcctacacgcagtgggacctgcagcctgacactgactacgagatccacttgtttaaggagaggatgttccggcaccaaatggctgtgaagaccaatggcacaggccgcgtgaggctccctcctgctggcttcgccactgagggctggttcatcggctttgtgagtgccatcatcctcctgctcctcgtcctgctcatcctctgcttcatcaagcgcagcaagggcggcaaatactcagtgaaggataaggaggacacccaggtggactctgaggcccgaccgatgaaagatgagaccttcggcgagtacagtgacaacgaggagaaggcctttggcagcagccagccatcgctcaacggggacatcaagcccctgggcagtgacgacagcctggccgattatgggggcagcgtggatgttcagttcaacgaggatggttcgttcattggccagtacagtggcaagaaggagaaggaggcggcagggggcaatgacagctcaggggccacttcccccatcaaccctgccgtggccctagaatagtggagtccaggacaggagatgctgtgcccctggccttgggatccaggcccctccctctccagcaggcccatgggaggctggagttggggcagaggagaacttgctgcctcggatccccttcctaccacccggtccccactttattgccaaaacccagctgcaccccttcctgggcacacgctgctctgccccagcttgggcagatctcccacatgccaggggcctttgggtgctgttttgccagcccatttgggcagagaggctgtggtttgggggagaagaagtaggggtggcccgaaagggtctccgaaatgctgtctttcttgctccctgactgggggcagacatggtggggtctcctcaggaccagggttggcaccttccccctcccccagccactccccagccagcctggctgggactgggaacagaactcggtgtccccaccatctgctgtcttttctttgccatctctgctccaaccgggatgggagccgggcaaactggccgcgggggcaggggaggccatctggagagcccagagtccccccactcccagcatcgcactctggcagcaccgcctcttcccgccgcccagcccaccccatggccggctttcaggagctccatacacacgctgccttcggtacccaccacacaacatccaagtggcctccgtcactacctggctgcggggcgggcacacctcctcccactgcccactggccggcctcttccagccgcccccaccccccaggaccccttagcagccctgccctccctatcgtctgaacagttgtcttcctcagcctcctcccgcccccaccttgggaatgtaaatacaccgtgactttgaaagtttgtacccctgtccttccctttacgccactagtgtgtaggcagatgtctgagtccctaggtggtttctaggattgatagcaattagctttgatgaacccatcccaggaaaaataaaaacagacaaaaaaaaaggaaagattggttctcccagcactgctcagcagccacagcctccctgtatgcctgtgcttggtctactgataagccctctacaaaaaaacaaaagtatatatatatatgtacataatatcagaattataacaggcaaataaaacctgaaaatc

SEQ ID NO: 55702 - DNA, 3747 bp, Artificial Sequence
  derived and/or modified sequence
atggtggtggccctgcggtacgtgtggcccctgctgctgtgcagcccctgcttactgatccaaataccagaggagctgatggagccccctgttattactgaacagtccccgcggcgcctcgtggtctttcctactgacgatatttctctcaagtgcgaagcctccggcaagcctgaagtgcagttcaggtggactagagatggagttcactttaagccaaaggaggaattgggcgtcacggtgtaccagtctccacatagcggcagtttcacaataaccggaaataattccaacttcgcccagaggtttcagggcatctatcgatgcttcgcatccaacaaactcggcaccgctatgtcacacgagattcgtctgatggctgaaggcgcgcctaaatggcccaaagagactgtgaaacctgtcgaagttgaagaaggcgaaagtgtggtgctcccctgcaacccacccccatcagccgaaccgcttagaatctattggatgaatagcaagattttgcacattaagcaggatgaaagagtgactatgggacaaaatggaaatctctacttcgccaacgtcctgaccagtgacaaccactcggactacatctgccacgcccactttccaggaacccgcactatcattcagaaggagccaattgatctgcgcgttaaagcgacgaatagcatgatagatcgtaaacctaggctgctatttccgactaattcttcttcacatctcgttgcactgcagggtcagcctctggtgctcgagtgtatcgcagaggggttcccgacacctacgattaagtggctccggccctctggcccgatgccagctgatagagtaacatatcagaatcacaataagaccctccagttgctcaaggtgggcgaagaagacgatggcgagtaccggtgtctggcggagaatagcctcggttcagccagacacgcctattacgtgacagttgaggctgcgccatactggctccacaagccacagtctcatctttacggacccggcgaaacagcgcggctcgactgccaggtccagggtagaccgcaacccgaggtcacttggcgcatcaatgggatacccgttgaagagcttgcgaaagatcaaaagtatagaatccagaggggcgctctgatactgtcaaacgtccagcctagcgacacaatggtcacgcagtgcgaagcgagaaaccgccacggccttttactggctaacgcctacatatatgtggtgcaactgcccgccaagatactgacagcagacaatcagacgtatatggcagtacagggcagtactgcttacctcctgtgtaaagcgttcggcgcgccagtgcctagcgtgcagtggcttgacgaggatggaacgaccgtcttgcaagatgaacgcttcttcccgtacgcaaacggcacactcgggattagggacctccaggcgaatgacactggccggtacttttgcctggcagcaaacgatcagaataacgtgactatcatggcaaatctgaaggttaaagacgctacacagataacacaaggtcctaggtccacgattgaaaaaaaaggctcaagggttacatttacctgccaggcatctttcgacccgagcctccagccgtctatcacctggagaggcgatgggcgtgacctgcaagaactgggagatagcgacaaatactttatagaagacggcagactcgtgatacacagtttagattactcagatcaaggaaactattcctgcgtagccagcaccgagctcgatgttgtggagtccagagctcagctcctggtcgtgggatcacctggacctgtgccaaggcttgtccttagcgaccttcacctgttgactcagagccaggtgcgggtaagctggagccctgcggaggaccataatgctcccatcgagaagtacgacatcgagtttgaggataaggagatggctcccgaaaagtggtattccctgggcaaggtgccaggcaatcaaacctcgacaacgctaaagctctctccgtacgtgcactatacttttagagtgaccgcgatcaacaaatacgggcccggggaaccttctcctgtttctgaaacagtggtaacccccgaggctgccccggagaaaaaccctgtggatgtgaagggcgaagggaatgaaacaacaaacatggtcatcacatggaaaccactaagatggatggactggaatgcaccgcaggtgcaatatcgggtgcagtggcggccccagggcaccagagggccttggcaagagcagattgttagtgatccgtttctagtcgtatctaacacctcaacatttgttccctacgaaatcaaggttcaggcagttaatagccagggaaaagggcccgaaccccaagttaccatcggatactcaggcgaggactatcctcaagctatcccggagctggagggaattgaaatcctgaactcaagcgctgtccttgtgaaatggagacctgttgacctggctcaggtgaagggccaccttagaggatacaatgtgacttactggagagagggttcacagagaaagcatagtaagagacacattcacaaagaccatgtcgtagtcccagcaaataccacctcagtgatattaagtgggctgcggccgtatagctcctaccacctggaggttcaggcctttaacggcagaggaagtggcccagctagcgaattcacattttccacaccggagggagttcctgggcatccagaggcactccacttggagtgccagtctaacaccagccttctcctgcgctggcagccaccactctcacacaacggggttctgaccggttatgtgctctcatatcatcccctcgatgaaggcggaaaggggcagctgtcttttaatctgcgcgaccctgagctccgaactcacaatctgacggatctgtccccccacctcaggtatcggttccagcttcaggccacgacgaaggagggacccggtgaggcaatcgtgcgagaaggagggaccatggcacttagcggtatttcagattttggcaacatatcagctactgccggcgagaattattctgtggtgtcatgggtcccaaaggagggtcagtgtaattttcggttccatattctgtttaaagctttgggcgaagaaaaagggggggcttccttgtcgccgcagtatgtgagctataatcagagctcctacactcagtgggacctccagcctgacactgactacgaaatacacctgtttaaggaacgcatgttccgtcatcagatggcggtgaaaacgaatggtactggccgggtacgcctcccgcctgccgggtttgccaccgagggatggttcattggctttgtgtccgctataatccttctgctcctggtcttactgatcctgtgttttattaagcgttcaaagggaggcaagtatagcgtaaaggacaaggaagatacacaggtggatagtgaggcccggccgatgaaagacgagacattcggggagtattcagacaatgaagagaaagcttttggctcctcgcagccttcgctgaacggggacattaagccactggggagtgacgactcgctagctgactatggaggcagtgtggatgtccagttcaacgaggacggctctttcataggacagtactcaggcaagaaggagaaagaggctgcaggcggtaacgactccagcggggcaacctcacccataaaccctgccgttgcactggaatag

SEQ ID NO: 55703 - DNA, 3747 bp, Artificial Sequence
  derived and/or modified sequence
atggtggtagcattgcgctatgtgtggcctctgttactctgctcgccttgcctgctgattcaaatccccgaagaactgatggaacccccagttattactgagcaaagtcctcgcaggttagtagtctttccaaccgacgacatctccctgaaatgtgaagcttccggtaagcctgaagttcagttcagatggacaagggacggagtccacttcaagcccaaggaagagctcggcgtaacagtgtaccagtcaccgcacagcggctccttcaccataaccggcaataacagtaatttcgcacaacggtttcaggggatctaccgctgttttgcgtcgaacaaattaggtactgcaatgtctcatgaaattcggctcatggccgagggcgcacccaagtggccaaaggaaacagtgaaacctgttgaagtggaagagggcgaaagtgtcgtactgccatgcaatcccccaccgtcggcagagcctctgcggatttactggatgaatagcaagatcttgcatattaaacaagatgagcgtgtgacaatgggacagaacggtaacctgtacttcgctaatgttctgaccagcgacaaccattcagattacatctgccatgcccactttccagggactcggaccattatccagaaagagccaatagacctgcgcgtgaaggccactaattccatgattgatagaaagcctcggcttctgttccctacaaactccagcagtcatcttgttgctctccaagggcagccccttgtactggagtgtattgcggaagggtttcctactccgaccataaaatggctgcgcccaagtggacccatgccggctgatagagtaacgtatcaaaatcacaataagacactacagttattgaaagtcggggaagaggacgacggtgaatacagatgccttgccgagaacagtctggggtctgcgagacacgcgtattacgtgaccgtcgaagccgcaccatattggttgcacaagccccagagccacttatatggtcctggcgaaactgccagactggactgtcaggtgcagggtcggccacagccagaggtgacatggcggatcaacgggattccagtggaagaactggcgaaggatcagaaatatcggattcagcgcggtgctcttatactgtcaaacgtccagcccagcgacactatggtcacacagtgcgaggcccgtaaccggcacgggctgctgttggccaatgcttatatatatgttgtccagctgcccgcaaagatactaacagccgataaccagacttacatggccgtgcaaggctccacagcataccttctctgcaaggcctttggtgctcccgttccgtctgtacagtggcttgacgaggatgggactaccgtgttacaggatgagcgcttctttccatatgccaacggcacccttggcatacgggacttgcaagccaatgatacgggacgatacttctgcctcgcagcgaacgatcagaacaatgtaacaatcatggcaaacctgaaagtgaaggacgccactcagatcacccagggacctcggagtacgattgagaaaaagggttcaagagttacgtttacctgccaggcgagttttgatccgtccctgcagccctccatcacttggcgcggagatggccgtgacctacaagaactgggcgattcagacaagtacttcattgaagacggacgcctggtgatacacagcttagactatagcgaccaaggtaactactcttgcgtggccagcacagagctcgacgtggtcgaatcaagagctcaactgcttgtagtcggaagccctggacccgtgcctagattagttctgagcgaccttcacttgttaacgcagagccaggtgagagttagttggtctcccgcagaagaccacaatgcccctatcgaaaagtatgacatcgaatttgaggacaaagaaatggctcccgagaaatggtattcactcgggaaagtgccgggaaatcagacctcaacaaccctcaagctgtcaccttacgttcactataccttccgggttacagcaattaataaatatggcccaggtgaaccatctcctgtgtcagaaacagtcgtgacgcccgaagctgcaccagaaaagaatccggttgacgtgaaaggggaaggcaacgagactactaatatggttatcacctggaagccacttagatggatggactggaatgcccctcaggtccagtacagagtgcagtggcgtccccagggcaccagagggccatggcaggaacagattgtgtcagacccattcctggtcgtatcaaacactagcacctttgtgccatacgaaataaaggtgcaggccgttaattcgcaggggaaaggacccgagccgcaggtgaccatcggatatagtggtgaagactacccccaggccatccctgaactagaggggattgagattctgaactctagcgctgttttagtgaagtggcggcctgtcgacctggcccaggtcaagggccacctccgaggatataacgtcacatattggcgggagggcagccagcggaaacattcgaaacgccatatccataaggaccatgtggtcgttccggcaaacacaacctcagtgatattgtctggtctacggccttactcatcgtaccacctggaggttcaggcctttaatggcagggggtcggggccagcttctgagtttaccttttctactccagaaggggttcctggccacccagaggctcttcatctggaatgtcagtccaataccagcttgcttctgaggtggcagccgcctctgtctcacaatggagtgttgactgggtacgtgctcagctaccacccactcgacgagggtgggaaggggcagctaagttttaatctgcgcgacccagaactaaggactcataacctcaccgacttgagtccgcacctgcgctacaggtttcagttgcaggccactaccaaggaagggccaggggaagccatagtcagggaggggggaacaatggccttaagcgggatatcggacttcggcaatattagcgctacggcgggagaaaactactccgttgtatcctgggtcccaaaggagggtcagtgtaattttcggttccacatcctctttaaagccctgggcgaggaaaaaggcggagcttccttgtcaccacagtacgtgtcttacaaccagtccagttacacccagtgggacctccagccagatacagattatgaaatccacttatttaaggaaaggatgttcaggcatcagatggcggttaaaacgaatggcaccgggagggtgcgccttccgcctgctggattcgcgaccgagggatggttcattgggttcgtatcagccattatactcttgctgctggtgcttctgattctctgtttcatcaagagaagcaagggaggtaagtattctgtcaaggataaagaagatactcaggtcgattcagaagcgaggcctatgaaagacgagacttttggggagtatagtgataacgaagaaaaggcattcggctcgtcacagccaagcctgaacggggacatcaaaccactcggttccgatgactctctggccgattatgggggatctgtggatgtccagtttaacgaagatggatcgtttatcgggcagtactccggcaaaaaagagaaagaggctgcagggggtaacgacagctctggagccacgagtcctattaacccagcagtcgccctggaatag

SEQ ID NO: 55704 - DNA, 3747 bp, Artificial Sequence
  derived and/or modified sequence
atggtagtagccttacggtatgtgtggcccctgctcttgtgtagcccatgcctcctcatccagatcccagaggagttgatggagccgcccgtgataacagagcaatccccacgacgcctggtggtcttccccactgatgacatctctctcaaatgcgaagcctcaggcaagcctgaagtacagttccgctggacaagggacggagtgcacttcaaaccgaaagaggaactgggagtgactgtctatcaaagtcctcacagcggtagctttacaattaccgggaacaacagtaatttcgctcagcggtttcagggcatttaccggtgcttcgcttccaacaaacttgggaccgccatgagccacgaaattaggctgatggccgaaggagctccaaaatggccaaaggaaaccgtcaagcctgtggaggttgaggaaggagaatcagttgtcttaccttgtaatccccctccgtcagccgaacccttgcgtatttattggatgaactctaaaatcctgcacattaaacaggatgaaagggtgacaatgggccagaacgggaatctttacttcgccaacgtgttaacttcagataatcactcggactatatctgtcacgcccactttcccggaactagaactatcattcaaaaggagcccattgacctacgggttaaagctactaatagcatgattgatcggaagcctcgtctgctgttccccactaactcaagctcccacctagtggcactgcagggccaacccctggtcttagagtgtattgcagagggcttcccaacccctacaataaagtggctgcgcccttcgggcccaatgccagccgatcgtgttacctaccagaaccataataagactctgcaactgctgaaggtaggagaggaggacgatggagagtatagatgcctggcagaaaactccctgggctccgcccggcatgcgtactatgtaacagttgaggccgctccctattggctgcataaacctcagtcccatctgtacggccctggagagacagcccggttagactgccaggtgcagggacgcccccagccagaggtgacttggcggattaacggcatcccagttgaagaactggccaaagatcagaaatacagaattcagcgcggcgcactgatcctgtccaacgttcagccaagtgacacaatggttacgcagtgtgaggccaggaatcggcacgggctccttctagcaaatgcctacatttacgtagtgcagctacccgctaagatcctcacggcagacaatcagacttatatggccgtgcaggggagtacagcataccttttgtgcaaagcctttggcgctcccgtaccaagcgtccagtggctcgatgaggatggtaccacagtgctgcaagacgaacggttctttccttatgccaacggcaccctcggtatccgggatctgcaggcgaatgatacagggcggtacttttgtctggctgctaacgaccaaaacaacgtgaccattatggctaaccttaaggtgaaagacgctacacagatcacacagggccctcgttcaaccatcgagaaaaagggtagcagagtgacattcacctgccaggcttcttttgacccttcactgcaaccgtctatcacatggagaggggacggcagagacctccaggaactgggagattccgataagtactttatcgaagacggccgactggtcattcattcactagactatagcgaccaaggcaactacagctgcgtggctagcaccgagctcgatgtggtggagtccagggctcaattactcgttgtcggaagccccgggcccgtgccaagacttgtgctctccgatcttcatctcctgactcagtcccaagttagggtgtcctggtcacccgccgaggaccataacgctccaatcgagaagtacgacattgaatttgaagataaagagatggcacccgagaaatggtattctctcggtaaagtaccagggaaccagacctccacgaccttaaaattgtccccatatgtgcactacacgtttcgggttactgccataaataaatatggccccggcgagccttcaccagtttcggagactgttgtcacacccgaggctgcaccggagaaaaatcctgtggatgtgaaaggtgaggggaatgaaactactaatatggtgataacctggaagcctctccgatggatggactggaatgccccacaggtgcagtatcgcgtccagtggcggccccagggcaccagaggcccctggcaagagcaaatagttagtgacccattcctggtcgtcagcaatactagcacctttgtgccttatgagattaaagtccaagcggtgaattcacagggcaaaggtcccgagccccaggtgaccattgggtattctggcgaagattacccccaggctatcccggagttggagggcatcgagatacttaatagctcagccgtcttagtcaaatggaggcctgtagacttggcccaggtgaaaggtcatctgaggggctacaacgtcacgtactggagggaaggatctcaacgtaagcacagcaaacgccatatacacaaagatcacgttgtggtgccggccaacactaccagtgtcatactatctggcttgagaccatatagctcttaccacttggaggtgcaggctttcaacggccggggatccgggccggcaagtgagtttacctttagcacacctgaaggagtccccggacatcctgaggcactgcacctggagtgtcaatccaacacctctctgttgctacggtggcagcctcccctctcgcacaatggggtgctcacaggctacgtcctgagctaccaccctctcgatgaagggggaaagggtcagctgtcatttaatctcagagacccagagctcaggacccataacctgacggacctgtctccgcatcttcggtaccggtttcagctgcaggccacgactaaagagggcccaggagaagcaatagtgagggagggtggaactatggctttgtctgggatatctgacttcggcaatatctccgctacagccggcgaaaattattccgtggtctcatgggtccctaaggagggccaatgcaactttagattccacattctgttcaaagccctgggtgaagaaaaggggggcgcctccctctcgccacagtacgtatcttataatcagtctagctacacccagtgggatctacagccagacacagactatgagatacacctgttcaaggagaggatgttccgacaccagatggccgtcaagacaaatggtaccggacgggtccgtctgccaccagctggcttcgctacagaaggctggttcattgggttcgtgagcgcaattatattacttctgttggtgttgctgatactttgtttcatcaaaaggagtaagggcggtaagtactccgtgaaagataaggaagatacccaggtggactccgaggctagacccatgaaagatgagaccttcggcgagtactctgacaacgaggaaaaggccttcggctcctcccagccatccttgaatggcgacattaagcctctgggctctgacgattcgctggccgactatggcggttccgttgacgtccagtttaacgaggatggctccttcatcggacagtactcgggcaaaaaggaaaaggaagcagctggtgggaatgacagttctggcgcaaccagtccaattaacccagctgttgcattagaatag

SEQ ID NO: 55705 - DNA, 3747 bp, Artificial Sequence
  derived and/or modified sequence
atggtggtcgccctaagatacgtctggccactgctgctgtgttcaccctgcctgctgattcagattccggaggagctgatggagcctcctgttattacagagcagtctccacgaaggctagtcgtctttcccaccgacgatatctcattgaagtgtgaggcaagcggaaagcccgaggtccagttcagatggactcgcgacggagtgcatttcaaacccaaagaagaactcggagttaccgtataccagagccctcatagcggctccttcacaatcactggcaacaactccaatttcgcacagcgattccagggaatttatcggtgcttcgcctcgaataagctcggcacagcaatgagccacgaaattcgcctgatggcagaaggcgccccaaaatggccgaaggagacagtgaagccggtggaggtggaagagggtgaatctgtcgtgctgccctgcaatcccccgccttctgctgagccacttcgcatttactggatgaactctaaaatcctgcatatcaagcaggatgagagagttactatgggacagaatggtaatctgtattttgctaacgtgcttacttcggacaaccattccgactatatttgccacgctcactttccaggtactaggacgatcattcagaaggaacctatagacttacgtgtaaaggccacaaatagcatgatagaccgcaagccccgactgttgttccctaccaattcttccagtcatctggttgccttgcaagggcaaccactggtgctggaatgcattgccgaaggtttccccaccccaacaataaaatggctccggccaagcgggccgatgcccgccgaccgagtgacgtaccaaaatcacaacaaaaccctgcagctgttaaaggtaggcgaggaggacgatggcgagtatcggtgcctggcagagaatagtttgggctcagctcgccatgcctactatgttacagttgaggccgctccctactggttacacaagccccagagccatctgtatggcccaggggagacagccagacttgactgtcaggtgcaaggtagacctcaacccgaggtcacctggagaataaacggcatccccgtggaagagctggccaaggaccagaaatatcgcatacagaggggagctctcatactgagtaatgtccaacctagtgacactatggttactcagtgcgaggctcggaaccggcatggactcctcctagctaatgcttatatttatgtcgtgcaactacccgcaaagattctgaccgccgataaccagacttacatggccgtgcaggggagtacggcttacttgctttgtaaggccttcggagctccagtcccctccgtccagtggcttgatgaagacggcacgaccgtgctgcaggatgagcggttcttcccatatgctaatggtactttagggatccgggatttgcaggccaacgataccggccgctacttctgcctagcagcgaatgaccagaataacgtgaccatcatggccaacctcaaagtgaaggacgccactcaaataactcaagggcctcgttctactatcgagaaaaagggcagccgtgtaactttcacttgtcaagcaagctttgatcctagtctccagccgagcattacttggaggggggacggacgcgacctgcaagagctaggcgacagtgataagtacttcatcgaagacgggcgcctggtaatccactctcttgattatagcgaccagggtaactattcatgcgttgcctctaccgagttggacgtcgtggaatccagagcccaactgcttgtcgtcggcagccctggccctgtgcctcgtctagtcctatctgatcttcatttactgacacagagtcaggtcagggtcagctggagtccggcagaggaccacaacgcccccatcgagaagtacgatatcgagttcgaagacaaagaaatggcgcccgagaagtggtacagccttggaaaggtgccagggaaccagacctctaccacccttaaactttctccctacgtgcactatacatttcgtgtgaccgcgattaataaatacggcccaggagaaccatcacctgtgtcagagaccgtggtgacacccgaggccgcgcctgagaagaatccggtggatgttaaaggagaaggcaacgagactacgaatatggtgattacttggaagccactgagatggatggattggaatgctcctcaggtgcaataccgagtgcagtggcgtccgcaaggcactcgggggccatggcaggagcagattgtgtcagacccttttctcgtagtgtccaacacatcgacctttgtgccgtacgagatcaaggttcaggccgtcaatagccaaggcaagggacccgagccgcaagttaccatcggctattcgggtgaagactatcctcaggccattcctgaactagaaggcatcgagatcctaaactcttccgccgtgcttgtgaagtggcgtccagtagacttggcccaggttaagggccatttgcgcggatacaatgtgacctactggcgcgaggggtcgcagcgcaagcactccaagagacatattcataaagatcatgtggtggttccagctaacacaacgtcagtgattctgagcggtctcaggccatattcttcctaccacctggaggtgcaggcctttaacggaaggggcagtgggcctgcctcagagtttaccttcagcacaccggagggcgtgccagggcatccagaagcactgcatctggagtgtcagtctaacaccagtctgcttctccgttggcagccccccctatcgcacaatggggttcttacaggctacgtgctttcttaccaccctctggacgaggggggaaaaggccagctttcattcaacttaagggatccagagttaagaacccataaccttacggatttgagtccccacttaagatatcggttccagctccaggccactacaaaagaaggcccaggcgaagccatagttcgcgaaggcgggacgatggccctcagtggaatcagcgacttcggtaatatttccgccactgctggagagaattactctgtggttagctgggtaccaaaggagggacagtgcaatttccgcttccacattctgttcaaagccctcggggaagaaaaaggcggagccagcttgagcccccaatacgtgtcctataaccaaagttcctacacccaatgggacctgcagcccgacactgattacgaaatacacctcttcaaggagcgcatgtttaggcaccagatggcagtcaagactaacggcacaggtcgggtcagactgcctcccgccggatttgctactgaaggctggtttattgggttcgtatccgctattatactgctgttgctcgtcctgctgatcctgtgcttcatcaagcgctcaaagggaggaaagtactctgtaaaggacaaggaggatacacaggtcgacagtgaggcaagaccgatgaaggatgaaacgtttggcgaatactccgacaacgaggagaaggccttcggtagttcacagccctcattaaacggggacattaagccgttggggagcgacgactccctggctgactacggcggtagcgtggacgtccagttcaatgaggatgggagctttatagggcagtattccggcaaaaaggagaaggaagccgctggggggaacgattcatcaggagccacatcccccattaatccagccgtagccctagaatag

SEQ ID NO: 55706 - DNA, 4655 bp, Artificial Sequence
  derived and/or modified sequence
catcggcatcgcagacgcgctcgggcggcgggtccgaggccggcgtgcgcggaggctgggcgggcagcccgagcggtggccgcagcgcagtgcccccactcccaactcccgccccaagccgcccaccagcccccttcccctccggccggagcctgaaccgagcccggctggctgtgctgcgcggtgccgccgggaaagatggtcgtggcgctgcggtacgtgtggcctctcctcctctgcagcccctgcctgcttatccagatccccgaggaattgatggagccacctgtcatcacggaacagtctccacggcgcctggttgtcttccccacagatgacatcagcctcaagtgtgaggccagtggcaagcccgaagtgcagttccgctggacgagggatggtgtccacttcaaacccaaggaagagctgggtgtgaccgtgtaccagtcgccccactctggctccttcaccatcacgggcaacaacagcaactttgctcagaggttccagggcatctaccgctgctttgccagcaataagctgggcaccgccatgtcccatgagatccggctcatggccgagggtgcccccaagtggccaaaggagacagtgaagcccgtggaggtggaggaaggggagtcagtggttctgccttgcaaccctcccccaagtgcagagcctctccggatctactggatgaacagcaagatcttgcacatcaagcaggacgagcgggtgacgatgggccagaacggcaacctctactttgccaatgtgctcacctccgacaaccactcagactacatctgccacgcccacttcccaggcaccaggaccatcattcagaaggaacccattgacctccgggtcaaggccaccaacagcatgattgacaggaagccgcgcctgctcttccccaccaactccagcagccacctggtggccttgcaggggcagccattggtcctggagtgcatcgccgagggctttcccacgcccaccatcaaatggctgcgccccagtggccccatgccagccgaccgtgtcacctaccagaaccacaacaagaccctgcagctgctgaaagtgggcgaggaggatgatggcgagtaccgctgcctggccgagaactcactgggcagtgcccggcatgcgtactatgtcaccgtggaggctgccccgtactggctgcacaagccccagagccatctatatgggccaggagagactgcccgcctggactgccaagtccagggcaggccccaaccagaggtcacctggagaatcaacgggatccctgtggaggagctggccaaagaccagaagtaccggattcagcgtggcgccctgatcctgagcaacgtgcagcccagtgacacaatggtgacccaatgtgaggcccgcaaccggcacgggctcttgctggccaatgcctacatctacgttgtccagctgccagccaagatcctgactgcggacaatcagacgtacatggctgtccagggcagcactgcctaccttctgtgcaaggccttcggagcgcctgtgcccagtgttcagtggctggacgaggatgggacaacagtgcttcaggacgaacgcttcttcccctatgccaatgggaccctgggcattcgagacctccaggccaatgacaccggacgctacttctgcctggctgccaatgaccaaaacaatgttaccatcatggctaacctgaaggttaaagatgcaactcagatcactcaggggccccgcagcacaatcgagaagaaaggttccagggtgaccttcacgtgccaggcctcctttgacccctccttgcagcccagcatcacctggcgtggggacggtcgagacctccaggagcttggggacagtgacaagtacttcatagaggatgggcgcctggtcatccacagcctggactacagcgaccagggcaactacagctgcgtggccagtaccgaactggatgtggtggagagtagggcacagctcttggtggtggggagccctgggccggtgccacggctggtgctgtccgacctgcacctgctgacgcagagccaggtgcgcgtgtcctggagtcctgcagaagaccacaatgcccccattgagaaatatgacattgaatttgaggacaaggaaatggcgcctgaaaaatggtacagtctgggcaaggttccagggaaccagacctctaccaccctcaagctgtcgccctatgtccactacacctttagggttactgccataaacaaatatggccccggggagcccagcccggtctctgagactgtggtcacacctgaggcagccccagagaagaaccctgtggatgtgaagggggaaggaaatgagaccaccaatatggtcatcacgtggaagccgctccggtggatggactggaacgccccccaggttcagtaccgcgtgcagtggcgccctcaggggacacgagggccctggcaggagcagattgtcagcgaccccttcctggtggtgtccaacacgtccaccttcgtgccctatgagatcaaagtccaggccgtcaacagccagggcaagggaccagagccccaggtcactatcggctactctggagaggactacccccaggcaatccctgagctggaaggcattgaaatcctcaactcaagtgccgtgctggtcaagtggcggccggtggacctggcccaggtcaagggccacctccgcggatacaatgtgacgtactggagggagggcagtcagaggaagcacagcaagagacatatccacaaagaccatgtggtggtgcccgccaacaccaccagtgtcatcctcagtggcttgcggccctatagctcctaccacctggaggtgcaggcctttaacgggcgaggatcggggcccgccagcgagttcaccttcagcaccccagagggagtgcctggccaccccgaggcgttgcacctggagtgccagtcgaacaccagcctgctgctgcgctggcagcccccactcagccacaacggcgtgctcaccggctacgtgctctcctaccaccccctggatgaggggggcaaggggcaactgtccttcaaccttcgggaccccgaacttcggacacacaacctgaccgatctcagcccccacctgcggtaccgcttccagcttcaggccaccaccaaagagggccctggtgaagccatcgtacgggaaggaggcactatggccttgtctgggatctcagattttggcaacatctcagccacagcgggtgaaaactacagtgtcgtctcctgggtccccaaggagggccagtgcaacttcaggttccatatcttgttcaaagccttgggagaagagaagggtggggcttccctttcgccacagtatgtcagctacaaccagagctcctacacgcagtgggacctgcagcctgacactgactacgagatccacttgtttaaggagaggatgttccggcaccaaatggctgtgaagaccaatggcacaggccgcgtgaggctccctcctgctggcttcgccactgagggctggttcatcggctttgtgagtgccatcatcctcctgctcctcgtcctgctcatcctctgcttcatcaagcgcagcaagggcggcaaatactcagtgaaggataaggaggacacccaggtggactctgaggcccgaccgatgaaagatgagaccttcggcgagtacagtgacaacgaggagaaggcctttggcagcagccagccatcgctcaacggggacatcaagcccctgggcagtgacgacagcctggccgattatgggggcagcgtggatgttcagttcaacgaggatggttcgttcattggccagtacagtggcaagaaggagaaggaggcggcagggggcaatgacagctcaggggccacttcccccatcaaccctgccgtggccctagaatagtggagtccaggacaggagatgctgtgcccctggccttgggatccaggcccctccctctccagcaggcccatgggaggctggagttggggcagaggagaacttgctgcctcggatccccttcctaccacccggtccccactttattgccaaaacccagctgcaccccttcctgggcacacgctgctctgccccagcttgggcagatctcccacatgccaggggcctttgggtgctgttttgccagcccatttgggcagagaggctgtggtttgggggagaagaagtaggggtggcccgaaagggtctccgaaatgctgtctttcttgctccctgactgggggcagacatggtggggtctcctcaggaccagggttggcaccttccccctcccccagccactccccagccagcctggctgggactgggaacagaactcggtgtccccaccatctgctgtcttttctttgccatctctgctccaaccgggatgggagccgggcaaactggccgcgggggcaggggaggccatctggagagcccagagtccccccactcccagcatcgcactctggcagcaccgcctcttcccgccgcccagcccaccccatggccggctttcaggagctccatacacacgctgccttcggtacccaccacacaacatccaagtggcctccgtcactacctggctgcggggcgggcacacctcc

SEQ ID NO: 55707 - DNA, 1537 bp, Artificial Sequence
  derived and/or modified sequence
ccggcgtgcgcggaggctgggcgggcagcccgagcggtggccgcagcgcagtgcccccactcccaactcccgccccaagccgcccaccagcccccttcccctccggccggagcctgaaccgagcccggctggctgtgctgcgcggtgccgccgggaaagatggtcgtggcgctgcggtacgtgtggcctctcctcctctgcagcccctgcctgcttatccagatccccgaggaattgatggagccacctgtcatcacggaacagtctccacggcgcctggttgtcttccccacagatgacatcagcctcaagtgtgaggccagtggcaagcccgaagtgcagttccgctggacgagggatggtgtccacttcaaacccaaggaagagctgggtgtgaccgtgtaccagtcgccccactctggctccttcaccatcacgggcaacaacagcaactttgctcagaggttccagggcatctaccgctgctttgccagcaataagctgggcaccgccatgtcccatgagatccggctcatggccgagggtgcccccaagtggccaaaggagacagtgaagcccgtggaggtggaggaaggggagtcagtggttctgccttgcaaccctcccccaagtgcagagcctctccggatctactggatgaacagcaagatcttgcacatcaagcaggacgagcgggtgacgatgggccagaacggcaacctctactttgccaatgtgctcacctccgacaaccactcagactacatctgccacgcccacttcccaggcaccaggaccatcattcagaaggaacccattgacctccgggtcaaggccaccaacagcatgattgacaggaagccgcgcctgctcttccccaccaactccagcagccacctggtggccttgcaggggcagccattggtcctggagtgcatcgccgagggctttcccacgcccaccatcaaatggctgcgccccagtggccccatgccagccgaccgtgtcacctaccagaaccacaacaagaccctgcagctgctgaaagtgggcgaggaggatgatggcgagtaccgctgcctggccgagaactcactgggcagtgcccggcatgcgtactatgtcaccgtggaggctgccccgtactggctgcacaagccccaccccccaggaccccttagcagccctgccctccctatcgtctgaacagttgtcttcctcagcctcctcccgcccccaccttgggaatgtaaatacaccgtgactttgaaagtttgtacccctgtccttccctttacgccactagtgtgtaggcagatgtctgagtccctaggtggtttctaggattgatagcaattagctttgatgaacccatcccaggaaaaataaaaacagacaaaaaaaaaggaaagattggttctcccagcactgctcagcagccacagcctccctgtatgcctgtgcttggtctactgataagccctctacaaaaaaacaaaagtatatatatatatgtacataatatcagaattataac

SEQ ID NO: 55708 - DNA, 3747 bp, Artificial Sequence
  derived and/or modified sequence
atggtggtggccctgcggtacgtgtggcccctgctgctgtgcagcccttgtcttcttatacagatcccggaagaactcatggaaccacccgtgataactgaacagtcccccaggcggttggttgtgttcccaacagacgacatatccctcaagtgtgaggcttccgggaaacctgaggtgcagttccgctggacccgggatggagtgcactttaaacccaaagaggaactcggcgtgactgtctaccaatcaccccatagtggctcctttacgatcacgggaaataactcgaattttgctcagcgtttccagggcatctaccgttgctttgcgagcaataagttagggaccgcaatgtcgcacgagattcggctcatggctgagggggcgcctaagtggcccaaagagacagtaaagcctgttgaggtggaggagggggagagtgtagtactgccctgtaatccaccccctagcgcagaacctctgagaatctactggatgaattcaaaaatcctgcatatcaagcaggatgagcgagtgactatggggcaaaacggcaacctttactttgccaacgtcctgacatctgataaccattctgactatatctgtcacgctcatttccccggcactcgtacaattatccagaaggagcctatagatctgagggtcaaggctaccaatagcatgatcgataggaagcccagactcctctttccgaccaactcttcctcgcacctcgtggccttacaaggacagcccctggtgttggagtgcatcgccgagggcttccctacacctacaattaagtggctacgcccctcaggacctatgcctgccgacagggttacctaccaaaaccacaataagacactgcagctgcttaaggtcggggaagaagatgacggtgaataccgctgcttggccgagaacagcctgggcagcgcccgccatgcctactatgtgacagtcgaggcggccccttattggcttcataaaccgcagtctcatctgtatggtccaggggaaactgccagactcgattgtcaggtgcaagggaggccacagcccgaggtgacttggcgcataaatgggatccccgtcgaagaactggcaaaggatcagaaatatagaattcaacgaggtgccctcatcctgagcaacgttcaacccagcgacacaatggtgacccagtgcgaggcccgaaatcggcacggcctgctcttggctaatgcctacatttatgttgtccagttacccgctaagatactgaccgcggacaatcagacatacatggctgtgcagggctctactgcctatctgctgtgcaaagcattcggagcccccgtgcctagcgttcagtggttggacgaagatgggaccaccgtgctccaggacgagagatttttcccttatgccaatgggacacttggtattcgagatttacaggcaaatgacactggcaggtacttctgcctggctgctaatgatcagaataacgtgacaatcatggcaaatcttaaggtcaaggacgcaacccagattactcaggggccaaggagtacgatagaaaagaaagggtctagagtgacctttacttgccaggcgtctttcgatcccagcctccagcccagcatcacctggcgcggggatggccgggacttgcaagagcttggcgactctgataagtatttcatcgaagacgggcgcctcgttattcactccctcgattattctgaccaagggaattatagttgtgtggccagtaccgaattggatgtggttgagtcaagggcgcagttgctagtggtgggatcgcccggaccagtgccccgactggtcttaagcgatctacacctgctgacccaaagccaggttagagtgtcttggagcccggcagaggaccataacgccccaatcgagaagtacgatatcgagttcgaggataaggagatggcacccgagaaatggtattcgctagggaaggtgcctggaaatcagacctcaaccactctgaaactcagcccttacgtgcactatactttccgggtaacggccattaacaagtacggtcccggagagcctagccccgtgtccgagactgtggtgacccctgaagccgctcccgaaaagaatccagtggacgtaaagggtgagggcaacgaaacaactaatatggtgatcacttggaaacccctcaggtggatggattggaatgccccacaggtgcagtatagagtacagtggagacctcaagggacaagagggccctggcaggagcagatagtctctgatccgtttctcgtggtgagtaatactagcacgttcgtgccgtacgagattaaagtccaggccgtgaatagccagggcaagggccccgagccgcaagtgacgatcggatactcaggcgaggattatcctcaggcgatcccagagctggagggaatcgagatcctcaattcaagtgctgtgctcgttaagtggcggcccgtcgatctggctcaagtgaaaggccatcttagaggttataacgtgacttattggcgagagggaagccagcggaagcattccaagaggcatatccataaagaccatgtggtcgtccccgccaatacaacctctgttattctgtctgggctgcgtccctactcctcataccatttagaggtgcaggcatttaacggcagaggatctgggccagcatcagagttcacattctctaccccagagggggtacctggacacccagaggccctgcatctggagtgccagagtaatacgtccctgctcttaaggtggcagccgcccctgtcacacaatggcgttctgacagggtatgtgctttcctatcatcccctggatgaagggggcaaaggacaactctcattcaaccttcgggacccagagctcagaacgcacaacctgacagacctgagccctcacctgcgctatagatttcagctgcaggcgacgaccaaggaagggcctggagaagcaatagtaagggaagggggcacaatggccctctctggcattagtgacttcgggaatatctctgcaaccgccggggaaaattattctgtggtgtcctgggttcctaaggaaggtcagtgtaacttccggtttcacattctatttaaagcactgggcgaggagaaaggaggagcgagtttgtctccccaatacgtgagttataatcaaagcagctatacccagtgggatctgcagcccgatacagactacgagatccacctctttaaggagcggatgttcagacaccaaatggcagtgaaaactaatggcaccgggagagtaagactccctcccgcagggttcgctaccgagggctggttcattggttttgtgtctgcaatcatcctgctgctgttggtactgctcatcttgtgtttcatcaaacgcagcaagggtgggaaatactcagtgaaagataaagaggatacccaggttgattccgaagctcggcccatgaaagacgaaacttttggagagtacagcgacaacgaggagaaagcctttggcagctctcagcccagcctgaacggtgacattaagccattaggcagtgacgactccctcgcagattacggcggtagtgtagatgtgcagtttaacgaggacgggagcttcatcggacaatacagcggaaaaaaagagaaggaggctgccggaggcaacgatagttcaggagctacatcccccattaatcccgcagtggctctcgagtag

SEQ ID NO: 55709 - DNA, 3747 bp, Artificial Sequence
  derived and/or modified sequence
atggtggtggccctgcggtacgtgtggcccctgctgctgtgcagcccttgtcttctgatccagatccccgaggagttaatggaaccacccgtgataacagagcagtctccacgacgactggttgtgttccctaccgacgacatcagcctgaaatgcgaggcgagcggtaagcccgaggtgcagttccgatggactcgcgatggtgtccacttcaaacccaaagaggagctgggggttaccgtttatcagtcccctcattccggctcctttacgattacaggaaataactccaattttgctcagaggttccaaggcatttacagatgtttcgcctccaataagctgggcactgcaatgtcgcacgagatcagattgatggcagagggcgcacccaagtggcccaaagagacagtcaaacccgtggaagtggaagagggggaatccgtggtgctcccgtgtaatcctccccccagcgcagaaccactccgaatctactggatgaactctaaaatcctgcatatcaagcaggacgagagagtcaccatggggcagaacggaaacctctatttcgctaatgtgttaactagtgacaaccactcagactatatctgtcatgcgcatttcccgggaaccaggacgataattcaaaaagagcccatcgacctccgcgtgaaggctaccaattctatgatagatcgcaagccacgcctcttgttccctaccaactcgtcttctcatcttgtggccctgcagggacaacccttagtgctagagtgtattgccgagggatttcctacccctactatcaaatggttgcgcccatccgggcctatgcccgccgaccgtgtgacctatcagaaccacaataagacactgcaactgctgaaggtgggcgaagaagacgatggcgagtaccggtgcttagccgagaattcgctgggcagtgcccggcacgcttattatgttactgtagaggccgccccgtattggctgcacaaaccccaatcacacctttacggtccgggcgagactgcaagactcgactgtcaagtgcaggggcggcctcagccagaggtgacctggcgaataaatgggatccctgtcgaggagctcgctaaggatcaaaagtacaggatccaacggggagctcttatcctgagtaacgttcagccaagtgacacaatggtcactcagtgcgaggctaggaatcggcacggactcttactggctaacgcatacatttatgtggttcaactgccagcaaaaattttaaccgccgacaaccagacctacatggccgtccagggaagcacagcatacttgttgtgcaaggccttcggcgctccagtcccctccgtccagtggctggacgaagatggaaccacagtgttgcaggacgaacggttcttcccctatgctaacgggacactgggaattcgtgatctgcaggctaacgatacagggaggtacttctgtctggctgccaacgaccagaacaacgtcaccatcatggccaatcttaaggtaaaggatgctactcagataacccagggaccccgatccactattgaaaaaaagggcagtcgggttacgtttacgtgccaggcaagcttcgatcctagcctccagccaagcataacgtggcgaggggatgggagagacctccaagaactgggcgattctgacaagtatttcatagaagatggaagactggtaatacattctctggactattctgaccagggcaactactcgtgcgtagcctcaactgagcttgatgtcgtggaatcccgtgctcagttgctggttgtggggagtccaggaccagtgccacgcttagtactgagtgacctccacctgctgacgcaaagtcaggtgagggttagctggagcccagcagaagatcacaacgctccaatcgaaaagtacgacatagagttcgaggacaaagaaatggctcccgagaaatggtactctctgggtaaagtgccaggaaaccagaccagcaccacgctgaagctgagcccttatgtccactacacttttcgggttacagctatcaacaaatatggccccggcgaaccgtcacccgtgtcagagacagtggtcacgccagaagccgcccccgaaaaaaacccggttgatgttaagggagagggtaatgagactacgaatatggtgatcacctggaagccactgcggtggatggactggaacgctcctcaggtgcaataccgggttcagtggaggcctcagggcactcgggggccttggcaggagcagatcgtctctgacccattcctggtcgtttccaacacatcaacgtttgtcccttacgaaatcaaagtgcaggcagtcaactcgcagggtaagggccccgagcctcaggttaccattgggtactcaggcgaggattacccccaggcaatcccagagctggagggaatcgagatcctaaattccagcgccgtcctagtgaagtggcggcctgtcgacctggcacaggtaaaagggcacttgagggggtacaacgtcacctattggcgggaaggctctcagaggaaacatagtaagcgccacattcataaggaccatgtcgtggtgccggcaaataccaccagcgtcatacttagcggactgaggccctattccagttatcatttagaagtgcaagcattcaacgggaggggtagcggacccgcaagcgaattcacgttttcaacaccggagggggtgcccggccatcctgaagccctgcacctggagtgccagagcaacactagccttctgctcaggtggcaaccgccactcagccataacggcgtcctaaccggttatgtcctgagctatcacccacttgatgagggcggaaagggtcagctgtctttcaatttaagggacccagaactgcggacccacaacttgaccgatttgtcccctcacctaaggtatcgattccaactgcaggccactacaaaggaaggtcctggtgaggcaattgtaagggaagggggcactatggctttgtccggaatatccgatttcgggaatatttctgctacagcaggcgagaactacagtgttgtcagctgggttcccaaggaaggccaatgcaactttaggttccatatcctgttcaaggcactgggggaagagaagggaggcgcatcattgtcccctcaatacgtatcgtacaaccagtcctcttacacccagtgggacctgcaacctgataccgattatgagatccatcttttcaaggaacgcatgtttaggcaccagatggccgtaaagacaaacggcacgggacgggttaggctaccgccggcagggtttgccaccgagggatggttcatcggcttcgtgtcggctatcatacttctcctactggttctgctgattctctgctttatcaaacgaagcaagggagggaagtatagtgtaaaggataaagaggacactcaggtagacagcgaggctcggcctatgaaagatgaaacatttggagaatattccgacaacgaggaaaaggcttttgggtccagtcaacctagcctgaatggagacattaaacctctcgggtccgatgactcactggcagattacggcgggtctgtggacgtgcagttcaacgaggacgggagttttattgggcagtatagcgggaagaaggaaaaagaagcggccggaggcaacgactcgagcggtgccacttcacctattaatcctgcagtggcacttgaatag

SEQ ID NO: 55710 - DNA, 3747 bp, Artificial Sequence
  derived and/or modified sequence
atggtggtggcactgagatatgtgtggcctctgttactgtgttctccatgtctacttattcagatcccggaggagctaatggaacccccagtgattactgagcagtccccgcgacgcctagtcgtcttccctaccgatgacataagcctgaagtgcgaggctagcggcaaacccgaagtacagttcagatggacaagagacggggtgcattttaaacccaaggaggaactcggtgtgaccgtgtaccagtccccccatagcggctccttcactatcacaggcaataattcaaactttgcacagcggtttcagggtatctacaggtgcttcgcgagcaataaattgggaactgcgatgagccacgaaatccgattaatggcagagggcgctccaaaatggcctaaagaaaccgtgaaaccagtcgaggttgaggaaggcgagtctgtggtgttaccatgcaacccccctccaagcgccgaaccccttcggatctactggatgaactccaaaatactccatattaagcaagacgaacgggttaccatgggccagaacgggaacctgtactttgcaaacgtcctcacttccgacaatcattccgactacatttgccacgcccactttcccggtaccagaactattatccagaaagagcccatcgatctcagggtaaaggcaacgaactccatgattgatcgcaagcccagacttttattccccacaaatagttcaagccatctggtcgctcttcaggggcaacccctggtactggagtgcatcgccgaaggcttccctacacccaccatcaagtggttacgcccaagtggccctatgcccgcagaccgtgtgacttaccagaaccataacaaaactctccagctgcttaaggtgggcgaggaggatgatggtgagtaccgctgcctcgctgagaactcactggggtctgctcgccatgcatactacgttacagtcgaagccgctccttattggctgcataaaccgcagagtcacctatacggccctggggagaccgccaggctggattgtcaggtccaaggccgaccccagcctgaagtgacctggcgcattaacggaataccagttgaggaacttgctaaggatcagaaatataggatacagaggggagctcttatcctgtccaacgttcagccctccgacaccatggtaactcagtgcgaggcccgtaacaggcatggcctgctgctcgcaaatgcatacatctacgtggtgcagctgcccgcaaaaattctaacagcagacaaccagacttacatggccgttcagggtagtacggcctaccttctctgcaaagcatttggcgcaccggtcccatccgtccagtggttagacgaagatgggacaaccgtcctccaggatgaacgcttcttcccctacgcaaatggcaccctcggcataagggatctgcaggcgaacgatacaggcagatatttctgtctggctgccaacgatcagaacaatgtcacaataatggctaacctgaaagtgaaggacgcgacacagatcacacaaggcccacgaagcacgatcgaaaaaaagggctcaagggtcaccttcacatgccaggcttcatttgacccaagcctccagccgagcatcacctggcgcggagacggccgtgatctgcaggaactgggcgactctgataaatactttattgaggatggtagacttgtgatccacagtttggactactcggaccagggaaattactcctgtgttgcatccacagagctggacgtggtcgagtcccgggctcagctgctggtggtgggatcccctggacccgtgccgcgtctggtgctttctgacctccacctcctcacccaatctcaagtgcgcgtgagttggtcacccgctgaagatcacaatgcccctatcgagaagtatgatatcgaatttgaggacaaagaaatggcccctgagaaatggtatagccttggcaaagtgcccggtaatcagacaagtaccaccctcaagttgtcgccttacgtacattacacttttcgggtgaccgccataaacaaatacgggccaggagagccgagtcctgtatccgaaaccgttgtgactcccgaggccgctccagagaagaatcccgtggatgttaaaggcgagggtaacgaaactaccaacatggttattacctggaagcctttacgttggatggactggaatgccccacaggtacagtatagggtgcagtggaggccacaaggcacgcggggaccatggcaggagcagattgtgagcgaccccttccttgtagtgtctaacacctcaacattcgtaccatacgagatcaaagtacaggcagttaactcacaaggcaagggccctgagccccaggtgacaatcgggtacagtggagaggattaccctcaggcgatcccagaattggagggaatagagatactcaactcatctgccgtgctggtcaaatggcgaccagtcgacctggcacaggttaagggtcacttgagggggtacaacgttacttattggcgggagggttcgcagcggaaacattcgaagcggcatatccataaggatcacgtagtagtcccagcaaatacgaccagtgtgatcctgtctggtctgcgcccatactcaagttatcatttggaggttcaggcttttaacggtagggggagcggccctgcatccgaattcaccttttctacacccgagggagtccccggacatcctgaggccctgcacctggagtgtcaaagtaacacttccctgctgcttcggtggcagccacctctctcccacaatggggtgcttaccggttacgtgttaagttaccaccccctggacgaggggggtaaggggcagctcagtttcaatctgcgggatccagaattgaggactcacaacctgactgacctttccccccacctgcgctaccgcttccagttgcaggctaccacaaaggagggccctggtgaagccattgttcgcgagggtgggactatggcactatcgggaatcagtgactttggcaacatcagcgcaaccgcaggagagaactactctgtggtcagttgggtgcctaaggagggtcagtgcaacttccgcttccacatacttttcaaagcactgggtgaggagaaaggaggagcttccctgtcaccacaatatgtgtcctataatcagtcatcttacacccaatgggatctgcagcccgacacggattatgagattcacctcttcaaggagaggatgtttcgacaccaaatggccgtgaaaacaaatgggactggacgtgtccgactgccacccgctggctttgcaaccgagggatggttcatcgggttcgtgagtgcaattatcctgttgctgctggttctgctgattctatgtttcatcaagagaagtaagggcggaaagtactctgtgaaagataaggaggacactcaagttgattccgaggctagaccaatgaaggatgaaacgtttggagagtactccgataatgaggagaaagcattcgggagcagccagccttcgctgaatggagatatcaaaccccttgggtccgacgactcactggctgactatggcggatcagttgatgtacagtttaatgaagatgggagcttcatcgggcaatactctgggaagaaggagaaggaggctgctggaggcaatgattcatcaggggctacctctcctattaatccagcggtcgccctggagtag

SEQ ID NO: 55711 - DNA, 3747 bp, Artificial Sequence
  derived and/or modified sequence
atggtggtcgctttgagatacgtgtggcccctcctactctgctccccctgcttgctcattcagattcccgaggagctcatggaacccccagtaattacagagcaatcccctagacgcttggttgtattccctacagacgatattagtttgaagtgcgaagcctcggggaagccggaggtccagttccggtggaccagggatggggtccactttaagcccaaggaggagctcggggtgacagtataccagtctccacactccggctctttcactataaccggaaacaactccaacttcgcccagaggttccagggcatctatagatgttttgcgtctaacaagctcggtaccgctatgtctcacgaaattcgactcatggctgagggcgcacctaaatggccaaaagaaacggtgaaaccggttgaggtggaagagggcgagtccgtggtccttccctgtaacccacctccaagcgccgagccactgcggatatattggatgaattctaaaattttacacataaagcaggatgaacgggtgacaatggggcaaaacgggaacctgtactttgctaatgttctcacatccgacaaccactctgattacatctgccacgctcattttccaggtacccgtaccataatacagaaagaacccatcgatctgcgcgtgaaggccaccaatagtatgatagatagaaagccgagattgctctttcccacaaacagttcctcccacctggttgccctgcagggacagcctctagtgctggagtgtatcgctgagggattccctaccccaactatcaaatggttgagaccatcaggcccaatgcccgcagatcgtgtaacataccagaatcataacaagacactgcagctattgaaggttggcgaggaggatgatggcgaatacagatgtctggctgaaaattctctgggctcagccaggcatgcctattatgtgaccgtcgaagcagccccttactggttgcataaacctcagtcccatctgtacggccctggagaaaccgcccgactggattgtcaagtccagggcaggccacagcctgaggtcacatggcgaatcaatggaattcccgtggaagagctagccaaggaccagaagtaccgtattcagcgcggtgccctgatcttatccaatgtccaaccaagcgacactatggttactcagtgtgaggcgaggaaccggcacggcttgctgctggccaacgcttacatttacgtggttcagctccctgctaaaattctgactgccgataaccagacatatatggccgtccagggcagcactgcttatctcctgtgcaaagcttttggggcaccagtcccaagtgtccagtggctcgacgaagatggaactaccgtcctacaggacgaacgattttttccttatgcaaacggcactctggggatccgagacctgcaggcgaacgacacgggtcgctacttctgtctcgcagccaacgaccagaacaacgtgaccatcatggcaaatttgaaggtgaaagacgctactcaaatcacccaaggaccgaggtctacaatcgagaagaagggctccagggtgacctttacatgccaggcgtcatttgatccaagcctgcagccatcaatcacctggcggggagatggccgagacctgcaggaactcggggacagtgacaaatactttatcgaagatggcagactggtaattcattccctcgactactccgaccagggtaactactcctgcgtggcaagcaccgagctcgatgtagtggagtcccgggctcagcttctggtcgttggttctccagggcctgtgccaaggctggtcctaagcgacctgcatctactgacccaatcccaggttcgtgtaagttggtcaccagcagaagaccataacgctcctatcgagaagtatgatatcgaattcgaggataaagagatggccccagagaaatggtactcactgggtaaagtgcccggaaaccagacctctacgacactgaaattgtctccatatgtgcactataccttcagggtcacagcgattaacaagtacggtcctggcgaaccaagccccgtctcagaaactgtggtcacccccgaagctgcgcctgagaaaaatcccgtcgacgtgaaaggagaggggaacgagacaacaaacatggtcattacctggaaacccttgcggtggatggattggaacgcaccgcaggtccagtaccgggtgcagtggcgtccccagggtacaaggggcccttggcaggaacagattgttagtgacccatttctggtcgtaagtaacactagcacatttgtgccctacgaaataaaagtccaagcggtgaacagtcagggaaagggccctgaaccccaggtcactatcgggtattctggggaagactatcctcaagccattccagagctcgaaggaatagagatcctcaactctagtgcagttttggtgaaatggagacccgtggatctggctcaggttaaggggcatttaagaggctacaatgtgacatactggcgcgaagggtcccagcgtaagcatagcaaacgccatatccacaaggatcacgtcgttgtccccgcaaacactactagtgtcattctatccggacttcggccttactcttcctatcacctagaggtgcaggccttcaatggtcgcggatctggcccagcctcagagtttacgttctctactcccgaaggtgtgccgggtcatcccgaagctttgcacctcgaatgccaaagcaataccagcctcttactgcgctggcagccacctctgtcacacaacggcgtgctgacagggtatgtgctgtcgtaccacccgctagacgaaggcggaaaaggtcaattgtcctttaatttacgcgatccagagcttagaacgcacaatcttaccgatctgagccctcacctccgttatcgcttccaattgcaggcgaccaccaaagaaggcccaggagaggccatcgttagggaggggggaactatggcgctgagcggtattagtgattttgggaacatctcagccactgctggagagaattatagcgtggtgagctgggtgccaaaagagggccagtgcaacttccgttttcacattctctttaaagccctcggagaggaaaaaggcggagctagtctgtcaccacaatatgtcagttacaaccaatcttcctatacacagtgggatctgcagccggacacagactacgagatccacctgtttaaggagcggatgttccggcaccaaatggcagtcaaaaccaatgggacggggagagtgcggctccctcctgcagggtttgctactgagggatggttcataggattcgtgagtgcaatcatactccttctgctggttctgttgattctgtgttttattaaaaggtccaaaggcggaaagtacagcgtgaaagacaaagaggatacgcaagtagattccgaggctcgcccaatgaaagacgagaccttcggagaatactcggacaacgaggagaaggccttcggaagctcgcagcccagtttgaacggcgatatcaagcccctaggctccgacgactccttggcagattatggcggatccgttgacgtgcaatttaacgaagatggatcattcataggccagtactccggcaaaaaagagaaggaggcagctgggggtaacgactcatccggggctacatccccaatcaatcctgctgtcgcgctcgagtag

SEQ ID NO: 55712 - protein, 234 aa, Artificial Sequence
  derived and/or modified sequence
MEGASRNLASTPRVHAKVMMYRKEQYLDVLHALKVVRFVSDATPQAEVYLRMYQLESGKLPRSPSFPLEPDDEVFLAIAKAMEEMVEDSVDCYWITRRFVNQLNTKYRDSLPQLPKAFEQYLNLEDGRLLTHLRMCSAAPKLPYDLWFKRCFAGCLPESSLQRVWDKVVSGSCKILVFVAVEILLTFKIKVMALNSAEKITKFLENIPQDSSDAIVSKAIDLWHKHCGTPVHSS

SEQ ID NO: 55713 - protein, 266 aa, Artificial Sequence
  derived and/or modified sequence
MTEDSQRNFRSVYYEKVGFRGVEEKKSLEILLKDDRLGILPPHHESHAKVMMYRKEQYLDVLHALKVVRFVSDATPQAEVYLRMYQLESGKLPRSPSFPLEPDDEVFLAIAKAMEEMVEDSVDCYWITRRFVNQLNTKYRDSLPQLPKAFEQYLNLEDGRLLTHLRMCSAAPKLPYDLWFKRCFAGCLPESSLQRVWDKVVSGSCKILVFVAVEILLTFKIKVMALNSAEKITKFLENIPQDSSDAIVSKAIDLWHKHCGTPVHSS

SEQ ID NO: 55714 - protein, 194 aa, Artificial Sequence
  derived and/or modified sequence
MTEDSQRNFRSVYYEKVGFRGVEEKKSLEILLKDDRLGILPPHHESHAKVMMYRKEQYLDVLHALKVVRFVSDATPQAEVYLRMYQLESGKLPRSPSFPLEPDDEVFLAIAKAMEEMVEDSVDCYWITRRFVNQLNTKYRDSLPQLPKAFEQYLNLEDGRLLTHLRMCSAAPKLPYDLWFKRCFAGCLPESSLQ

SEQ ID NO: 55715 - protein, 207 aa, Artificial Sequence
  derived and/or modified sequence
MTEDSQRNFRSVYYEKVGFRGVEEKKSLEILLKDDRLGILPPHHESHAKVMMYRKEQYLDVLHALKVVRFVSDATPQAEVYLRMYQLESGKLPRSPSFPLEPDDEVFLAIAKAMEEMVEDSVDCYWITRRFVNQLNTKYRDSLPQLPKAFEQYLNLEDGRLLTHLRMCSAAPKLPYDLWFKRCFAGCLPESSLQRVWDKVVSGSCKI

SEQ ID NO: 55716 - protein, 238 aa, Artificial Sequence
  derived and/or modified sequence
MTEDSQRNFRSVYYEKVGFRGVEEKKSLEILLKDDRLGILPPHHESHAKVMMYRKEQYLDVLHALKVVRFVSDATPQAEVYLRMYQLESGKLPRSPSFPLEPDDEVFLAIAKAMEEMVEDSVDCYWITRRFVNQLNTKYRDSLPQLPKAFEQYLNLEDGRLLTHLRMCSAAPKLPYDLWFKRCFAGCLPESSLQRVWDKVVSGSCKILVFVAVEILLTFKIKVMALNSAEKITKFLEN

SEQ ID NO: 55717 - DNA, 705 bp, Artificial Sequence
  derived and/or modified sequence
atggagggcgccagcagaaacctggccagcacccccagagtgcacgccaaggtgatgatgtacagaaaggagcagtacctggacgtgctgcacgccctgaaggtggtgagattcgtgagcgacgccaccccccaggccgaggtgtacctgagaatgtaccagctggagagcggcaagctgcccagaagccccagcttccccctggagcccgacgacgaggtgttcctggccatcgccaaggccatggaggagatggtggaggacagcgtggactgctactggatcaccagaagattcgtgaaccagctgaacaccaagtacagagacagcctgccccagctgcccaaggccttcgagcagtacctgaacctggaggacggcagactgctgacccacctgagaatgtgcagcgccgcccccaagctgccctacgacctgtggttcaagagatgcttcgccggctgcctgcccgagagcagcctgcagagagtgtgggacaaggtggtgagcggcagctgcaagatcctggtgttcgtggccgtggagatcctgctgaccttcaagatcaaggtgatggccctgaacagcgccgagaagatcaccaagttcctggagaacatcccccaggacagcagcgacgccatcgtgagcaaggccatcgacctgtggcacaagcactgcggcacccccgtgcacagcagctag

SEQ ID NO: 55718 - DNA, 801 bp, Artificial Sequence
  derived and/or modified sequence
atgaccgaggacagccagagaaacttcagaagcgtgtactacgagaaggtgggcttcagaggcgtggaggagaagaagagcctggagatcctgctgaaggacgacagactgggcatcctgcccccccaccacgagagccacgccaaggtgatgatgtacagaaaggagcagtacctggacgtgctgcacgccctgaaggtggtgagattcgtgagcgacgccaccccccaggccgaggtgtacctgagaatgtaccagctggagagcggcaagctgcccagaagccccagcttccccctggagcccgacgacgaggtgttcctggccatcgccaaggccatggaggagatggtggaggacagcgtggactgctactggatcaccagaagattcgtgaaccagctgaacaccaagtacagagacagcctgccccagctgcccaaggccttcgagcagtacctgaacctggaggacggcagactgctgacccacctgagaatgtgcagcgccgcccccaagctgccctacgacctgtggttcaagagatgcttcgccggctgcctgcccgagagcagcctgcagagagtgtgggacaaggtggtgagcggcagctgcaagatcctggtgttcgtggccgtggagatcctgctgaccttcaagatcaaggtgatggccctgaacagcgccgagaagatcaccaagttcctggagaacatcccccaggacagcagcgacgccatcgtgagcaaggccatcgacctgtggcacaagcactgcggcacccccgtgcacagcagctag

SEQ ID NO: 55719 - DNA, 585 bp, Artificial Sequence
  derived and/or modified sequence
atgaccgaggacagccagagaaacttcagaagcgtgtactacgagaaggtgggcttcagaggcgtggaggagaagaagagcctggagatcctgctgaaggacgacagactgggcatcctgcccccccaccacgagagccacgccaaggtgatgatgtacagaaaggagcagtacctggacgtgctgcacgccctgaaggtggtgagattcgtgagcgacgccaccccccaggccgaggtgtacctgagaatgtaccagctggagagcggcaagctgcccagaagccccagcttccccctggagcccgacgacgaggtgttcctggccatcgccaaggccatggaggagatggtggaggacagcgtggactgctactggatcaccagaagattcgtgaaccagctgaacaccaagtacagagacagcctgccccagctgcccaaggccttcgagcagtacctgaacctggaggacggcagactgctgacccacctgagaatgtgcagcgccgcccccaagctgccctacgacctgtggttcaagagatgcttcgccggctgcctgcccgagagcagcctgcagtag

SEQ ID NO: 55720 - DNA, 624 bp, Artificial Sequence
  derived and/or modified sequence
atgaccgaggacagccagagaaacttcagaagcgtgtactacgagaaggtgggcttcagaggcgtggaggagaagaagagcctggagatcctgctgaaggacgacagactgggcatcctgcccccccaccacgagagccacgccaaggtgatgatgtacagaaaggagcagtacctggacgtgctgcacgccctgaaggtggtgagattcgtgagcgacgccaccccccaggccgaggtgtacctgagaatgtaccagctggagagcggcaagctgcccagaagccccagcttccccctggagcccgacgacgaggtgttcctggccatcgccaaggccatggaggagatggtggaggacagcgtggactgctactggatcaccagaagattcgtgaaccagctgaacaccaagtacagagacagcctgccccagctgcccaaggccttcgagcagtacctgaacctggaggacggcagactgctgacccacctgagaatgtgcagcgccgcccccaagctgccctacgacctgtggttcaagagatgcttcgccggctgcctgcccgagagcagcctgcagagagtgtgggacaaggtggtgagcggcagctgcaagatctag

SEQ ID NO: 55721 - DNA, 717 bp, Artificial Sequence
  derived and/or modified sequence
atgaccgaggacagccagagaaacttcagaagcgtgtactacgagaaggtgggcttcagaggcgtggaggagaagaagagcctggagatcctgctgaaggacgacagactgggcatcctgcccccccaccacgagagccacgccaaggtgatgatgtacagaaaggagcagtacctggacgtgctgcacgccctgaaggtggtgagattcgtgagcgacgccaccccccaggccgaggtgtacctgagaatgtaccagctggagagcggcaagctgcccagaagccccagcttccccctggagcccgacgacgaggtgttcctggccatcgccaaggccatggaggagatggtggaggacagcgtggactgctactggatcaccagaagattcgtgaaccagctgaacaccaagtacagagacagcctgccccagctgcccaaggccttcgagcagtacctgaacctggaggacggcagactgctgacccacctgagaatgtgcagcgccgcccccaagctgccctacgacctgtggttcaagagatgcttcgccggctgcctgcccgagagcagcctgcagagagtgtgggacaaggtggtgagcggcagctgcaagatcctggtgttcgtggccgtggagatcctgctgaccttcaagatcaaggtgatggccctgaacagcgccgagaagatcaccaagttcctggagaactag

SEQ ID NO: 55722 - DNA, 705 bp, Artificial Sequence
  derived and/or modified sequence
atggaaggcgcctctagaaatttggcttccactccgcgggtccacgccaaagttatgatgtacagaaaggaacagtacctggacgtcctgcatgctctcaaggtagttcgcttcgtgagcgacgctacgccacaggcagaggtgtatctgcggatgtatcagttagagagcggtaaactgcctagaagcccatctttcccactggagcccgacgatgaggtgtttctggccatcgctaaagcaatggaggagatggtggaagattctgtcgattgctactggatcacaagacgctttgtcaatcaactgaacactaaataccgtgatagcttgccacagctgccgaaggcgttcgaacagtacctgaatctcgaggacggtcgcctcctgacgcatctgaggatgtgcagcgcagctcctaagttgccctacgacctttggttcaagagatgtttcgcaggttgtcttccggagtcatcactgcagcgcgtgtgggataaggtcgtctcgggtagctgcaagatcctggtgtttgtcgcggtcgagatattgctcaccttcaaaataaaggtaatggctcttaactctgctgagaagatcacaaagttccttgaaaacatcccccaagattcatcagacgccattgtatcaaaggcaattgacctgtggcacaaacactgcgggacgccagtgcacagcagctag

SEQ ID NO: 55723 - DNA, 801 bp, Artificial Sequence
  derived and/or modified sequence
atgacagaagactcacagagaaattttcgctcagtgtactatgagaaagtcggattccggggcgttgaggaaaaaaagtccctcgagatactgttgaaagatgatcggttaggtatactgcccccacaccatgaaagccacgcaaaagttatgatgtacagaaaagagcaatatcttgacgtgctgcacgctttaaaggtagtgaggtttgtatccgacgccacacctcaagccgaagtgtacttgcgcatgtaccagctggagtccgggaaacttcctagatctccatccttcccgctggaacccgatgatgaagtatttcttgccattgctaaggccatggaagaaatggtggaagattctgtggattgttattggataacaagacggttcgtcaaccagctaaacacaaaataccgcgacagcttgcctcagcttccgaaggcgtttgaacagtacctgaatctagaggacgggaggctcctgactcatctaaggatgtgttccgcagccccaaaactgccatatgacctttggttcaaacgatgttttgccggatgcctgccagagtcatcacttcagcgggtttgggataaagtagtgtctgggagctgcaagatactggtcttcgtggccgtggaaattctgctaaccttcaaaattaaggtcatggctcttaattcagcagagaagattaccaaatttctcgagaatataccacaggactcgtctgatgccatcgtcagtaaagctatcgatctttggcacaagcattgtggcaccccagtccactcttcctag

SEQ ID NO: 55724 - DNA, 585 bp, Artificial Sequence
  derived and/or modified sequence
atgaccgaggattctcagcggaattttcggtccgtgtactacgaaaaagtcggcttccgtggggtggaggaaaaaaagtcgttagaaatcctgctgaaagacgatcgactaggaattctacccccacaccacgagtcgcacgccaaagtcatgatgtaccgtaaggagcaatacttggatgtgctgcatgctctgaaagtggtccgctttgtgtcagacgctacaccacaggcggaagtgtatttacgcatgtaccagttggagtcaggtaaactgcctagaagcccctcgttccccctggagcccgatgacgaggttttcctagcaattgccaaagcgatggaggaaatggttgaagactcagttgattgttactggatcacacggagatttgtgaaccagctcaacactaagtaccgagattccctgccccaactgcctaaggccttcgagcagtatctgaatctggaggatggcagattgctgacccatcttagaatgtgttctgccgcccctaaattaccttacgatttgtggttcaagcgctgctttgctgggtgccttcccgaatcaagcttacagtag

SEQ ID NO: 55725 - DNA, 624 bp, Artificial Sequence
  derived and/or modified sequence
atgaccgaggactcgcagcgaaatttccgcagcgtctactacgaaaaggttggctttcggggcgtcgaagagaaaaagtccctggagatcctgctgaaggacgatcggctgggtatactacctccacatcacgagtcacatgccaaagtgatgatgtacaggaaggagcagtatctcgacgtgcttcacgcgctgaaggtggttaggttcgtgtctgacgcaacaccacaggcggaggtttacctgagaatgtatcagctggagtctggaaaacttccccggagcccatcttttccattggagcccgatgatgaggttttcttggcaatcgcaaaggccatggaagagatggttgaagattccgtagattgctattggattacacggcgcttcgttaaccagctgaataccaagtatcgcgattccctgcctcagcttcccaaagccttcgaacaatacttaaatctggaggatggccggctgctcacacacctgagaatgtgtagtgccgcgcccaaactcccttacgacctttggttcaaacgctgtttcgctggttgtctgccagagtcgtctttgcaacgcgtgtgggataaggtggtctcgggaagctgtaagatttag

SEQ ID NO: 55726 - DNA, 717 bp, Artificial Sequence
  derived and/or modified sequence
atgacagaagactcccagcgtaactttcggtctgtttactacgagaaggtgggcttccggggagtcgaggagaaaaagtctctcgagatcctcctcaaagacgaccgattggggattctcccgccacaccacgagtcacacgctaaagtgatgatgtaccgcaaggaacagtatctggacgtcttgcacgcactaaaagtggtgcgctttgtttcagacgccactccgcaggccgaagtgtatctgcggatgtatcagttggagtctggtaagttaccacgaagccctagctttccactcgaacccgatgatgaggtctttctggctatcgctaaggctatggaggagatggtggaggacagcgtggactgttattggatcactcgacgcttcgtgaaccagcttaacaccaagtaccgggactccctgcctcaactgcccaaggctttcgagcagtacttgaatttggaggacgggcggctgcttacgcatcttaggatgtgcagcgctgctcccaaacttccatacgatctatggttcaaaaggtgttttgccggatgtctgcccgagtcctccctccagagggtctgggataaagtcgtcagcggcagctgcaaaattctggtgttcgtcgcggtggagattttgctgacgtttaaaatcaaggtgatggcccttaactccgctgaaaagatcacaaagttcctggagaattag

SEQ ID NO: 55727 - DNA, 717 bp, Artificial Sequence
  derived and/or modified sequence
atgacagaggatagccagcgcaacttccgctctgtgtattatgagaaagtcggattcagaggcgtggaagagaagaaatccctggagatcctcttgaaagatgatcggctgggaatcctgcccccgcaccacgagagtcacgccaaagtgatgatgtataggaaagaacagtatttagacgtcctgcacgctctgaaagtagtgagattcgtcagcgatgcaacaccccaagctgaggtgtatttgagaatgtatcaacttgaatccggcaagctgcctaggagtccctcctttcccctggagcctgatgatgaggtattcctcgcgattgccaaggctatggaggagatggtggaggactccgtcgattgctactggattaccagacgcttcgtcaaccagttgaacactaaatacagggatagtttgccccagcttccaaaggctttcgagcagtacctcaatctggaggatggtcggctccttacacacctccggatgtgcagtgcagcccctaagttaccgtacgatttatggtttaagagatgctttgcaggctgtctgcccgagtccagtcttcagagggtgtgggataaggtcgtcagcggcagttgtaagatcctggtgttcgtggccgtggagattctcttaaccttcaagataaaagtcatggccctgaactcggctgagaaaattacaaaattcctggagaactag

SEQ ID NO: 55728 - DNA, 705 bp, Artificial Sequence
  derived and/or modified sequence
atggagggcgccagcaggaacctggccagcaccccccgggtgcacgccaaggtgatgatgtacaggaaggagcagtacctggatgtgctgcacgccctgaaggtggtgcgctttgtgtctgatgccaccccccaggccgaggtgtacctgaggatgtaccagctggagagcggcaagctgcccaggagccccagcttccccctggagccagatgatgaggtgttcctggccatcgccaaggccatggaggagatggtggaggacagcgtggactgctactggatcaccaggagatttgtgaaccagctgaacaccaagtacagagacagcctgccccagctgcccaaggcctttgagcagtacctgaacctggaggatggccgcctgctgacccacctgaggatgtgcagcgctgcccccaagctgccctatgacctgtggttcaagcgctgctttgctggctgcctgcctgagagcagcctgcagagggtgtgggacaaggtggtgtctggcagctgcaagatcctggtgtttgtggccgtggagatcctgctgaccttcaagatcaaggtgatggccctgaacagcgctgagaagatcaccaagttcctggagaacatcccccaggacagcagtgatgccatcgtgtccaaggccatcgacctgtggcacaagcactgcggcacccctgtgcacagcagctag

SEQ ID NO: 55729 - DNA, 801 bp, Artificial Sequence
  derived and/or modified sequence
atgacagaggacagccagaggaacttccgctctgtgtactatgagaaggtgggcttccggggcgtggaggagaagaagagcctggagatcctgctgaaggatgaccggctgggcatcctgcccccccaccacgagagccacgccaaggtgatgatgtacaggaaggagcagtacctggatgtgctgcacgccctgaaggtggtgcgctttgtgtctgatgccaccccccaggccgaggtgtacctgaggatgtaccagctggagagcggcaagctgcccaggagccccagcttccccctggagccagatgatgaggtgttcctggccatcgccaaggccatggaggagatggtggaggacagcgtggactgctactggatcaccaggagatttgtgaaccagctgaacaccaagtacagagacagcctgccccagctgcccaaggcctttgagcagtacctgaacctggaggatggccgcctgctgacccacctgaggatgtgcagcgctgcccccaagctgccctatgacctgtggttcaagcgctgctttgctggctgcctgcctgagagcagcctgcagagggtgtgggacaaggtggtgtctggcagctgcaagatcctggtgtttgtggccgtggagatcctgctgaccttcaagatcaaggtgatggccctgaacagcgctgagaagatcaccaagttcctggagaacatcccccaggacagcagtgatgccatcgtgtccaaggccatcgacctgtggcacaagcactgcggcacccctgtgcacagcagctag

SEQ ID NO: 55730 - DNA, 1045 bp, Artificial Sequence
  derived and/or modified sequence
gatgtcacgtccggcggcggcggcagcggcagcggcagcggcgctgagttttgtctcccgggccgtctgggcgcgcgcgggtgtcccagaatgaaatatgactgaggactctcagagaaactttcgttcagtatattatgagaaagtggggtttcgtggagttgaagaaaagaaatcattagaaattctcctaaaagatgaccgtctgggaatcttgcctccacaccacgagtcccatgccaaggtgatgatgtatcgtaaggagcagtacttggatgtccttcatgccctgaaagtcgttcgctttgttagtgatgccacacctcaggctgaagtctatctccgcatgtatcagctggagtctgggaagttacctcgaagtccctcttttccactggagccagatgatgaagtgtttcttgccatagctaaagccatggaggaaatggtggaagatagtgtcgactgttactggatcacccgacgctttgtgaaccaattaaataccaagtaccgggattccttgccccagttgccaaaagcgtttgaacaatacttgaatctggaagatggcagactgctgactcatctgaggatgtgttccgcggcgcccaaacttccttatgatctctggttcaagaggtgctttgcgggatgtttgcctgaatccagtttacagagggtttgggataaagttgtgagtggatcctgtaagatcctagtttttgtagctgtcgaaattttattaacctttaaaataaaagttatggcactgaacagtgcagagaagataacaaagtttctggaaaatattccccaggacagctcagacgcgatcgtgagcaaggccattgacttgtggcacaaacactgtgggaccccggtccattcaagctgaacgcacccgctggttgtggaccgtctgccaggcaccacagtgagcattgtgttcttggcatgtgatctgggaaactgattgaataatacacttttcttgctttggtgctcaaagtggtttttttcccccaataaaattatttaattg

SEQ ID NO: 55731 - DNA, 585 bp, Artificial Sequence
  derived and/or modified sequence
atgacagaggacagccagaggaacttccgctctgtgtactatgagaaggtgggcttccggggcgtggaggagaagaagagcctggagatcctgctgaaggatgaccggctgggcatcctgcccccccaccacgagagccacgccaaggtgatgatgtacaggaaggagcagtacctggatgtgctgcacgccctgaaggtggtgcgctttgtgtctgatgccaccccccaggccgaggtgtacctgaggatgtaccagctggagagcggcaagctgcccaggagccccagcttccccctggagccagatgatgaggtgttcctggccatcgccaaggccatggaggagatggtggaggacagcgtggactgctactggatcaccaggagatttgtgaaccagctgaacaccaagtacagagacagcctgccccagctgcccaaggcctttgagcagtacctgaacctggaggatggccgcctgctgacccacctgaggatgtgcagcgctgcccccaagctgccctatgacctgtggttcaagcgctgctttgctggctgcctgcctgagagcagcctgcagtag

SEQ ID NO: 55732 - DNA, 624 bp, Artificial Sequence
  derived and/or modified sequence
atgacagaggacagccagaggaacttccgctctgtgtactatgagaaggtgggcttccggggcgtggaggagaagaagagcctggagatcctgctgaaggatgaccggctgggcatcctgcccccccaccacgagagccacgccaaggtgatgatgtacaggaaggagcagtacctggatgtgctgcacgccctgaaggtggtgcgctttgtgtctgatgccaccccccaggccgaggtgtacctgaggatgtaccagctggagagcggcaagctgcccaggagccccagcttccccctggagccagatgatgaggtgttcctggccatcgccaaggccatggaggagatggtggaggacagcgtggactgctactggatcaccaggagatttgtgaaccagctgaacaccaagtacagagacagcctgccccagctgcccaaggcctttgagcagtacctgaacctggaggatggccgcctgctgacccacctgaggatgtgcagcgctgcccccaagctgccctatgacctgtggttcaagcgctgctttgctggctgcctgcctgagagcagcctgcagagggtgtgggacaaggtggtgtctggcagctgcaagatctag

SEQ ID NO: 55733 - DNA, 717 bp, Artificial Sequence
  derived and/or modified sequence
atgacagaggacagccagaggaacttccgctctgtgtactatgagaaggtgggcttccggggcgtggaggagaagaagagcctggagatcctgctgaaggatgaccggctgggcatcctgcccccccaccacgagagccacgccaaggtgatgatgtacaggaaggagcagtacctggatgtgctgcacgccctgaaggtggtgcgctttgtgtctgatgccaccccccaggccgaggtgtacctgaggatgtaccagctggagagcggcaagctgcccaggagccccagcttccccctggagccagatgatgaggtgttcctggccatcgccaaggccatggaggagatggtggaggacagcgtggactgctactggatcaccaggagatttgtgaaccagctgaacaccaagtacagagacagcctgccccagctgcccaaggcctttgagcagtacctgaacctggaggatggccgcctgctgacccacctgaggatgtgcagcgctgcccccaagctgccctatgacctgtggttcaagcgctgctttgctggctgcctgcctgagagcagcctgcagagggtgtgggacaaggtggtgtctggcagctgcaagatcctggtgtttgtggccgtggagatcctgctgaccttcaagatcaaggtgatggccctgaacagcgctgagaagatcaccaagttcctggagaactag

SEQ ID NO: 55734 - DNA, 705 bp, Artificial Sequence
  derived and/or modified sequence
atggagggcgccagccggaacctggccagcaccccccgggtgcacgcaaaggttatgatgtaccgcaaggagcagtatcttgatgtgctgcacgcactgaaggtcgtaaggtttgtgagcgacgcaactcctcaggccgaagtttatctccggatgtatcagttggagtcagggaaactgccgaggtccccgtctttcccattagagcccgacgacgaggtgttcctagcaattgccaaggcaatggaggaaatggtcgaggacagcgtggattgttactggatcacacgccggttcgtgaaccaactgaacactaaatatagagattcactccctcagctccccaaagcctttgaacagtatctcaatctagaggacggcagactgctgacgcacctccgcatgtgcagcgctgctcccaagctcccttatgacctgtggtttaaaagatgctttgctggatgtttgcccgagtccagcctccaacgtgtttgggacaaagtcgtctctggcagttgcaaaattctcgtcttcgtggcagtcgagatcctcctgacattcaagataaaggtgatggccctaaatagcgctgaaaaaatcacaaagttccttgagaacatcccgcaggattcctctgacgctatagtgtccaaggcaattgatttatggcataagcactgtggtacccccgtacactcttcatag

SEQ ID NO: 55735 - DNA, 801 bp, Artificial Sequence
  derived and/or modified sequence
atgaccgaggacagccagcggaacttccggagcgtgtactacgagaaagtggggtttcgcggagtggaggagaagaaatccctggaaatattactgaaggatgacagattgggaatactccctccccaccacgaaagccatgccaaggttatgatgtatagaaaagagcagtacctggacgtcctccacgctttgaaggtagtcaggttcgtgtctgacgcaacgcctcaggccgaggtttatctgagaatgtatcaacttgagagcggcaagttacctagatctcccagtttcccattggagcccgatgacgaggtgtttttggccatcgccaaagccatggaagagatggtggaggactcagtcgattgttactggatcacgcggcgcttcgtgaatcaactgaacacaaagtaccgggattcactgcctcagctgcccaaagctttcgagcagtatctgaacctagaggatgggcgcctacttacacacctgcgtatgtgcagcgcagccccaaagctaccatacgatctgtggtttaaaaggtgctttgccggatgccttccagagtcaagtcttcaacgcgtgtgggacaaagtagtctcaggcagctgcaagattctggtgtttgtagccgtagaaattctcctcactttcaaaataaaagtaatggcgttgaattccgctgagaaaattacaaagtttctcgagaacattcctcaggactcttccgatgcgattgtgagcaaggccatcgacctttggcataagcactgtggcactcccgttcatagctcttag

SEQ ID NO: 55736 - DNA, 585 bp, Artificial Sequence
  derived and/or modified sequence
atgaccgaggacagccagcggaacttccggagcgtgtactacgagaaggtgggattccgaggtgtagaagagaaaaagagcctggaaatcctccttaaggatgatcgtctgggcatcctcccacctcaccacgaatcccacgctaaagtgatgatgtatcgtaaggaacagtatcttgatgtcttacatgctctgaaggtcgtcagatttgtttccgacgccaccccacaggccgaagtctacctgcgtatgtaccaactcgagtctgggaaactccctcgctccccttccttcccccttgagccagacgacgaagttttcctggcaattgccaaggccatggaagagatggtcgaagatagcgtcgattgctactggattaccagacgattcgtgaatcagctcaacactaagtaccgggactctcttcctcagctgcctaaggcctttgagcagtaccttaacctggaggacgggagactcttaacacatctgaggatgtgttcagccgccccaaagcttccatacgatctttggttcaagcgatgcttcgctggatgtttaccagaatcatcactgcagtag

SEQ ID NO: 55737 - DNA, 624 bp, Artificial Sequence
  derived and/or modified sequence
atgaccgaggacagccagcggaacttccggagcgtgtactacgagaaggtcgggttccgcggcgtggaggagaagaagtcccttgaaattctgttgaaggacgaccggttgggaattctgcctccgcatcatgagtctcacgcaaaggttatgatgtatagaaaggagcaatacttggatgtattgcacgcgctgaaggttgtgaggtttgtgtccgatgctacacctcaggccgaagtgtatctgcggatgtatcaactggaatccggaaaactgcctcgaagtccaagtttccctctagaacctgatgacgaggtatttctcgctatcgccaaagcaatggaagagatggtcgaggattctgtggactgctactggataaccaggaggttcgttaaccagttaaacacaaagtaccgtgactccttgccccagctgccgaaagcctttgagcagtatctgaatttggaggacggcagacttctcacacacttaagaatgtgctcggcagcaccaaagctgccctatgacctatggttcaagaggtgctttgcaggctgcctgccggagagctctcttcagcgagtgtgggacaaggtggtgtctggctcatgcaagatctag

SEQ ID NO: 55738 - DNA, 717 bp, Artificial Sequence
  derived and/or modified sequence
atgaccgaggacagccagcggaacttccggagcgtgtactacgagaaggttggcttccgcggtgtggaggagaagaagagcctcgaaatactactgaaggacgatcggctgggaatccttccacctcaccatgaaagccacgcaaaagtaatgatgtaccggaaggaacaatacctcgacgtgctccatgccctgaaagtggtccgctttgtctccgatgctactcctcaagcagaggtttacctgaggatgtaccagctggaatctggcaagttacctcgctcgccgtcattcccactcgaacccgacgacgaagtcttcttggccatcgccaaggcgatggaggaaatggttgaggactctgtggattgttattggattaccaggcgatttgtgaatcagctgaacaccaaataccgtgactccttgcctcaactgcccaaggccttcgagcagtacttaaacctcgaggacggacggctgctcacccacctgcggatgtgcagtgcggcccccaagctcccttacgacctgtggttcaaacgttgcttcgccggctgcctccctgaaagcagtttacagagggtatgggataaggtggttagtggctcttgcaagatcctggttttcgtggcagtggagattctcctgacctttaagattaaagtgatggccctgaattccgctgaaaaaattaccaagtttttggagaattag

SEQ ID NO: 55739 - DNA, 717 bp, Artificial Sequence
  derived and/or modified sequence
atgaccgaggacagccagcggaacttccggagcgtgtactacgagaaggtcggctttagaggggtggaggaaaaaaaaagcctggaaatactgctgaaggatgaccgactggggattcttcccccccaccacgagtcacatgccaaggtgatgatgtataggaaagagcagtatctggatgtcctccacgcacttaaagttgtcaggtttgtctctgacgcgacaccacaggccgaggtgtacctgcgtatgtaccaactcgaatcaggaaaacttcctcggtcaccttccttccctctagaaccagatgatgaggtgttcctagcgatagccaaagccatggaagaaatggttgaggatagcgttgattgctactggattacaagacgctttgtgaaccaacttaataccaaatatagggatagtctgcctcagctgccaaaggccttcgaacagtatctgaacttggaagatgggcggctcctgacacatctcagaatgtgtagtgctgcaccaaagttaccctatgatctatggttcaagaggtgtttcgcggggtgtttgcctgagagctctctgcagagagtctgggataaggtggtttctggctcatgcaagattctggtgtttgttgcggttgagattctcctcaccttcaaaatcaaggtaatggccctgaattctgccgagaagatcaccaaatttctggagaattag

SEQ ID NO: 55740 - DNA, 705 bp, Artificial Sequence
  derived and/or modified sequence
atggagggcgcttcccgcaaccttgcttccactccacgggtgcacgccaaggtcatgatgtacagaaaggaacagtacttggacgtgctccacgccctgaaagtggtgagattcgtgtccgacgccactccccaggcggaagtttacctgagaatgtaccagctggagtccgggaagctgcctcgttctccttccttccccctcgagcctgacgacgaggtgttcctggccatcgcgaaggcgatggaggagatggttgaagattccgtggattgttactggatcacccgcaggtttgtcaaccagcttaacaccaagtaccgcgactccctgccacagttaccgaaggctttcgaacagtacctgaacctcgaggatgggagactccttacccatcttcgcatgtgttctgcagctccaaaattaccctatgatctgtggttcaaacgctgctttgccggttgcttacccgagtcatcactccaaagagtctgggacaaagtggtgtctggcagttgtaaaattttggttttcgtggctgttgagatcctactgacttttaagataaaggtgatggcactgaatagcgcagaaaagatcacgaaattcttggagaacattccccaagactctagcgatgccatagtgtcaaaggccattgatctctggcacaaacactgtggcactccagtccattcaagctag

SEQ ID NO: 55741 - DNA, 790 bp, Artificial Sequence
  derived and/or modified sequence
tgctttttgggaaatgcatcagatcttttctgttcttgaaacgccaaatctaacttggtctttttttggatgaattaccgccagtattatgaaggttactgtgaaggaacttgagaccactgaactttttgagttcttgcgactcacttttccccttcgtctttctctccctttctgtctttctgtgtctcctccaagaatgaaatatgactgaggactctcagagaaactttcgttcagtatattatgagaaagtggggtttcgtggagttgaagaaaagaaatcattagaaattctcctaaaagatgaccgtctgggaatcttgcctccacaccacgagtcccatgccaaggtgatgatgtatcgtaaggagcagtacttggatgtccttcatgccctgaaagtcgttcgctttgttagtgatgccacacctcaggctgaagtctatctccgcatgtatcagctggagtctgggaagttacctcgaagtccctcttttccactggagccagatgatgaagtgtttcttgccatagctaaagccatggaggaaatggtggaagatagtgtcgactgttactggatcacccgacgctttgtgaaccaattaaataccaagtaccgggattccttgccccagttgccaaaagcgtttgaacaatacttgaatctggaagatggcagactgctgactcatctgaggatgtgttccgcggcgcccaaacttccttatgatctctggttcaagaggtgctttgcgggatgtttgcctgaatccagtttacagag

SEQ ID NO: 55742 - DNA, 801 bp, Artificial Sequence
  derived and/or modified sequence
atgactgaggattcacagcggaacttcagaagcgtctactatgagaaggtgggtttcagaggagtggaggagaaaaaatccttagagatcctgcttaaagacgatcggctgggaattctgcctccacaccacgaatctcatgccaaagtgatgatgtatcgcaaggaacagtatctggatgttctgcatgccctgaaagtggttagatttgtgtcagatgcaaccccccaagctgaggtctatctgagaatgtaccaattggagagcggcaagctccccagatcaccttcgttcccactcgagcctgacgacgaggtgttcctcgctatcgccaaagcgatggaggagatggtggaagactccgttgattgctactggataacccgtcggttcgtgaatcagctgaatacgaagtatagggattccctgccacaactgcccaaagcctttgagcaatatttaaacctcgaagacggtagactgttgacacatctgcgcatgtgcagcgctgctccaaaactgccttatgacctatggtttaagcgctgcttcgctggctgtctccctgaaagcagcctgcaacgtgtgtgggacaaggtcgtgagcgggtcctgcaaaatcttggtgtttgtggcagttgagatccttctcaccttcaagatcaaggtgatggcgctaaattctgctgagaaaatcactaagttcttggaaaatatcccccaggactcttccgatgctatagtaagtaaggctatcgacctgtggcataagcactgcgggactcccgtgcacagctcctag

SEQ ID NO: 55743 - DNA, 585 bp, Artificial Sequence
  derived and/or modified sequence
atgaccgaagacagccagaggaattttcgcagcgtctactacgaaaaggtgggttttcgcggagtggaggagaagaaatcactggagattttgctcaaagacgacagactgggcattctgccaccacatcacgagtcacacgccaaagtgatgatgtataggaaggagcaatatctcgatgtgctgcatgccctgaaggtggtcagatttgtttctgatgccactccccaagccgaagtctatttgcggatgtaccagttggagtcaggtaagctacccaggagcccttcatttcctctagaacctgacgatgaagtgtttctggcaatcgccaaggcgatggaggaaatggtggaagacagcgtggactgctattggataacgaggaggtttgtcaaccaattgaacactaagtacagagactccttaccacaactaccgaaggcttttgaacagtacctgaacttagaggacggtcgactcctcacccacctgcgcatgtgttcagccgctccaaagctgccttacgatctgtggttcaaaagatgctttgctgggtgcctccctgagtcgagtcttcaatag

SEQ ID NO: 55744 - DNA, 624 bp, Artificial Sequence
  derived and/or modified sequence
atgaccgaagattctcagcggaatttccgtagcgtttactatgaaaaggtaggttttaggggtgttgaggagaaaaaaagtctggagatcctcctgaaggacgaccggctcggtattctgcccccacaccacgagtcccatgccaaggtgatgatgtataggaaagagcagtacctggatgtcctgcacgcgttgaaagtggttcgctttgtgtcagacgctactccacaggctgaagtctatctccgtatgtatcaattggaaagtgggaaactgccccgatctccttcttttccactcgagccagatgatgaggtgttcttggccatcgctaaggcgatggaggagatggttgaagacagcgtagattgctattggatcaccagacgatttgtgaaccagctgaatactaagtaccgcgatagcctcccccaattacccaaggctttcgagcagtacctcaatctcgaggatgggcgactccttacccaccttcggatgtgctcagccgctccaaagttaccatacgacctgtggtttaagaggtgtttcgccggatgcctgccggaaagttccttacagcgggtatgggataaagtggtgagtggctcttgcaagatttag

SEQ ID NO: 55745 - DNA, 717 bp, Artificial Sequence
  derived and/or modified sequence
atgactgaagactcccagcggaatttccgcagtgtttattatgaaaaagttggatttagaggagtcgaagaaaaaaagtccttagaaatcctgctaaaagatgaccgtcttggtatcttgcctccccatcatgagtcgcacgcaaaggtgatgatgtatcgcaaggaacagtatttggacgtgctgcacgcactcaaagttgtgcgcttcgtgagtgatgccacccctcaagccgaggtctacctgcgcatgtaccagctggaaagtggtaagctaccacgctcaccctctttccccctcgaaccggatgatgaggtctttctggccatcgcaaaagccatggaggagatggtggaagactccgtcgattgctattggattacccggcgtttcgttaaccagctaaatacaaagtatagagattctctgcctcagctccctaaagcatttgaacagtacctgaatctcgaggatgggagactcctgacacacctgcgcatgtgcagcgccgcacctaaactgccctatgacctctggttcaagcgctgcttcgccggatgcctgcctgagtcaagcctgcagcgggtgtgggataaagtagtgagtgggtcgtgtaaaatcttggtcttcgtggcggtcgaaattctcctgactttcaaaattaaggtgatggcacttaatagcgccgagaaaatcacaaagttcctagagaactag

SEQ ID NO: 55746 - DNA, 717 bp, Artificial Sequence
  derived and/or modified sequence
atgacagaggatagccagcgaaacttcagaagcgtctactacgagaaggtgggctttcgaggggtggaggaaaagaagtcactggagattcttttaaaggacgatagattgggaatactgccacctcatcacgagtcgcatgcgaaggtaatgatgtacagaaaggaacagtaccttgatgtcctgcacgcactgaaggtggtgcgattcgtctcagatgctactccgcaggctgaagtctaccttcgtatgtatcagcttgaatcaggtaagcttccacgcagtccgtctttcccgctagaaccggatgacgaggtctttctcgctattgccaaggccatggaagaaatggtggaagattctgtcgactgctattggataaccaggaggttcgtgaatcagctcaatacaaaatacagggattccctgccccagttgccgaaagctttcgagcagtatctgaaccttgaagatggtcgattgcttacccacctgagaatgtgcagcgccgcacccaaactcccttacgacctatggttcaagagatgttttgcaggctgcctgccagaatcatcactgcagcgagtatgggataaagtggtgagcggatcctgcaaaatattggtatttgtcgcagtcgaaatccttttaacattcaaaatcaaggtgatggctctcaactccgctgaaaagattactaagtttctggaaaattag

SEQ ID NO: 55747 - DNA, 762 bp, Artificial Sequence
  derived and/or modified sequence
gcggcggcggcagcggcagcggcagcggcgctgagttttgtctcccgggccgtctgggcgcgcgcgggtgtcccagactcacttttccccttcgtctttctctccctttctgtctttctgtgtctcctccaagaatgaaatatgactgaggactctcagagaaactttcgttcagtatattatgagaaagtggggtttcgtggagttgaagaaaagaaatcattagaaattctcctaaaagatgaccgtctgggaatcttgcctccacaccacgagtcccatgccaaggtgatgatgtatcgtaaggagcagtacttggatgtccttcatgccctgaaagtcgttcgctttgttagtgatgccacacctcaggctgaagtctatctccgcatgtatcagctggagtctgggaagttacctcgaagtccctcttttccactggagccagatgatgaagtgtttcttgccatagctaaagccatggaggaaatggtggaagatagtgtcgactgttactggatcacccgacgctttgtgaaccaattaaataccaagtaccgggattccttgccccagttgccaaaagcgtttgaacaatacttgaatctggaagatggcagactgctgactcatctgaggatgtgttccgcggcgcccaaacttccttatgatctctggttcaagaggtgctttgcgggatgtttgcctgaatccagtttacagagggtttgggataaagttgtgagtggatcctgtaagatc

SEQ ID NO: 55748 - DNA, 958 bp, Artificial Sequence
  derived and/or modified sequence
gcggcggcggcagcggcagcggcagcggcgctgagttttgtctcccgggccgtctgggcgcgcgcgggtgtcccaggtaccccgccgcctccctccttcccgcaggactcgtccctcctggccctgggccccaacggtgcccgcctgcccggcggtcggtcagcgcacagggcacggcttcctctgcttctcccggaccacttagtctcaacccgggtgtgtttgcactactagagaatgaaatatgactgaggactctcagagaaactttcgttcagtatattatgagaaagtggggtttcgtggagttgaagaaaagaaatcattagaaattctcctaaaagatgaccgtctgggaatcttgcctccacaccacgagtcccatgccaaggtgatgatgtatcgtaaggagcagtacttggatgtccttcatgccctgaaagtcgttcgctttgttagtgatgccacacctcaggctgaagtctatctccgcatgtatcagctggagtctgggaagttacctcgaagtccctcttttccactggagccagatgatgaagtgtttcttgccatagctaaagccatggaggaaatggtggaagatagtgtcgactgttactggatcacccgacgctttgtgaaccaattaaataccaagtaccgggattccttgccccagttgccaaaagcgtttgaacaatacttgaatctggaagatggcagactgctgactcatctgaggatgtgttccgcggcgcccaaacttccttatgatctctggttcaagaggtgctttgcgggatgtttgcctgaatccagtttacagagggtttgggataaagttgtgagtggatcctgtaagatcctagtttttgtagctgtcgaaattttattaacctttaaaataaaagttatggcactgaacagtgcagagaagataacaaagtttctggaaaat

SEQ ID NO: 55749 - DNA, 938 bp, Artificial Sequence
  derived and/or modified sequence
gcggcggcggcagcggcagcggcagcggcgctgagttttgtctcccgggccgtctgggcgcgcgcgggtgtcccaggtaccccgccgcctccctccttcccgcaggactcgtccctcctggccctgggccccaacggtgcccgcctgcccggcggtcggtcagcgcacagggcacggcttcctctgcttctcccggaccacttagtctcaacccggaatgaaatatgactgaggactctcagagaaactttcgttcagtatattatgagaaagtggggtttcgtggagttgaagaaaagaaatcattagaaattctcctaaaagatgaccgtctgggaatcttgcctccacaccacgagtcccatgccaaggtgatgatgtatcgtaaggagcagtacttggatgtccttcatgccctgaaagtcgttcgctttgttagtgatgccacacctcaggctgaagtctatctccgcatgtatcagctggagtctgggaagttacctcgaagtccctcttttccactggagccagatgatgaagtgtttcttgccatagctaaagccatggaggaaatggtggaagatagtgtcgactgttactggatcacccgacgctttgtgaaccaattaaataccaagtaccgggattccttgccccagttgccaaaagcgtttgaacaatacttgaatctggaagatggcagactgctgactcatctgaggatgtgttccgcggcgcccaaacttccttatgatctctggttcaagaggtgctttgcgggatgtttgcctgaatccagtttacagagggtttgggataaagttgtgagtggatcctgtaagatcctagtttttgtagctgtcgaaattttattaacctttaaaataaaagttatggcactgaacagtgcagagaagataacaaagtttctggaaaat

SEQ ID NO: 55750 - DNA, 1239 bp, Artificial Sequence
  derived and/or modified sequence
atggatctggccaagagcggcattaagatcttggttcctaaatctccagttaagtcccgcacggccgtggatggctttcagagtgagtcccctgagaagctggatccagtggagcaaggacaggaggacactgtagcccctgaggtagcggccgagaagccagtaggcgccctactaggccccggggccgagcgcgcccggatgggatcgcggccgagaatccacccgctggtacctcaggttccaggccccgttactgcggccatggcaacaggtctagccgtcaacggcaaggggacttctccttttatggacgctctgacagcaaacgggactaccaatattcaaacctcagtaacgggcgtgaccgcaagtaaacggaaatttattgacgaccgtagggaccagcccttcgacaaacgcctgaggttctctgttcggcaaactgaatcagcttacaggtacagagatattgtggttaggaaacaagacggctttactcatatcctgcttagcaccaaatcgtccgaaaataacagtctcaatcctgaggttatgcgcgaggtccagtctgccctgagcactgcagccgcggatgactcaaaacttgtgctgttaagtgccgtgggaagcgtgttctgttgtggactggacttcatctacttcatcaggcgtctgactgacgatcggaagagggagtcaaccaaaatggcagaggctatccgaaacttcgtcaacacttttatacagtttaagaagccaatcattgtcgccgtgaacgggccagctatcgggctaggcgcatctatcctgcctttgtgtgatgtggtgtgggctaatgaaaaggcttggttccaaaccccctataccacttttggacagagtcccgatggatgctctactgtgatgttcccgaaaattatgggtggcgccagtgcaaacgagatgctgttgtccggaagaaaactaaccgcacaggaggcctgtggcaaaggcttagtcagccaagtgttttggccaggcacctttacccaggaggttatggtgcgaattaaggagctggcaagttgcaatcccgtcgtcttggaggaaagcaaggccctggtgcgctgtaacatgaaaatggaattggagcaggctaatgagagagaatgtgaggtcctcaagaaaatctggggatcggctcaggggatggatagtatgttgaagtacctccagcgaaaaattgatgagttttag

SEQ ID NO: 55751 - DNA, 1239 bp, Artificial Sequence
  derived and/or modified sequence
atggacctggccaagtcagggattaagatcttggtgcctaagagccccgtgaagagcagaaccgccgtggacgggtttcaatcggaaagccccgaaaagcttgaccccgtagagcagggccaggaagacacagtggcgcctgaagtggcagccgaaaaaccggtgggtgctcttcttggtccaggagctgagcgtgcccgcatgggctcccgaccgcgaattcacccactggttcctcaggtgcccggacctgtcacagctgcgatggcaaccggcctggcagtcaacggaaaggggaccagcccctttatggacgccctcacggcaaatggcacgacaaacattcagaccagcgtgaccggggtgactgcaagtaaacgcaaattcatcgacgatcgccgagaccagcctttcgataagaggctaagattcagcgtgcgccagaccgagtcagcttacagataccgcgatattgttgtgcggaagcaagacgggttcactcacatcttactgagcaccaaaagctccgaaaacaacagtttgaacccagaggtaatgagagaagtccagagcgccttgagtacggctgcggctgacgattccaagttagtgcttcttagcgcagtgggatctgtgttttgctgcgggctggatttcatctacttcattcgcagattgactgacgacagaaagcgagagagtacaaaaatggctgaggccattcggaatttcgttaataccttcattcagtttaagaaaccgattattgtcgcagtaaatggtcccgcaataggactgggagcttctatactaccgttgtgtgatgttgtttgggccaacgaaaaggcctggttccagactccatatacaacttttgggcagtctcccgatggctgcagcacagtgatgttcccaaagattatgggaggagccagcgcaaatgagatgctcctttctgggaggaaactgaccgcccaggaggcctgcgggaagggactggtgagtcaggttttttggcccggaacatttacacaagaagtcatggtgaggatcaaggagctcgcctcatgcaaccccgtggttctcgaagagagtaaggccctggtccgctgcaatatgaaaatggagttagaacaggccaacgagcgggaatgtgaagtgctgaaaaaaatatggggaagcgcccagggaatggacagtatgctgaaatacctgcagaggaaaatcgacgagttctag

SEQ ID NO: 55752 - DNA, 1239 bp, Artificial Sequence
  derived and/or modified sequence
atggacctggccaagagcggcatcaagatcctggtgcccaagagccctgtgaagagcaggacagctgtggatggcttccagagcgagagccctgagaagctggaccctgtggagcagggccaggaggacacagtggcccctgaggtggccgctgagaagcctgtgggcgccctgctgggccctggagctgagcgggccaggatgggcagccggccccgcatccaccccctggtgccccaggtgcccggccctgtgacagctgccatggccaccggcctggccgtgaatggcaagggcaccagccccttcatggatgccctgacagccaacggcaccaccaacatccagacctctgtgactggagtgacagccagcaagaggaagttcattgatgacagaagagaccagccctttgacaagaggctgcgcttctctgtgcggcagacagaaagtgcctaccgctacagagacatcgtggtgaggaagcaggacggcttcacccacatcctgctgagcaccaagagcagcgagaacaacagcctgaaccctgaggtgatgagggaggtgcagagcgccctgagcacagctgctgctgatgacagcaagctggtgctgctgtctgctgtgggctctgtgttctgctgcggcctggacttcatctacttcatccggcggctgacagatgacaggaagcgggagagcaccaagatggccgaggccatccggaactttgtgaacaccttcatccagttcaagaagcccatcatcgtggccgtgaatggacctgccatcggcctgggcgccagcatcctgcccctgtgtgatgtggtgtgggccaatgagaaggcctggttccagaccccctacaccaccttcggccagagcccagatggctgcagcacagtgatgttccccaagatcatgggcggggccagcgccaatgagatgctgctgagcggcaggaagctgacagcccaggaggcctgtgggaagggcctggtgtcccaggtgttctggccaggcaccttcacccaggaggtgatggtgcgcatcaaggagctggccagctgcaaccctgtggtgctggaggagagcaaggccctggtgcgctgcaacatgaagatggagctggagcaggccaatgaaagagaatgtgaggtgctgaagaagatctggggcagcgcccagggcatggacagcatgctgaagtacctgcagaggaagattgatgagttctag

SEQ ID NO: 55753 - DNA, 1239 bp, Artificial Sequence
  derived and/or modified sequence
atggacctggccaagagcggcatcaagatcctggtgcccaagagccccgtcaaaagcaggaccgccgttgacggctttcagtcggagagcccagagaaacttgaccccgtggagcaaggccaggaggacactgtcgcacccgaagtggcagctgaaaaaccggtgggagcacttcttggccctggtgcagaacgggctaggatgggcagccgccctaggatccacccgttagttccccaggtgcccggccctgttacagctgcgatggctactggattggcggtgaatgggaaaggcacttcccccttcatggatgcactgaccgctaatggtacgacgaacatccaaacctctgtgacaggtgtcaccgccagtaagcgaaaattcatcgacgacagacgtgatcagccgtttgataagaggctcagattttctgtgcggcagactgagtctgcttatcgctaccgtgacattgtcgtacggaagcaggacggatttacacacatcctgctgtctaccaaatcttctgagaacaatagcctcaatcctgaagtgatgcgagaagtgcaaagcgctctctctaccgccgccgctgatgattctaaactggtgctgctgagcgcagtgggatccgtcttctgctgcgggctggatttcatctattttatacgccggctgaccgacgataggaaacgggagagtacaaaaatggctgaggcgattagaaattttgtcaacacgtttattcagttcaagaagccaatcatcgttgcggtgaacgggccggccatcgggctcggcgcaagcatccttcctctttgcgacgtcgtctgggcaaatgaaaaagcatggttccagacaccatatactacattcgggcagtctcccgacggctgctccacagtcatgttcccaaaaattatgggaggagccagtgctaatgagatgctcctttcaggccggaagctgacagcacaagaggcatgtggcaaaggcctggtgtcccaggtgttttggccaggcacctttacccaggaagttatggtgagaataaaagaacttgcgtcttgtaaccccgtggtgctcgaggagtccaaggccctggtgcggtgcaacatgaagatggagctggagcaggctaatgagagagaatgcgaagtactaaaaaagatctggggctccgcccagggaatggactctatgctgaaatatctgcagcggaagatcgacgaattctag

SEQ ID NO: 55754 - DNA, 1239 bp, Artificial Sequence
  derived and/or modified sequence
atggacctggccaagagcggcatcaagatcctggtgcccaagagccccgtgaagtcgcggaccgcagtagatggtttccagagtgaatcaccagagaaattggacccagtcgagcaaggtcaagaggacactgtggctcccgaggttgcggctgagaagccagttggcgcccttctggggccaggtgctgaacgggctcgcatgggctcgagacctaggatccaccccctagttccgcaggtccctggcccagtcacggcggccatggccaccgggttggcggtcaatggaaagggcacctccccctttatggatgcactcacggcgaacggtaccacgaatattcaaacgtccgttacaggggtgaccgcttccaaaagaaaattcatcgacgaccggagggatcaaccattcgataaacgcctgagatttagcgttcgccagaccgaatcagcttatcggtatagggatattgtcgtgcggaagcaggatggcttcacgcacatcctgctgtcaacgaaaagtagcgagaacaattctctgaatccggaagtcatgcgcgaagtgcagtccgcactgagcaccgcagccgccgatgactcaaagctggtcctgctgtcagctgtgggctcagttttttgttgcggtctggactttatttacttcatcaggagactcaccgacgacaggaagagggagtctaccaaaatggccgaggccatcaggaatttcgtcaacacgttcatccagtttaagaagcccattattgttgccgtgaacgggcccgctattgggctcggagcatctatcttaccactgtgcgacgtagtttgggctaatgagaaggcgtggttccaaacaccttacactaccttcggtcagtcacccgacgggtgttccaccgtaatgttccctaagattatgggcggcgctagcgcgaatgaaatgctgttgtccggtaggaaactcactgcgcaggaagcctgcggtaaaggcctggtcagccaggtcttctggcctggcacctttacccaggaagtgatggtgaggatcaaggagcttgcttcctgtaaccctgtggtactcgaagagtcgaaagcgctggtccggtgtaacatgaaaatggagctggaacaggcgaacgagcgtgagtgtgaggtgttgaaaaagatttggggatctgctcagggtatggactcaatgctgaagtatctgcagcggaagattgatgagttctag

SEQ ID NO: 55755 - DNA, 1239 bp, Artificial Sequence
  derived and/or modified sequence
atggatttggctaaaagcggaatcaaaatcctggtgcccaaatcacccgtgaaatcgagaaccgccgtggacgggtttcaaagtgaatcccctgagaagctagaccctgttgagcagggacaggaagataccgtggctccagaggtggctgccgaaaaacccgtgggcgctctgctgggcccaggcgctgaacgcgctaggatgggctctagaccacgaattcaccctctcgtcccacaggtcccgggacccgttactgcggctatggccaccgggttagcagtgaatggcaagggaacgagccctttcatggacgcactgacagccaacggcaccaccaatatccagacaagcgtgaccggcgtgaccgcctccaagagaaagtttatcgatgacagacgcgaccagcctttcgacaagaggctgcggttctctgtaagacagacagagtctgcttaccgatacagggatatcgttgtgcggaagcaagatggtttcacccacatcctcttgagcacaaagagctcagagaataactcacttaaccccgaggtgatgagagaggtgcaaagcgccctgtcaaccgctgcggcagacgattccaagctagtattgctgtctgccgtcggctcggtgttttgttgtggcctggacttcatttattttatccggaggctgactgacgacaggaaacgtgagtctactaaaatggcggaggccataaggaacttcgtgaatacattcatacagtttaaaaaacccataatagtggccgtgaacggtccggcaatcggcctgggagcgtccatcctgcccctctgcgacgtcgtatgggccaatgagaaggcatggttccagacaccatacactacattcggacagagtccagacggctgctccacggtcatgtttccaaagataatggggggagccagtgccaatgagatgctgctgtctggacgcaaactaacagctcaggaagcatgcggcaaagggctcgtcagccaagtgttctggcccggtacgtttacacaggaggtgatggtaaggattaaggaactggcctcctgcaatccagtggtactggaagagtccaaggctttggtgaggtgcaatatgaaaatggagcttgaacaggcaaatgagcgcgagtgcgaagtgttgaaaaagatttggggttccgctcaggggatggattctatgctgaaatatctccagagaaagatcgacgagttctag

SEQ ID NO: 55756 - DNA, 1239 bp, Artificial Sequence
  derived and/or modified sequence
atggacctggctaagtctgggatcaaaatcctggttcccaaaagtcctgtcaagagccgcacagctgttgatggttttcagagcgagtcccctgaaaagctggacccagtggaacaagggcaggaggacactgtagctccggaagtcgccgctgagaagcccgtgggcgctctccttggtcctggcgcagaaagggcgagaatgggtagcagaccacgtatccaccccctggtgccccaagtgccaggaccggtcaccgcagccatggcaacaggacttgccgtgaacgggaagggaacctcgccattcatggacgcattaacagctaacggaacaaccaacattcagactagcgtgaccggcgtgacagcttccaaaaggaagttcattgacgatcgaagagaccagcccttcgacaaaaggcttagatttagtgtgcgtcagactgaatcagcttacagataccgcgatattgtcgtcagaaaacaagatgggtttacgcacatcctgctgagcacaaaaagctctgagaataacagccttaatcctgaggtgatgcgagaagtgcagagcgctctctccaccgcagcagcggacgattccaaactcgtactcctgagtgcagttggatccgtgttttgctgtggcctggactttatttacttcatcagaaggctgacagatgaccggaaaagggagagcactaagatggccgaagctattcgaaactttgtgaatacttttattcagtttaagaagccaattatcgtggcggtgaacggacctgccattggactcggggcatccatcctgcccctgtgtgatgtggtgtgggctaatgagaaggcttggtttcagacaccatacactacattcggtcagtcccctgacggatgcagtactgttatgttccctaagatcatgggcggagcgtctgcgaacgaaatgctgctgagtggaagaaaattaactgcgcaggaggcttgcggcaagggactggtcagccaagtgttttggcccggaaccttcacccaggaagttatggttagaatcaaggagctggcctcatgtaaccctgtggtactggaggagagtaaggccttagttaggtgtaacatgaaaatggaactggaacaggctaacgaaagagaatgcgaagttttgaagaagatttggggatccgcgcagggaatggattctatgctgaagtacctgcaacgcaaaattgacgagttctag

SEQ ID NO: 55757 - DNA, 1239 bp, Artificial Sequence
  derived and/or modified sequence
atggacctggccaagagcggcatcaagatcctggtgcccaagagccccgtgaagagcagaaccgccgtggacggcttccagagcgagagccccgagaagctggaccccgtggagcagggccaggaggacaccgtggcccccgaggtggccgccgagaagcccgtgggcgccctgctgggccccggcgccgagagagccagaatgggcagcagacccagaatccaccccctggtgccccaggtgcccggccccgtgaccgccgccatggccaccggcctggccgtgaacggcaagggcaccagccccttcatggacgccctgaccgccaacggcaccaccaacatccagaccagcgtgaccggcgtgaccgccagcaagagaaagttcatcgacgacagaagagaccagcccttcgacaagagactgagattcagcgtgagacagaccgagagcgcctacagatacagagacatcgtggtgagaaagcaggacggcttcacccacatcctgctgagcaccaagagcagcgagaacaacagcctgaaccccgaggtgatgagagaggtgcagagcgccctgagcaccgccgccgccgacgacagcaagctggtgctgctgagcgccgtgggcagcgtgttctgctgcggcctggacttcatctacttcatcagaagactgaccgacgacagaaagagagagagcaccaagatggccgaggccatcagaaacttcgtgaacaccttcatccagttcaagaagcccatcatcgtggccgtgaacggccccgccatcggcctgggcgccagcatcctgcccctgtgcgacgtggtgtgggccaacgagaaggcctggttccagaccccctacaccaccttcggccagagccccgacggctgcagcaccgtgatgttccccaagatcatgggcggcgccagcgccaacgagatgctgctgagcggcagaaagctgaccgcccaggaggcctgcggcaagggcctggtgagccaggtgttctggcccggcaccttcacccaggaggtgatggtgagaatcaaggagctggccagctgcaaccccgtggtgctggaggagagcaaggccctggtgagatgcaacatgaagatggagctggagcaggccaacgagagagagtgcgaggtgctgaagaagatctggggcagcgcccagggcatggacagcatgctgaagtacctgcagagaaagatcgacgagttctag

SEQ ID NO: 55758 - protein, 459 aa, Artificial Sequence
  derived and/or modified sequence
MRTPQLALLQVFFLVFPDGVRPQPSSSPSGAVPTSLELQRGTDGGTLQSPSEATATRPAVPGLPTVVPTLVTPSAPGNRTVDLFPVLPICVCDLTPGACDINCCCDRDCYLLHPRTVFSFCLPGSVRSSSWVCVDNSVIFRSNSPFPSRVFMDSNGIRQFCVHVNNCFLESKSTTCTRFFKNLASSCTLDSALNAASYYNFTVLKVPRSMTDPQNMEAFQQSTAASLTSPRSGNPGYIVGKPLLALTDDISYSMTLLQSQGNGSCSVKRHEVQFGVNAISGCKLRLKKADCSHLQQEIYQTLHGRPRPEYVAIFGNADPAQKGGWTRILNRHCSISAINCTSCCLIPVSLEIQVLWAYVGLLSNPQAHVSGVRFLYQCQSIQDSQQVTEVSLTTLVNFVDITQKPQPPRGQPKMDWKWPFDFFPFKVAFSRGVFSQKCSVSPILILCLLLLGVLNLETM

SEQ ID NO: 55759 - DNA, 1380 bp, Artificial Sequence
  derived and/or modified sequence
atgagaaccccccagctggccctgctgcaggtgttcttcctggtgttccccgacggcgtgagaccccagcccagcagcagccccagcggcgccgtgcccaccagcctggagctgcagagaggcaccgacggcggcaccctgcagagccccagcgaggccaccgccaccagacccgccgtgcccggcctgcccaccgtggtgcccaccctggtgacccccagcgcccccggcaacagaaccgtggacctgttccccgtgctgcccatctgcgtgtgcgacctgacccccggcgcctgcgacatcaactgctgctgcgacagagactgctacctgctgcaccccagaaccgtgttcagcttctgcctgcccggcagcgtgagaagcagcagctgggtgtgcgtggacaacagcgtgatcttcagaagcaacagccccttccccagcagagtgttcatggacagcaacggcatcagacagttctgcgtgcacgtgaacaactgcttcctggagagcaagagcaccacctgcaccagattcttcaagaacctggccagcagctgcaccctggacagcgccctgaacgccgccagctactacaacttcaccgtgctgaaggtgcccagaagcatgaccgacccccagaacatggaggccttccagcagagcaccgccgccagcctgaccagccccagaagcggcaaccccggctacatcgtgggcaagcccctgctggccctgaccgacgacatcagctacagcatgaccctgctgcagagccagggcaacggcagctgcagcgtgaagagacacgaggtgcagttcggcgtgaacgccatcagcggctgcaagctgagactgaagaaggccgactgcagccacctgcagcaggagatctaccagaccctgcacggcagacccagacccgagtacgtggccatcttcggcaacgccgaccccgcccagaagggcggctggaccagaatcctgaacagacactgcagcatcagcgccatcaactgcaccagctgctgcctgatccccgtgagcctggagatccaggtgctgtgggcctacgtgggcctgctgagcaacccccaggcccacgtgagcggcgtgagattcctgtaccagtgccagagcatccaggacagccagcaggtgaccgaggtgagcctgaccaccctggtgaacttcgtggacatcacccagaagccccagccccccagaggccagcccaagatggactggaagtggcccttcgacttcttccccttcaaggtggccttcagcagaggcgtgttcagccagaagtgcagcgtgagccccatcctgatcctgtgcctgctgctgctgggcgtgctgaacctggagaccatgtag

SEQ ID NO: 55760 - DNA, 1380 bp, Artificial Sequence
  derived and/or modified sequence
atgagaaccccacagctggccctcttgcaggtattctttctggtgttccccgacggagtgcgcccgcaaccatctagttcaccatccggggccgtcccaactagcctagagttgcagagaggcaccgacggcgggaccttgcagtcacccagcgaggccacagctactcggcccgctgtgcccggcctgcccaccgtggtgccaactctagttacaccatcggctcccggcaatagaacagtagacctcttcccagtcctgcctatctgcgtttgcgatctcactcctggcgcatgcgacataaactgttgttgcgatcgcgactgttatctcctgcacccacgcactgtgttttcattctgcttaccaggctcggttagaagctcatcttgggtttgcgtggacaactcagtcatcttccgatcaaattctcccttcccgtctcgggtgtttatggattcaaacggcattcgccagttctgtgtacacgtgaataactgttttctcgagagtaagtccaccacgtgcactcgattcttcaagaacctggcttcatcttgcacactagattcagccctgaacgccgccagctattacaactttactgtacttaaggtgcctaggagtatgaccgacccccagaatatggaggctttccaacaatccactgcggcatcccttacaagcccaaggagtggaaatcccgggtacattgtaggtaaacccctgctagcactgaccgatgacatcagctacagtatgacccttcttcagagtcagggaaatggaagttgtagcgtcaagcgccacgaggttcagtttggagtgaatgcaattagtggctgtaaacttcggttgaagaaagcagattgtagccatctgcaacaggagatatatcagaccctgcatggccgtcctcggccagaatacgtagccattttcggaaatgccgaccccgctcagaaaggtgggtggacaaggatcctcaatcgccactgctcgatttctgcaattaactgcacgtcttgttgtctaatccctgttagtctggagatacaggtcctgtgggcttatgtgggacttctctccaacccgcaggcacatgtttcaggtgtccggttcttgtatcagtgccagagcatccaggacagtcagcaagtgactgaggtatccctgacaacactagtaaattttgtcgatattacccaaaagcctcagccccctcgagggcaacccaaaatggattggaaatggccttttgacttcttcccattcaaagtagccttctctcggggagttttctcccagaagtgctccgtgtccccaatactgattctgtgtcttctgctgttgggggtgcttaaccttgagactatgtag

SEQ ID NO: 55761 - DNA, 1380 bp, Artificial Sequence
  derived and/or modified sequence
atgaggaccccccagctggccctgctgcaggtgttcttcctggtgtttcctgatggagtgcggccccagcccagcagcagccccagcggggctgtgcccaccagcctggagctgcagaggggcacagatggcggcaccctgcagagccccagcgaggccacagccaccaggcctgctgtgcccggcctgcccaccgtggtgcccaccctggtgacccccagcgcccctggcaacagaacagtggacctcttccctgtgctgcccatctgtgtgtgtgacctgacccctggggcctgtgacatcaactgctgctgtgaccgggactgctacctgctgcaccccaggacagtgttctccttctgcctgcccggctctgtgcgcagcagctcctgggtgtgtgtggacaacagcgtcatcttccgcagcaacagccccttccccagcagggtcttcatggacagcaatggcatccggcagttctgtgtgcacgtgaacaactgcttcctggagagcaagagcaccacctgcacccgcttcttcaagaacctggccagcagctgcaccctggacagcgccctgaatgctgccagctactacaacttcaccgtgctgaaggtgcccaggtccatgacagacccccagaacatggaggccttccagcagagcacagctgccagcctgaccagccccaggagcggcaaccctggctacatcgtgggcaagcccctgctggccctgacagatgacatctcctacagcatgaccctgctgcagagccagggcaatggcagctgcagcgtgaagagacatgaggtgcagtttggagtgaatgccatcagcggctgcaagctgcggctgaagaaggctgactgcagccacctgcagcaggagatctaccagaccctgcacggccggcccaggccagaatatgtggccatctttggaaatgctgaccctgcccagaagggcggctggacccgcatcctgaacagacactgcagcatcagcgccatcaactgcaccagctgctgcctgatccctgtgtccctggagatccaggtgctgtgggcctacgtgggcctgctgagcaacccccaggcccacgtgtctggagtgcgcttcctgtaccagtgccagagcatccaggacagccagcaggtgacagaggtgtccctgaccaccctggtgaactttgtggacatcacccagaagccccagcccccccggggccagcccaagatggactggaagtggccctttgacttcttccccttcaaggtggccttcagccggggcgtcttcagccagaagtgcagcgtgagccccatcctgatcctgtgcctgctgctgctgggcgtgctgaacctggagaccatgtag

SEQ ID NO: 55762 - DNA, 1380 bp, Artificial Sequence
  derived and/or modified sequence
atgcggaccccccagctggccctgctgcaggtgttcttcctggtgtttccggatggcgttcgaccccagcctagttccagtccttcaggggccgtccccactagtttagaactgcagcgggggacggatgggggcacgttgcagtcaccatctgaagccaccgctaccagacccgccgtccccggtcttccaaccgtggtcccaacactcgtcactccgagcgctcctgggaaccggaccgttgatttgtttccagttctccccatttgcgtgtgtgatctcacccctggtgcttgcgatattaactgctgctgcgacagagattgctatctactccatccaaggactgtgttttcattctgtttgcctggaagtgtccggtcatccagttgggtctgcgtcgacaactctgtcatctttcgaagtaattcaccctttccgtcacgtgtgtttatggattccaatgggatcaggcagttttgcgttcacgtcaacaactgctttctggaatccaagagcacaacctgtactcggttcttcaaaaatctggcaagctcctgtacccttgatagcgcactgaacgctgctagttattacaacttcacagttctgaaggtgcctcgctccatgacagacccacagaacatggaagccttccaacagtcaactgccgcctccctgacctcccctcgttccggaaaccccgggtatatcgtgggaaaaccgctcctcgcactgacagatgatataagttactccatgaccctgctgcagagtcagggaaacggcagctgctctgtcaagagacatgaagtacagtttggggttaacgctatatctggctgtaaactccgcctaaagaaagccgattgctcgcatcttcaacaggagatctaccagactctgcatgggaggccccggcctgaatatgtcgctatcttcggtaatgcggatccagctcagaagggtgggtggactaggatcctgaacaggcactgctccatctctgcaatcaactgtacatcctgctgcctaattcctgtcagcctagagatacaggtgctctgggcctacgtaggccttctttcaaaccctcaggcccacgtgtccggagtgaggttcctctaccaatgccagtctatacaggatagccagcaggtgactgaggtctccctcaccaccctggttaattttgtggatataacgcagaagccacagccgcctaggggtcagccaaaaatggactggaagtggcctttcgactttttcccatttaaggtcgcattctcaaggggagtgtttagccaaaaatgcagcgtcagtccaatcttaattctgtgcctgctcctgctgggtgtcctgaaccttgagacaatgtag

SEQ ID NO: 55763 - DNA, 1380 bp, Artificial Sequence
  derived and/or modified sequence
atgaggactcctcagttggcactcttacaggtcttttttctggtatttccagacggcgttaggccgcagcctagttccagcccttccggagctgtgcctactagcctggagctgcagcgaggaacagatggaggcacgctgcaatctccatccgaggcgaccgcaactaggcccgctgtcccaggactccccaccgtcgttccgactctcgtgaccccttctgcgccagggaaccgtacagtggacctgtttccagtccttccgatctgcgtctgtgatttgactcctggagcgtgcgacattaattgctgttgtgaccgtgactgctatttacttcacccgaggaccgtgttttctttttgtctccctggcagtgttcgatcaagctcctgggtgtgcgtggataactccgtgattttccggtcaaattctccattcccttctcgggttttcatggactcgaacgggatcaggcagttttgcgtccatgtaaataactgtttcctggagtccaagagtaccacctgtactaggttcttcaagaacctcgcctcgtcctgcaccctggacagcgccctgaatgccgcttcgtactataactttacggtactaaaagtccctaggtccatgactgatccacaaaatatggaggcctttcagcaatctacggcagcgagcctgacttcgccgaggtcggggaatccaggatatatcgtggggaagccccttttggccctcacagacgacataagctatagtatgaccctgcttcaaagccagggcaacgggtcctgttcagtaaaacgccatgaggtccagtttggagtcaacgcaatcagcggctgtaaactgcgcctgaagaaggcagattgtagccacctgcagcaggagatatatcagacccttcatgggaggcccaggcccgaatatgttgctatctttggcaacgccgatcctgctcagaaaggtggctggaccaggatcctgaataggcactgcagtatctcagcgataaactgcacttcttgctgcctgatccccgtaagcttggagatacaggtgctctgggcctacgtgggactgctcagcaaccctcaggctcacgttagtggtgttaggttcctgtaccagtgtcagtccattcaggacagccagcaggtgacagaagtaagtctcacaactctggtcaatttcgttgatattacacagaaaccccaacctcccaggggccaacccaaaatggactggaagtggccctttgacttttttccctttaaggtagcattcagcagaggggtgttttcccaaaaatgcagtgtttctcccattctcatcctttgcttactgctgctgggggtactgaatctggagaccatgtag

SEQ ID NO: 55764 - DNA, 2295 bp, Artificial Sequence
  derived and/or modified sequence
ggttgccaggcaacggaggcacggcccggcccgcgttaaggaggagggcgcagaccgaaggacactgaaagagctgtaacaaccccactttcgattggttgaagagctctcagccttctcatgagccaatgagaagaggcacgcggatggcgtcagacgctatgcgactcctcccacccacgctctggcaatgcgattggagaccgcggaggcctacgtcggacccggaggccctgaatgccccatgcgcaccccacagctcgcgctcctgcaagtgttctttctggtgttccccgatggcgtccggcctcagccctcttcctccccatcaggggcagtgcccacgtctttggagctgcagcgagggacggatggcggaaccctccagtccccttcagaggcgactgcaactcgcccggccgtgcctggactccctacagtggtccctactctcgtgactccctcggcccctgggaataggactgtggacctcttcccagtcttaccgatctgtgtctgtgacttgactcctggagcctgcgatataaattgctgctgcgacagggactgctatcttctccatccgaggacagttttctccttctgccttccaggcagcgtaaggtcttcaagctgggtttgtgtagacaactctgttatcttcaggagtaattccccgtttccttcaagagttttcatggattctaatggaatcaggcagttttgtgtccatgtgaacaactgtttcctagagagtaaaagtacaacttgcactcgttttttcaagaacctggctagtagctgtaccttggattcagccctcaatgctgcctcttactataacttcacagtcttaaaggttccaagaagcatgactgatccacagaatatggaggcttttcaacagagcacagctgcttctctcaccagtcctagaagtgggaatcctggctatatagttgggaagccactcttggctctgactgatgatataagttactcaatgaccctcttacagagccagggtaatggaagttgctctgttaaaagacatgaagtgcagtttggagtgaatgcaatatctggatgcaagctcaggttgaagaaggcagactgcagccacttgcagcaggagatttatcagactcttcatggaaggcccagaccagagtatgttgccatctttggtaatgctgacccagcccagaaaggagggtggaccaggatcctcaacaggcactgcagcatttcagctataaactgtacttcctgctgtctcataccagtttccctggagatccaggtattgtgggcatatgtaggtctcctgtccaacccgcaagctcatgtatcaggagttcgattcctataccagtgccagtctatacaggattctcagcaagttacagaagtatctttgacaactcttgtgaactttgtggacattacccagaagccacagcctccaaggggccaacccaaaatggactggaaatggccattcgacttctttcccttcaaagtggcattcagcagaggagtattctctcaaaaatgctcagtctctcccatccttatcctgtgcctcttactacttggagttctcaacctagagactatgtgaagaaaagaaaataatcagatttcagttttccctatgagaaactctgaggcagccacttatcttggctaaatagaacctcacctgctcatgaccagagagcatttaggataatagaggacctaactgaaggaatccttgtatatgaaaggagttattttagaaaagcaataaaaatattttattcatcatagctctctgctttgggctctgcaggccaccagatacacatgaggcccctacttctcaagctgggaaggccaagagccttccttcagcctttctggttatgttacacctagctgaatgtttacaaggtctggatccatcagccctcaggcacagttgggccaagcagaaagagagaaacacttctgctgtcaccttgaatgaactcaggaatagcttccctctggactgtagaggagctaactgtttggaacagaaaactgctggctgttgattttgtctggttcctttgccaacatctgggcacaccctttgcccagacacgagtggggaaagcagttctttctcctcagtttccaaagtaaatggggaatcccagctttcttttctactagcaaatgaccctaccatttatttctgcctttttcttccgttcattgtgaggaaaaataaaactggttgagagctttgttgtactaattcca

SEQ ID NO: 55765 - protein, 726 aa, Artificial Sequence
  derived and/or modified sequence
MSAITVALLSLLFITSGTIENHKDLGGHFFSTTQSPPATQGSTAAQRSTATQHSTATQSSTATQTSPVPLTPESPLFQNFSGYHIGVGRADCTGQVADINLMGYGKSGQNAQGILTRLYSRAFIMAEPDGSNRTVFVSIDIGMVSQRLRLEVLNRLQSKYGSLYRRDNVILSGTHTHSGPAGYFQYTVFVIASEGFSNQTFQHMVTGILKSIDIAHTNMKPGKIFINKGNVDGVQINRSPYSYLQNPQSERARYSSNTDKEMIVLKMVDLNGDDLGLISWFAIHPVSMNNSNHLVNSDNVGYASYLLEQEKNKGYLPGQGPFVAAFASSNLGDVSPNILGPRCINTGESCDNANSTCPIGGPSMCIAKGPGQDMFDSTQIIGRAMYQRAKSKTCKPALGYSFAAGTIDGVGGLNFTQGKTEGDPFWDTIRDQILGKPSEEIKECHKPKPILLHTGELSKPHPWHPDIVDVQIITLGSLAITAIPGEFTTMSGRRLREAVQAEFASHGMQNMTVVISGLCNVYTHYITTYEEYQAQRYEAASTIYGPHTLSAYIQLFRNLAKAIATDTVANLSRGPEPPFFKQLIVPLIPSIVDRAPKGRTFGDVLQPAKPEYRVGEVAEVIFVGANPKNSVQNQTHQTFLTVEKYEATSTSWQIVCNDASWETRFYWHKGLLGLSNATVEWHIPDTAQPGIYRIRYFGHNRKQDILKPAVILSFEGTSPAFEVVTI

SEQ ID NO: 55766 - protein, 745 aa, Artificial Sequence
  derived and/or modified sequence
MAKRTFSNLETFLIFLLVMMSAITVALLSLLFITSGTIENHKDLGGHFFSTTQSPPATQGSTAAQRSTATQHSTATQSSTATQTSPVPLTPESPLFQNFSGYHIGVGRADCTGQVADINLMGYGKSGQNAQGILTRLYSRAFIMAEPDGSNRTVFVSIDIGMVSQRLRLEVLNRLQSKYGSLYRRDNVILSGTHTHSGPAGYFQYTVFVIASEGFSNQTFQHMVTGILKSIDIAHTNMKPGKIFINKGNVDGVQINRSPYSYLQNPQSERARYSSNTDKEMIVLKMVDLNGDDLGLISWFAIHPVSMNNSNHLVNSDNVGYASYLLEQEKNKGYLPGQGPFVAAFASSNLGDVSPNILGPRCINTGESCDNANSTCPIGGPSMCIAKGPGQDMFDSTQIIGRAMYQRAKSKTCKPALGYSFAAGTIDGVGGLNFTQGKTEGDPFWDTIRDQILGKPSEEIKECHKPKPILLHTGELSKPHPWHPDIVDVQIITLGSLAITAIPGEFTTMSGRRLREAVQAEFASHGMQNMTVVISGLCNVYTHYITTYEEYQAQRYEAASTIYGPHTLSAYIQLFRNLAKAIATDTVANLSRGPEPPFFKQLIVPLIPSIVDRAPKGRTFGDVLQPAKPEYRVGEVAEVIFVGANPKNSVQNQTHQTFLTVEKYEATSTSWQIVCNDASWETRFYWHKGLLGLSNATVEWHIPDTAQPGIYRIRYFGHNRKQDILKPAVILSFEGTSPAFEVVTI

SEQ ID NO: 55767 - DNA, 2181 bp, Artificial Sequence
  derived and/or modified sequence
atgagcgccatcaccgtggccctgctgagcctgctgttcatcaccagcggcaccatcgagaaccacaaggacctgggcggccacttcttcagcaccacccagagcccccccgccacccagggcagcaccgccgcccagagaagcaccgccacccagcacagcaccgccacccagagcagcaccgccacccagaccagccccgtgcccctgacccccgagagccccctgttccagaacttcagcggctaccacatcggcgtgggcagagccgactgcaccggccaggtggccgacatcaacctgatgggctacggcaagagcggccagaacgcccagggcatcctgaccagactgtacagcagagccttcatcatggccgagcccgacggcagcaacagaaccgtgttcgtgagcatcgacatcggcatggtgagccagagactgagactggaggtgctgaacagactgcagagcaagtacggcagcctgtacagaagagacaacgtgatcctgagcggcacccacacccacagcggccccgccggctacttccagtacaccgtgttcgtgatcgccagcgagggcttcagcaaccagaccttccagcacatggtgaccggcatcctgaagagcatcgacatcgcccacaccaacatgaagcccggcaagatcttcatcaacaagggcaacgtggacggcgtgcagatcaacagaagcccctacagctacctgcagaacccccagagcgagagagccagatacagcagcaacaccgacaaggagatgatcgtgctgaagatggtggacctgaacggcgacgacctgggcctgatcagctggttcgccatccaccccgtgagcatgaacaacagcaaccacctggtgaacagcgacaacgtgggctacgccagctacctgctggagcaggagaagaacaagggctacctgcccggccagggccccttcgtggccgccttcgccagcagcaacctgggcgacgtgagccccaacatcctgggccccagatgcatcaacaccggcgagagctgcgacaacgccaacagcacctgccccatcggcggccccagcatgtgcatcgccaagggccccggccaggacatgttcgacagcacccagatcatcggcagagccatgtaccagagagccaagagcaagacctgcaagcccgccctgggctacagcttcgccgccggcaccatcgacggcgtgggcggcctgaacttcacccagggcaagaccgagggcgaccccttctgggacaccatcagagaccagatcctgggcaagcccagcgaggagatcaaggagtgccacaagcccaagcccatcctgctgcacaccggcgagctgagcaagccccacccctggcaccccgacatcgtggacgtgcagatcatcaccctgggcagcctggccatcaccgccatccccggcgagttcaccaccatgagcggcagaagactgagagaggccgtgcaggccgagttcgccagccacggcatgcagaacatgaccgtggtgatcagcggcctgtgcaacgtgtacacccactacatcaccacctacgaggagtaccaggcccagagatacgaggccgccagcaccatctacggcccccacaccctgagcgcctacatccagctgttcagaaacctggccaaggccatcgccaccgacaccgtggccaacctgagcagaggccccgagccccccttcttcaagcagctgatcgtgcccctgatccccagcatcgtggacagagcccccaagggcagaaccttcggcgacgtgctgcagcccgccaagcccgagtacagagtgggcgaggtggccgaggtgatcttcgtgggcgccaaccccaagaacagcgtgcagaaccagacccaccagaccttcctgaccgtggagaagtacgaggccaccagcaccagctggcagatcgtgtgcaacgacgccagctgggagaccagattctactggcacaagggcctgctgggcctgagcaacgccaccgtggagtggcacatccccgacaccgcccagcccggcatctacagaatcagatacttcggccacaacagaaagcaggacatcctgaagcccgccgtgatcctgagcttcgagggcaccagccccgccttcgaggtggtgaccatctag

SEQ ID NO: 55768 - DNA, 2238 bp, Artificial Sequence
  derived and/or modified sequence
atggccaagagaaccttcagcaacctggagaccttcctgatcttcctgctggtgatgatgagcgccatcaccgtggccctgctgagcctgctgttcatcaccagcggcaccatcgagaaccacaaggacctgggcggccacttcttcagcaccacccagagcccccccgccacccagggcagcaccgccgcccagagaagcaccgccacccagcacagcaccgccacccagagcagcaccgccacccagaccagccccgtgcccctgacccccgagagccccctgttccagaacttcagcggctaccacatcggcgtgggcagagccgactgcaccggccaggtggccgacatcaacctgatgggctacggcaagagcggccagaacgcccagggcatcctgaccagactgtacagcagagccttcatcatggccgagcccgacggcagcaacagaaccgtgttcgtgagcatcgacatcggcatggtgagccagagactgagactggaggtgctgaacagactgcagagcaagtacggcagcctgtacagaagagacaacgtgatcctgagcggcacccacacccacagcggccccgccggctacttccagtacaccgtgttcgtgatcgccagcgagggcttcagcaaccagaccttccagcacatggtgaccggcatcctgaagagcatcgacatcgcccacaccaacatgaagcccggcaagatcttcatcaacaagggcaacgtggacggcgtgcagatcaacagaagcccctacagctacctgcagaacccccagagcgagagagccagatacagcagcaacaccgacaaggagatgatcgtgctgaagatggtggacctgaacggcgacgacctgggcctgatcagctggttcgccatccaccccgtgagcatgaacaacagcaaccacctggtgaacagcgacaacgtgggctacgccagctacctgctggagcaggagaagaacaagggctacctgcccggccagggccccttcgtggccgccttcgccagcagcaacctgggcgacgtgagccccaacatcctgggccccagatgcatcaacaccggcgagagctgcgacaacgccaacagcacctgccccatcggcggccccagcatgtgcatcgccaagggccccggccaggacatgttcgacagcacccagatcatcggcagagccatgtaccagagagccaagagcaagacctgcaagcccgccctgggctacagcttcgccgccggcaccatcgacggcgtgggcggcctgaacttcacccagggcaagaccgagggcgaccccttctgggacaccatcagagaccagatcctgggcaagcccagcgaggagatcaaggagtgccacaagcccaagcccatcctgctgcacaccggcgagctgagcaagccccacccctggcaccccgacatcgtggacgtgcagatcatcaccctgggcagcctggccatcaccgccatccccggcgagttcaccaccatgagcggcagaagactgagagaggccgtgcaggccgagttcgccagccacggcatgcagaacatgaccgtggtgatcagcggcctgtgcaacgtgtacacccactacatcaccacctacgaggagtaccaggcccagagatacgaggccgccagcaccatctacggcccccacaccctgagcgcctacatccagctgttcagaaacctggccaaggccatcgccaccgacaccgtggccaacctgagcagaggccccgagccccccttcttcaagcagctgatcgtgcccctgatccccagcatcgtggacagagcccccaagggcagaaccttcggcgacgtgctgcagcccgccaagcccgagtacagagtgggcgaggtggccgaggtgatcttcgtgggcgccaaccccaagaacagcgtgcagaaccagacccaccagaccttcctgaccgtggagaagtacgaggccaccagcaccagctggcagatcgtgtgcaacgacgccagctgggagaccagattctactggcacaagggcctgctgggcctgagcaacgccaccgtggagtggcacatccccgacaccgcccagcccggcatctacagaatcagatacttcggccacaacagaaagcaggacatcctgaagcccgccgtgatcctgagcttcgagggcaccagccccgccttcgaggtggtgaccatctag

SEQ ID NO: 55769 - DNA, 2181 bp, Artificial Sequence
  derived and/or modified sequence
atgagcgctattaccgtcgccctcttatctctgttattcatcacatctggtaccattgagaatcacaaagatcttggcggccactttttctccaccactcagtcaccacctgctactcagggctcgaccgctgcccagagaagcactgccacccagcacagtactgcaacccagtccagcacagcgactcaaacttctcccgtgccattgaccccagaatcccccctgtttcagaatttcagtggctaccacattggagtcggacgggccgattgtacgggccaggtggctgatattaacctcatggggtacggtaaatcaggccaaaatgcccaggggattctgacgcgcctatacagccgtgcctttatcatggcagaacccgacggaagcaatcgcacagtatttgtgagcatcgatatcggcatggtgtcccagcgtctccgtctggaggtgcttaaccggctgcaatccaagtatggcagcctttaccgtcgggataacgtgatcctctccgggacccatacacacagcgggccagcaggctactttcaatacactgtgttcgttatcgcttcagagggtttttccaaccagacctttcaacacatggtgactggcatcctgaaatctattgatattgcacataccaatatgaagccagggaaaatttttatcaataaaggcaacgtcgatggcgttcaaataaatagatcaccctactcctatctgcagaaccctcagtctgaaagagcccggtactcttccaacacagacaaggagatgattgtgctgaagatggtggacctcaacggcgacgatctcggactcatctcatggtttgccatccacccagtgagcatgaacaacagcaatcatctcgttaattcggacaacgtcggatacgctagttatcttctggagcaggagaagaacaaagggtatctccctgggcaggggccattcgtggctgcttttgcatctagtaacctgggagatgtctcacccaatattttgggacctcgttgtatcaacacaggtgaaagttgcgacaatgccaacagcacatgccccatcgggggcccctccatgtgtatcgcaaaaggccccggccaggacatgttcgattcgacccagatcattggacgtgcgatgtaccagagagctaaaagtaaaacatgcaaaccagctctcggatattcgttcgctgctgggactatcgacggcgtgggcggtctgaacttcactcaggggaaaacagagggtgatccattctgggatactatccgggatcaaatcctcgggaagcctagcgaagagattaaagaatgccataagcccaaacccattctcctgcacacgggtgaactgtccaagccccacccttggcaccctgacatcgttgatgtgcagatcatcacgctcggtagtctggccattaccgcaatcccaggtgaattcactacgatgagtgggaggagattgcgtgaggccgtacaggcagagttcgcctcgcatgggatgcagaatatgacggtggtgatcagtggcctgtgtaacgtgtatacacactacatcacgacgtacgaggagtaccaggctcaaagatatgaggcagctagtactatctacggtcctcacactttatcagcttatatccaactgtttcggaatttagccaaagccattgcgactgacactgtggccaacctgtcaaggggtccagaaccaccatttttcaagcagctgatcgtcccgctgatccccagtatcgtggatagggctcctaagggaaggacgtttggtgacgttttacagccagctaagcccgagtaccgagtgggcgaagtagccgaggtcatctttgttggagcgaaccctaagaattcggtgcagaatcagacacatcagacgtttctcaccgtagagaaatacgaggccaccagcacttcctggcagattgtttgcaacgatgcatcatgggaaacccgcttttactggcataaggggctgttgggcttgagcaacgcaacagtggaatggcatatccccgacacagctcagccgggcatctacaggattaggtatttcggacacaaccgtaagcaggacatattgaagcccgcggtgatcctcagctttgaggggactagtcccgcgttcgaggtagtgaccatttag

SEQ ID NO: 55770 - DNA, 2238 bp, Artificial Sequence
  derived and/or modified sequence
atggccaagcggaccttctccaacttagagacatttctcatattcttgcttgtaatgatgagcgctatcaccgtggccttgctttccctgctgtttattacttctggcaccatcgaaaatcacaaggacttgggcggccatttcttcagtaccacccagtcgccgcccgccacccagggctctactgccgcccagaggagtactgccacacagcactctaccgctactcagtcatcgacagccacgcagacgtcccctgtgcctctcactcctgagagtccactctttcagaatttttcaggttaccacatcggagtggggcgagcagactgcacaggccaggttgcagacataaatctaatgggatacggcaagtcgggacagaatgcccagggcatcctgactcgtctgtattcaagggcgtttattatggcagagcctgatgggtcaaacaggaccgtcttcgtctcaatagacattgggatggtcagccaaagattacgcctggaggttctcaacagattacaaagcaagtacggatctctgtaccggcgggataacgtgattctgtcagggacccacacacacagtggacctgccggatattttcagtacaccgtctttgtcatcgcgtccgaaggattctccaaccagaccttccagcacatggtgacaggcatccttaagagtatagatatcgcacacactaacatgaaaccggggaaaatcttcatcaacaagggcaatgtggatggagttcagattaacaggtcaccctatagttacctgcaaaacccccagtcagaaagagctcgatactcaagtaataccgataaagagatgatcgtgttaaagatggttgatctcaatggcgacgaccttggactgattagctggtttgccatccaccccgtcagcatgaacaatagtaaccacctggtgaatagtgacaacgtgggatacgcttcttatttgcttgagcaggagaagaataaaggctatctgccgggacaaggaccttttgtggctgcttttgcaagttctaatctaggtgacgtgtcccctaacatcttgggtcctagatgcattaatactggcgaatcctgtgacaatgccaatagcacctgcccaatcggggggccatccatgtgtatagcgaaaggccccggacaggacatgtttgattccacacagatcattggccgagccatgtaccagcgggccaaatcaaagacttgcaaacctgcactcggctactcattcgcggccgggacaatcgatggcgtcggcggcctgaatttcacccagggaaaaaccgagggggatcccttctgggacaccatcagagaccagatcctaggaaaaccatctgaggagatcaaagagtgtcacaagccaaaacccattctgctacacaccggggaactgtctaaacctcatccatggcaccctgacattgtagacgtgcagataataacactgggctcactggccatcaccgccatccccggagaatttacaaccatgagcggccgccggctgagggaggcagtgcaagcggaatttgcttcccatgggatgcagaatatgacagtcgtcattagcggactgtgcaacgtttacacacattacatcacgacttacgaggagtaccaggcccaaagatacgaagcagcttccaccatttatggcccgcatacgctgtcggcctacatccagctgttccgtaacctggcaaaagccattgcaacggacacagttgccaacctgtcacgggggccagaacctccattcttcaagcagctcattgttcctttgattccaagtattgtcgacagggcccccaaaggccgaacattcggcgacgtcctccaacccgcgaagccagaatatcgtgtgggagaggtggccgaggttatctttgtgggggcgaaccctaagaattccgtccaaaaccaaactcatcaaacatttttgaccgtcgagaaatatgaggccacctctacctcctggcagatagtttgcaacgacgcctcctgggagacgcgtttttactggcacaagggcctgttgggcttgtccaatgccacggtggagtggcacatcccagatacagcgcaacctgggatctaccgcatccgctatttcggacataaccgaaagcaagatatcttgaagccggccgttatactctctttcgaagggacatccccagcctttgaggtggttacaatttag

SEQ ID NO: 55771 - DNA, 2181 bp, Artificial Sequence
  derived and/or modified sequence
atgtctgccatcaccgtggccctgctgagcctgctcttcatcaccagcggcaccatcgagaaccacaaggacctgggcggccacttcttcagcaccacccagagccccccagccacccagggcagcacagctgcccagaggagcacagccacccagcacagcacagccacccagagcagcacagccacccagaccagccctgtgcccctgaccccagagagccccctcttccagaacttcagcggctaccacatcggcgtgggccgggctgactgcaccggccaggtggccgacatcaacctgatgggctacggcaagagcggccagaatgcccagggcatcctgacccggctgtacagccgggccttcatcatggccgagccagatggcagcaacagaacagtgtttgtgtccattgatattggcatggtgtcccagaggctgcggctggaggtgctgaaccggctgcagagcaaatatggcagcctgtacagaagagacaacgtcatcctgagcggcacccacacccacagcggccctgctggctacttccagtacacagtgtttgtgattgccagcgagggcttcagcaaccagaccttccagcacatggtgacaggcatcctgaagagcattgacatcgcccacaccaacatgaagccaggcaagatcttcatcaacaagggaaatgtggatggagtgcagatcaacagaagcccctacagctacctgcagaacccccagagcgagcgggcccgctacagcagcaacacagacaaggagatgattgtgctgaagatggtggacctgaatggagatgacctgggcctcatctcctggtttgccatccaccctgtgtccatgaacaacagcaaccacctggtgaacagcgacaacgtgggctacgccagctacctgctggagcaggagaagaacaagggctacctgcccggccagggcccctttgtggccgcctttgccagcagcaacctgggagatgtgagccccaacatcctgggcccccgctgcatcaacacaggagagagctgtgacaatgccaacagcacctgccccatcggcggccccagcatgtgcatcgccaagggccctggccaggacatgtttgacagcacccagatcatcggccgggccatgtaccagagggccaagagcaagacctgcaagccagccctgggctacagctttgctgctggcaccattgatggagtgggcggcctgaacttcacccagggcaagacagaaggagaccccttctgggacaccatccgggaccagatcctgggcaagcccagcgaggagatcaaggagtgccacaagcccaagcccatcctgctgcacactggagagctgagcaagccccacccctggcacccagacatcgtggatgtgcagatcatcaccctgggcagcctggccatcacagccatccctggagagttcaccaccatgtctggaagaaggctgcgggaggccgtgcaggccgagtttgccagccacggcatgcagaacatgacagtggtgatcagcggcctgtgcaatgtgtacacccactacatcaccacctatgaggagtaccaggcccagagatatgaagctgccagcaccatctacggcccccacaccctgagcgcctacatccagctgttcaggaacctggccaaggccatcgccacagacacagtggccaacctgagccggggccctgagccccccttcttcaagcagctgattgtgcccctcatccccagcatcgtggaccgggcccccaagggccgcacctttggagatgtgctgcagcctgccaagccagagtacagagtgggggaggtggccgaggtgatctttgtgggcgccaaccccaagaacagcgtgcagaaccagacccaccagaccttcctgactgtggagaagtatgaggccaccagcacctcctggcagatcgtgtgcaatgatgcctcctgggagacccgcttctactggcacaagggcctgctgggcctgagcaatgccaccgtggagtggcacatcccagacacagcccagcccggcatctaccgcatccgctacttcggccacaacaggaagcaggacatcctgaagccagctgtgatcctgagctttgagggcaccagccctgcctttgaggtggtgaccatctag

SEQ ID NO: 55772 - DNA, 2238 bp, Artificial Sequence
  derived and/or modified sequence
atggccaagaggaccttcagcaacctggagaccttcctgatcttcctgctggtgatgatgtctgccatcaccgtggccctgctgagcctgctcttcatcaccagcggcaccatcgagaaccacaaggacctgggcggccacttcttcagcaccacccagagccccccagccacccagggcagcacagctgcccagaggagcacagccacccagcacagcacagccacccagagcagcacagccacccagaccagccctgtgcccctgaccccagagagccccctcttccagaacttcagcggctaccacatcggcgtgggccgggctgactgcaccggccaggtggccgacatcaacctgatgggctacggcaagagcggccagaatgcccagggcatcctgacccggctgtacagccgggccttcatcatggccgagccagatggcagcaacagaacagtgtttgtgtccattgacatcggcatggtgtcccagaggctgcggctggaggtgctgaaccggctgcagagcaaatatggcagcctgtaccgccgggacaacgtcatcctgagcggcacccacacccacagcggccctgctggctacttccagtacacagtgtttgtgattgccagcgagggcttcagcaaccagaccttccagcacatggtgacaggcatcctgaagagcattgatattgcccacaccaacatgaagccaggcaagatcttcatcaacaagggaaatgtggatggagtgcagatcaacagaagcccctacagctacctgcagaacccccagagcgagcgggcccgctacagcagcaacacagacaaggagatgattgtgctgaagatggtggacctgaatggagatgacctgggcctcatctcctggtttgccatccaccctgtgtccatgaacaacagcaaccacctggtgaacagcgacaacgtgggctacgccagctacctgctggagcaggagaagaacaagggctacctgcccggccagggcccctttgtggccgcctttgccagcagcaacctgggagatgtgagccccaacatcctgggcccccgctgcatcaacacaggagagagctgtgacaatgccaacagcacctgccccatcggcggccccagcatgtgcatcgccaagggccctggccaggacatgtttgacagcacccagatcatcggccgggccatgtaccagagggccaagagcaagacctgcaagccagccctgggctacagctttgctgctggcaccattgatggagtgggcggcctgaacttcacccagggcaagacagaaggagaccccttctgggacaccatccgggaccagatcctgggcaagcccagcgaggagatcaaggagtgccacaagcccaagcccatcctgctgcacactggagagctgagcaagccccacccctggcacccagacatcgtggatgtgcagatcatcaccctgggcagcctggccatcacagccatccctggagagttcaccaccatgagcggccggcggctgcgggaggccgtgcaggccgagtttgccagccacggcatgcagaacatgacagtggtgatcagcggcctgtgcaatgtgtacacccactacatcaccacctatgaggagtaccaggcccagagatatgaggccgccagcaccatctacggcccccacaccctgagcgcctacatccagctgttcaggaacctggccaaggccatcgccacagacacagtggccaacctgagccggggccctgagccccccttcttcaagcagctgattgtgcccctcatccccagcatcgtggaccgggcccccaagggccgcacctttggagatgtgctgcagcctgccaagccagagtacagagtgggggaggtggccgaggtgatctttgtgggcgccaaccccaagaacagcgtgcagaaccagacccaccagaccttcctgactgtggagaagtatgaggccaccagcacctcctggcagatcgtgtgcaatgatgcctcctgggagacccgcttctactggcacaagggcctgctgggcctgagcaatgccaccgtggagtggcacatcccagacacagcccagcccggcatctaccgcatccgctacttcggccacaacaggaagcaggacatcctgaagccagctgtgatcctgagctttgagggcaccagccctgcctttgaggtggtgaccatctag

SEQ ID NO: 55773 - DNA, 2184 bp, Artificial Sequence
  derived and/or modified sequence
atgagtgccatcacagtggcccttctcagcctcttgtttatcaccagtgggaccattgaaaaccacaaagatttaggaggccattttttttcaaccacccaaagccctccagccacccagggctccacagctgcccaacgctccacagccacccagcattccacagccacccagagctccacagccactcaaacttctccagtgcctttaaccccagagtctcctctatttcagaacttcagtggctaccatattggtgttggacgagctgactgcacaggacaagtagcagatatcaatttgatgggctatggcaaatccggccagaatgcacagggcatcctcaccaggctatacagtcgtgccttcatcatggcagaacctgatgggtccaatcgaacagtgtttgtcagcatcgacataggcatggtatcacaaaggctcaggctggaggtcctgaacagactgcagagtaaatatggctccctgtacagaagagataatgtcatcctgagtggcactcacactcattcaggtcctgcaggatatttccagtataccgtgtttgtaattgccagtgaaggatttagcaatcaaacttttcagcacatggtcactggtatcttgaagagcattgacatagcacacacaaatatgaaaccaggcaaaatcttcatcaataaaggaaatgtggatggtgtgcagatcaacagaagtccgtattcttaccttcaaaatccgcagtcagagagagcaaggtattcttcaaatacagacaaggaaatgatagttttgaaaatggtagatttgaatggagatgacttgggccttatcagctggtttgccatccacccggtcagcatgaacaacagtaaccatcttgtaaacagtgacaatgtgggctatgcatcttacctgcttgagcaagagaagaacaaaggatatctacctggacaggggccatttgtagcagcctttgcttcatcaaacctaggagatgtgtcccccaacattcttggaccacgttgcatcaacacaggagagtcctgtgataacgccaatagcacttgtcccattggtgggcctagcatgtgcattgctaagggacctggacaggatatgtttgacagcacacaaattataggacgggccatgtatcagagagcaaagtcaaaaacatgtaaaccagcattgggctacagttttgcagctggcactattgatggagttggaggcctcaattttacacaggggaaaacagaaggggatccattttgggacaccattcgggaccagatcctgggaaagccatctgaagaaattaaagaatgtcataaaccaaagcccatccttcttcacaccggagaactatcaaaacctcacccctggcatccagacattgttgatgttcagattattacccttgggtccttggccataactgccatccccggggagtttacgaccatgtctggacgaagacttcgagaggcagttcaagcagaatttgcatctcatgggatgcagaacatgactgttgttatttcaggtctatgcaacgtctatacacattacattaccacttatgaagaataccaggctcagcgatatgaggcagcatcgacaatttatggaccgcacacattatctgcttacattcagctcttcagaaaccttgctaaggctattgctacggacacggtagccaacctgagcagaggtccagaacctccctttttcaaacaattaatagttccattaattcctagtattgtggatagagcaccaaaaggcagaactttcggggatgtcctgcagccagcaaaacctgaatacagagtgggggaagttgctgaagttatatttgtaggtgctaacccgaagaattcagtacaaaaccagacccatcagaccttcctcactgtggagaaatatgaggctacttcaacatcgtggcagatagtgtgtaatgatgcctcctgggagactcgtttttattggcacaagggactcctgggtctgagtaatgcaacagtggaatggcatattccagacactgcccagcctggaatctacagaataagatattttggacacaatcggaagcaggacattctgaagcctgctgtcatactttcatttgaaggcacttccccggcttttgaagttgtaactatttagtga

SEQ ID NO: 55774 - DNA, 2311 bp, Artificial Sequence
  derived and/or modified sequence
atggccaaacgcaccttctctaacttggagacattcctgattttcctccttgtaatgatgagtgccatcacagtggcccttctcagcctcttgtttatcaccagtgggaccattgaaaaccacaaagatttaggaggccattttttttcaaccacccaaagccctccagccacccagggctccacagctgcccaacgctccacagccacccagcattccacagccacccagagctccacagccactcaaacttctccagtgcctttaaccccagagtctcctctatttcagaacttcagtggctaccatattggtgttggacgagctgactgcacaggacaagtagcagatatcaatttgatgggctatggcaaatccggccagaatgcacagggcatcctcaccaggctatacagtcgtgccttcatcatggcagaacctgatgggtccaatcgaacagtgtttgtcagcatcgacataggcatggtatcacaaaggctcaggctggaggtcctgaacagactgcagagtaaatatggctccctgtacagaagagataatgtcatcctgagtggcactcacactcattcaggtcctgcaggatatttccagtataccgtgtttgtaattgccagtgaaggatttagcaatcaaacttttcagcacatggtcactggtatcttgaagagcattgacatagcacacacaaatatgaaaccaggcaaaatcttcatcaataaaggaaatgtggatggtgtgcagatcaacagaagtccgtattcttaccttcaaaatccgcagtcagagagagcaaggtattcttcaaatacagacaaggaaatgatagttttgaaaatggtagatttgaatggagatgacttgggccttatcagctggtttgccatccacccggtcagcatgaacaacagtaaccatcttgtaaacagtgacaatgtgggctatgcatcttacctgcttgagcaagagaagaacaaaggatatctacctggacaggggccatttgtagcagcctttgcttcatcaaacctaggagatgtgtcccccaacattcttggaccacgttgcatcaacacaggagagtcctgtgataacgccaatagcacttgtcccattggtgggcctagcatgtgcattgctaagggacctggacaggatatgtttgacagcacacaaattataggacgggccatgtatcagagagcaaagtcaaaaacatgtaaaccagcattgggctacagttttgcagctggcactattgatggagttggaggcctcaattttacacaggggaaaacagaaggggatccattttgggacaccattcgggaccagatcctgggaaagccatctgaagaaattaaagaatgtcataaaccaaagcccatccttcttcacaccggagaactatcaaaacctcacccctggcatccagacattgttgatgttcagattattacccttgggtccttggccataactgccatccccggggagtttacgaccatgtctggacgaagacttcgagaggcagttcaagcagaatttgcatctcatgggatgcagaacatgactgttgttatttcaggtctatgcaacgtctatacacattacattaccacttatgaagaataccaggctcagcgatatgaggcagcatcgacaatttatggaccgcacacattatctgcttacattcagctcttcagaaaccttgctaaggctattgctacggacacggtagccaacctgagcagaggtccagaacctccctttttcaaacaattaatagttccattaattcctagtattgtggatagagcaccaaaaggcagaactttcggggatgtcctgcagccagcaaaacctgaatacagagtgggggaagttgctgaagttatatttgtaggtgctaacccgaagaattcagtacaaaaccagacccatcagaccttcctcactgtggagaaatatgaggctacttcaacatcgtggcagatagtgtgtaatgatgcctcctgggagactcgtttttattggcacaagggactcctgggtctgagtaatgcaacagtggaatggcatattccagacactgcccagcctggaatctacagaataagatattttggacacaatcggaagcaggacattctgaagcctgctgtcatactttcatttgaaggcacttccccggcttttgaagttgtaactatttagtgaaaagttgatagatcatttaaagaacagctttactctctacacattatataagtgatttcaaatgaatgtg

SEQ ID NO: 55775 - DNA, 2181 bp, Artificial Sequence
  derived and/or modified sequence
atgagcgccatcaccgtggccctgctgagcctgctgttcatcaccagcggaactatcgagaatcataaggacttgggggggcacttcttcagcaccacacaatctccccctgctacacaaggaagtactgccgcccagcggagtaccgctacccaacacagcaccgcaacccagtcatccacggccactcagacaagtcccgtgcctctcaccccggagtctccgctgttccaaaatttcagtggctaccacattggtgtcggtagagcagactgtaccggacaggtagctgacatcaatctgatgggatacggcaagtcgggccagaacgcgcaagggatcctcacccgcctgtactcccgcgcgtttatcatggctgaaccagatggatccaaccgaaccgtgttcgtgtccatagatatcggaatggtgtcacaacgcctccgactcgaggttctgaatcggcttcagtccaaatacggtagcctctacagacgtgacaatgtcattctgtcggggactcatacacactctggtcctgcagggtactttcaatacacagtatttgtcatcgccagcgaggggttctctaatcaaaccttccaacacatggttactggaatcctaaaatcaatcgacatcgcgcacactaacatgaaaccgggtaaaatcttcatcaacaaagggaacgtcgatggtgttcagattaatcggtctccctatagctatctgcaaaacccacagagcgagcgagccaggtactctagcaatactgataaggaaatgattgtactgaaaatggtggatttaaatggcgacgacctaggcctgatctcatggttcgctattcatccagtgtctatgaacaattccaaccatttggttaactctgataatgtgggctacgccagttatctcctggagcaggaaaagaacaagggatacctgccaggtcagggaccgtttgtggctgcattcgcttcctcaaatctgggagacgtgtctccgaatatactcggtccacgttgtatcaatacaggcgagagttgcgacaatgcaaattccacgtgtccaatcgggggtccatctatgtgcattgctaaagggcccgggcaggatatgtttgactcaacccaaatcattggtagagccatgtatcagagggccaaatcgaagacatgcaagccagctctaggatacagttttgccgccggcacaatcgacggcgtgggcggcctcaatttcactcagggcaagacagagggcgaccccttttgggacacaatccgggaccagattctgggcaagcccagcgaggagatcaaggaatgtcacaagcctaagcccatcctgctgcacaccggagaactcagtaaaccacatccatggcatcccgacattgttgatgtgcaaataataaccttgggaagcctggccatcacagctattccaggcgaatttactactatgagtggaagaagattacgtgaggccgtccaggcggaatttgctagccacggcatgcaaaatatgactgtggtcatctccggcctctgtaacgtttacacccactatattactacatacgaggagtaccaggcacaacgctacgaggctgccagcaccatctacggccctcatacgttgtcagcctacatacaacttttccggaatctggcaaaggcaattgcgaccgacacggtggccaacctgtctaggggccccgagcctccttttttcaaacaactcatcgttcccctgattccctccatcgtagacagggcaccaaagggcagaacatttggagatgtgcttcagccagccaagccagagtaccgcgtaggagaagttgcagaggtgattttcgtaggcgccaaccccaagaactccgtacagaaccagactcaccagacatttctgaccgttgagaagtatgaagcaacctctacctcatggcagatagtgtgcaatgacgcatcctgggagacccgtttttattggcataaaggcctcctgggtttatcgaacgccacagtggagtggcatatacccgatacagcacagcccggaatatacaggatccgctattttggccataaccgaaagcaggatatacttaaacccgccgtgatcctaagttttgagggaacttcaccagctttcgaggttgtcacaatctag

SEQ ID NO: 55776 - DNA, 2238 bp, Artificial Sequence
  derived and/or modified sequence
atggccaagcggaccttcagcaacctggagaccttcctgatcttcctgttggttatgatgtccgccatcacggtggccctgctgagcttgcttttcatcacatccggcactatcgaaaaccacaaagatttggggggacactttttcagtactactcagtccccacctgctacacaggggagtacagcggcgcaaaggtccactgcaactcagcacagcactgcaacacaatcttccaccgccactcagacgagtccagtgccactgactcccgaaagccccctgtttcagaatttcagcgggtaccacatcggggtagggcgagctgattgtactggccaggtcgcggacattaacttgatgggatatggaaaatcaggtcagaacgcacaaggcatcttgacacggctctattcgcgggctttcattatggcagaacccgatggatcaaaccggaccgtttttgttagcatcgatattggcatggtgtcccaacggctgagacttgaggtcttgaatcggctccagtctaaatacggtagtttgtaccggcgcgacaacgtgatactgagcggaacgcatacacatagcgggcccgcaggctactttcagtacacagttttcgtgattgcatcagaaggcttctccaaccaaacatttcagcacatggtcacaggcatactgaagagcatcgatattgctcatacaaatatgaaacccggaaagatcttcataaataaaggcaacgtggatggggtccagattaatcgctcgccatactcttatctgcagaatccccagtccgaaagggcacggtattcaagcaatacagacaaggagatgattgttttgaagatggtcgacctaaatggagatgacctgggcctgattagctggtttgccatacaccccgtctccatgaacaacagcaatcacctggtaaactctgacaacgtcgggtatgcttcctacctcctggagcaagaaaaaaacaaaggctatctcccggggcaggggccttttgtggccgcatttgcctcttcaaacttaggggatgtttcgcccaacatcctgggcccgcgttgcattaataccggtgagtcttgcgataatgcgaattctacatgtcctattggagggccttcaatgtgtatagcgaagggacccggccaggacatgttcgattcaacgcagattatcggaagggccatgtaccaacgtgcaaaatcaaaaacctgcaaaccagctctgggttattccttcgctgccggcaccattgatggagtaggcggtctgaattttacccaggggaaaacggagggcgatcccttttgggataccatcagggatcaaatactggggaagccttccgaagaaatcaaagagtgccataaacccaaaccaatcctccttcacacaggcgagttgtccaaaccccacccttggcatccagacatcgtggacgtgcaaatcatcaccctcgggtccttggccattactgcaattcctggcgaattcacgaccatgtccggtcggcgtctcagggaggctgtgcaagctgagtttgccagccatggcatgcagaacatgacggtggtgatatctggcctgtgtaacgtgtacacccactacattacaacttacgaagagtatcaggcacagagatacgaagctgcatctaccatctacggtccacacacactgagcgcgtacattcagctattcagaaatttggccaaagccatcgcgaccgataccgtggcaaatttatcaagaggacctgagcctccgttctttaaacagctgatagtgccactcataccctccatcgtagaccgagcacccaaggggagaacgttcggagacgtgctccagcctgccaagcctgaatacagagtaggggaggtagccgaagtaatcttcgtgggtgccaaccccaagaatagcgttcagaatcagactcaccagacctttctgacagtcgaaaaatatgaagcaacatccaccagttggcagatcgtatgcaatgatgcgtcttgggagacacgcttctactggcacaagggactccttggtttatcaaatgccacagtcgaatggcatatcccagataccgctcaacctgggatttaccggatccgctatttcgggcacaaccgcaaacaggacattctcaaacctgccgttatcctgtctttcgaagggaccagcccagcttttgaagtcgtcacaatttag

SEQ ID NO: 55777 - DNA, 2181 bp, Artificial Sequence
  derived and/or modified sequence
atgagcgcaattacagtggcactgctcagcctgctcttcattactagcggaactatagaaaaccataaagacctgggagggcatttcttctccacaactcaaagccccccagccacccaaggctcaactgcggctcagcgctctactgctacccagcactccactgctacccagagtagtaccgctacgcaaacgtccccggttcccctgacacccgaatcgcccctgttccagaatttttcagggtaccacattggagtgggccgtgcagattgcacagggcaggtggctgatataaacttgatggggtacggaaaatcaggccagaacgcacaggggattttgacaagactgtactctagagcatttattatggctgagcccgatgggagtaatcgtacagtgtttgtgtccattgacatagggatggtgtcccagcgcctgaggctggaggtacttaataggctgcaatccaagtacggctctctgtaccgcagagacaatgtaatcctgagtggaacccacactcactctggcccagctggctattttcagtacactgtcttcgtcatcgctagcgaaggcttcagcaaccagacctttcagcatatggtaactgggatccttaagtctattgatatcgcgcatactaacatgaaacctggaaagatcttcataaataaaggcaacgtagacggagtacaaattaacaggtctccctactcatacctgcagaaccctcagtccgaaagggctcggtattcctcgaacacagacaaggagatgatagtgctgaagatggttgatctgaacggggacgacttgggcctcattagttggttcgccatccacccggtgtctatgaacaattccaatcatctggttaatagtgacaatgttgggtatgccagctatctgctggagcaagaaaaaaataaaggctacctaccaggccaagggccttttgtggcagcttttgcatcttccaacctgggggacgtgtcccccaatatcctcggccctaggtgcatcaacacgggcgagtcctgtgacaacgcgaactccacgtgcccgatcgggggacctagtatgtgcattgccaaagggcctggacaggacatgtttgattcaacgcagattataggcagagcgatgtatcaacgggcaaaaagcaagacctgcaaacccgcactgggttattcattcgcggctggtacaatagacggggttggaggactgaacttcactcagggaaagacagaaggagatccattttgggacactatccgcgaccagattctgggaaaacctagtgaagaaatcaaggagtgccacaaaccaaagccgatcctcctgcacactggagaattgagcaaaccgcacccatggcacccggacatcgtcgatgtgcagataataactctggggagtttggccatcacggccattccgggagagttcactacgatgtctggtcggcgacttagagaggcggtgcaagctgagttcgccagccacggcatgcaaaacatgacggttgtgatcagcggactctgcaatgtctacacccactatatcaccacctatgaggaatatcaggcccagcggtatgaggcagccagtactatttatggaccccacacgttgagtgcgtatatacagctatttagaaacttagcgaaagccatcgccaccgacacggtagctaatttgtctcgcggtccggaaccaccattctttaaacagctgatcgttccactcataccttctattgtggatagggcgccaaaaggccgtacctttggcgatgttttgcagcctgctaagccagaataccgagtgggagaggttgcagaggtgatttttgtgggagctaacccaaagaactccgttcagaatcagacccatcaaaccttcctgactgtagagaagtatgaagcaacatctacttcctggcagatagtttgtaacgatgcttcttgggagaccaggttttattggcacaaaggcctgttgggcctgtccaatgcaacggtggaatggcatatcccagacaccgcccaaccagggatttacaggataaggtatttcggccacaatcggaagcaagacattctcaagcctgctgttatcctcagcttcgaggggacatcacccgcttttgaggtggtgacaatctag

SEQ ID NO: 55778 - DNA, 2238 bp, Artificial Sequence
  derived and/or modified sequence
atggcgaaaagaacattttccaatctggaaaccttcttgatttttctgctcgttatgatgagtgctatcacggttgcactgctctcactcctgtttataacttctgggactattgagaatcacaaggaccttggcggacattttttttctacaacacagtcccccccagccacacagggctcgactgccgctcagcggtccacggcaacacaacattccacagctactcagtcatcgactgccacccaaacatcccccgtgccgttgactcctgagtcccccttatttcagaacttttcgggatatcatatcggcgtggggcgtgctgactgtacagggcaagtcgctgatataaatctaatgggatatgggaagagcggccaaaatgctcagggtatcctaacccggctttacagtagagccttcattatggcagaacctgatggtagtaatagaactgtcttcgtctctattgatattgggatggtgagccagcggctgaggctggaggtgctgaatcgcttacagtctaagtatgggtccctgtatcggcgtgataacgtgatcctctccgggacccacacccattcggggccagccggttattttcagtacactgtgttcgtgattgcatcagaggggtttagcaatcagacatttcaacacatggtaaccgggatcctgaaaagcattgacatagctcacacgaacatgaagcccggaaagattttcatcaataaagggaacgttgatggagtacagatcaatcgctctccgtatagctatttgcagaatcctcagtcagaacgggctagatactcatccaacaccgataaggaaatgatcgtgttaaagatggtggatttgaacggcgacgatctgggactgattagttggtttgcaatccaccccgtttccatgaataattccaatcatttagtgaacagcgataatgtgggctatgcctcctatttgttggagcaagaaaaaaataaagggtatttacctggccaaggcccatttgtcgctgcctttgcgtccagcaatctcggtgacgttagtccaaacattctggggcctcgatgcatcaataccggagaaagctgcgataatgccaattctacctgtcctatcgggggtccatccatgtgtatagcaaagggccctggacaggacatgtttgactctactcaaatcattgggagagccatgtatcagcgggctaagtcaaaaacatgtaaacccgctctcgggtattcttttgcggctgggaccattgatggcgttggcggattaaattttacgcaaggcaagaccgaaggggatcctttttgggacactattagggatcaaatcttaggcaagcccagcgaagagattaaggaatgccacaaacctaagcccatcctgttgcatacaggggagctgtctaaacctcacccttggcacccggatattgtggatgtccagataatcaccttgggatctctggccattaccgccattcccggtgagttcactaccatgagtggccgacggctgcgggaggccgtgcaggccgagttcgcctcgcacggtatgcaaaacatgactgtggtgatttctggactctgcaacgtctatactcactacattaccacctatgaagagtatcaagcacaacggtacgaagctgcctccaccatctacggtccacataccctctcggcttacatccagctgttcagaaacttggctaaggcaattgctaccgacacggtcgctaacctgagccgcggacctgagcccccattttttaaacagctgatcgtccccctcatacctagcatcgttgatagagcacccaaggggcgaacctttggcgatgtactccaacctgccaaaccagaataccgggtgggagaggtagctgaggtcatctttgtgggtgctaacccgaagaactccgtgcaaaaccagacgcatcagacttttctgaccgtggaaaagtacgaagctacctctacctcatggcagattgtgtgcaatgatgcctcgtgggagacccgtttttattggcataaggggttgttaggactttctaacgccacagtggagtggcatatccctgataccgcccagccaggcatttatagaattaggtatttcgggcataacaggaagcaggacatcctgaaaccagccgtgatcctctccttcgaagggacctcacccgcattcgaagtggtaactatctag

SEQ ID NO: 55779 - protein, 432 aa, Artificial Sequence
  derived and/or modified sequence
MDTEKSGKREFDVRQTPQVNINPFTPDSLLLHSSGQCRRRKRTYWNDSCGEDMEASDYELEDETRPAKRITITESNMKSRYTTEFHELEKIGSGEFGSVFKCVKRLDGCIYAIKRSKKPLAGSVDEQNALREVYAHAVLGQHSHVVRYFSAWAEDDHMLIQNEYCNGGSLADAISENYRIMSYFKEAELKDLLLQVGRGLRYIHSMSLVHMDIKPSNIFISRTSIPNAASEEGDEDDWASNKVMFKIGDLGHVTRISSPQVEEGDSRFLANEVLQENYTHLPKADIFALALTVVCAAGAEPLPRNGDQWHEIRQGRLPRIPQVLSQEFTELLKVMIHPDPERRPSAMALVKHSVLLSASRKSAEQLRIELNAEKFKNSLLQKELKKAQMAKAAAEERALFTDRMATRSTTQSNRTSRLIGKKMNRSVSLTIY

SEQ ID NO: 55780 - DNA, 1299 bp, Artificial Sequence
  derived and/or modified sequence
atggacaccgagaagagcggcaagagagagttcgacgtgagacagaccccccaggtgaacatcaaccccttcacccccgacagcctgctgctgcacagcagcggccagtgcagaagaagaaagagaacctactggaacgacagctgcggcgaggacatggaggccagcgactacgagctggaggacgagaccagacccgccaagagaatcaccatcaccgagagcaacatgaagagcagatacaccaccgagttccacgagctggagaagatcggcagcggcgagttcggcagcgtgttcaagtgcgtgaagagactggacggctgcatctacgccatcaagagaagcaagaagcccctggccggcagcgtggacgagcagaacgccctgagagaggtgtacgcccacgccgtgctgggccagcacagccacgtggtgagatacttcagcgcctgggccgaggacgaccacatgctgatccagaacgagtactgcaacggcggcagcctggccgacgccatcagcgagaactacagaatcatgagctacttcaaggaggccgagctgaaggacctgctgctgcaggtgggcagaggcctgagatacatccacagcatgagcctggtgcacatggacatcaagcccagcaacatcttcatcagcagaaccagcatccccaacgccgccagcgaggagggcgacgaggacgactgggccagcaacaaggtgatgttcaagatcggcgacctgggccacgtgaccagaatcagcagcccccaggtggaggagggcgacagcagattcctggccaacgaggtgctgcaggagaactacacccacctgcccaaggccgacatcttcgccctggccctgaccgtggtgtgcgccgccggcgccgagcccctgcccagaaacggcgaccagtggcacgagatcagacagggcagactgcccagaatcccccaggtgctgagccaggagttcaccgagctgctgaaggtgatgatccaccccgaccccgagagaagacccagcgccatggccctggtgaagcacagcgtgctgctgagcgccagcagaaagagcgccgagcagctgagaatcgagctgaacgccgagaagttcaagaacagcctgctgcagaaggagctgaagaaggcccagatggccaaggccgccgccgaggagagagccctgttcaccgacagaatggccaccagaagcaccacccagagcaacagaaccagcagactgatcggcaagaagatgaacagaagcgtgagcctgaccatctactag

SEQ ID NO: 55781 - DNA, 1299 bp, Artificial Sequence
  derived and/or modified sequence
atggacaccgagaagagtggcaaacgagaatttgacgtcagacagaccccccaggtcaacatcaatccattcacccctgactcgctgttactgcactccagtggacaatgcagacgcaggaaaagaacttactggaatgactcttgtggcgaagatatggaggctagcgattacgaactcgaagatgagactcggcctgcaaagcgtattacaatcacagagagtaatatgaaaagtagatataccactgagtttcacgagctggagaaaattggatccggagagttcggcagcgtgtttaaatgtgtgaaaagactcgacggctgcatttacgccataaaaagaagcaagaagccactagccggatccgtcgatgagcagaacgccttgcgtgaggtgtacgcccatgctgtgttggggcagcatagccatgttgtgcgctactttagtgcgtgggcagaagatgaccatatgcttattcaaaatgagtattgtaacgggggttcccttgccgatgctatcagcgaaaattaccgcatcatgagttactttaaggaggcagagctcaaggacctgctgctgcaggtcggacgcgggctgagatacatccactcgatgagtctggttcatatggacatcaaaccaagtaacatattcatttccaggactagcattccaaatgccgcgtccgaggagggggacgaggatgattgggcatcaaataaagtaatgtttaagataggggacctggggcacgtgactagaatttcgtcaccccaggttgaagagggcgacagcaggttccttgcgaatgaggtactgcaggagaattacacacacctgcccaaagctgatattttcgctctggccctaaccgttgtgtgcgccgccggcgccgaaccactaccacgcaacggtgatcagtggcacgagattcgtcaggggagactgccccggataccacaggtactgtctcaggagttcaccgaattactgaaagtgatgatccacccagatcccgagcgcaggccttctgcaatggccctagtaaagcattcagtacttttgtcggcctcacgcaaatctgcggagcagctccggattgagcttaatgccgagaaatttaagaattccctactgcagaaggagttgaaaaaagcgcagatggccaaggcagctgctgaggagagggccctttttaccgaccgcatggccacacggtccacaacccaatccaataggacatcccggcttatcggtaagaaaatgaatcgaagcgtgtcactgacaatctattag

SEQ ID NO: 55782 - DNA, 1299 bp, Artificial Sequence
  derived and/or modified sequence
atggacacagagaagagcggcaagcgggagtttgatgtgcggcagaccccccaggtgaacatcaaccccttcaccccagacagcctgctgctgcacagcagcggccagtgcagaagaaggaagaggacctactggaatgacagctgtggggaggacatggaggccagtgactatgagctggaggatgagaccaggcctgccaagaggatcaccatcacagagagcaacatgaagagccgctacaccacagagttccacgagctggagaagattggcagcggggagtttggcagcgtcttcaagtgtgtgaagaggctggatggctgcatctatgccatcaagaggagcaagaagcccctggccggctctgtggatgagcagaatgccctgcgggaggtgtatgcccatgctgtgctgggccagcacagccacgtggtgcgctacttcagcgcctgggccgaggatgaccacatgctgatccagaatgagtactgcaatggaggcagcctggctgatgccatcagcgagaactaccgcatcatgagctacttcaaggaggccgagctgaaggacctgctgctgcaggtgggccggggcctgcgctacatccacagcatgagcctggtgcacatggacatcaagcccagcaacatcttcatcagcaggaccagcatccccaatgctgccagcgaggagggagatgaagatgactgggccagcaacaaggtgatgttcaagattggagacctgggccacgtgacccgcatcagcagcccccaggtggaggagggggacagccgcttcctggccaatgaggtgctgcaggagaactacacccacctgcccaaggctgacatctttgccctggccctgactgtggtgtgtgccgccggggctgagcccctgcccagaaatggagaccagtggcatgagatccggcagggccgcctgccccgcatcccccaggtgctgagccaggagttcacagagctgctgaaggtgatgatccacccagaccctgagcggcggcccagcgccatggccctggtgaagcacagcgtgctgctgagcgccagcaggaagtctgctgagcagctgcgcatcgagctgaatgctgagaagttcaagaacagcctgctgcagaaggagctgaagaaggcccagatggccaaggctgctgctgaggagcgggccctcttcacagacaggatggccaccaggagcaccacccagagcaacagaaccagccggctgattggcaagaagatgaacagatctgtgtccctgaccatctactag

SEQ ID NO: 55783 - DNA, 1299 bp, Artificial Sequence
  derived and/or modified sequence
atggacaccgagaagagcggcaagcgggagttcgacgtgcggcagactccccaggtgaacattaatccttttacgccagatagcttgttgttgcacagctctggccagtgtcggcggagaaagcgaacctattggaatgacagctgtggagaagatatggaggccagcgactacgaactggaagacgaaacccggccagctaaacgcattacaattaccgaatctaatatgaaatctaggtatactactgaattccacgagctcgagaagatagggagcggcgagtttggctctgtgttcaagtgcgtgaagcgcctggacggatgtatatatgccatcaagagatcaaagaaacctctggcgggatctgtcgacgaacagaatgctctgagagaagtttacgcccatgccgtcctcggccagcattcccatgtagtaaggtatttctccgcctgggccgaggatgatcacatgctcattcaaaacgaatattgtaatggcggctcgctggctgacgcgatttccgagaattatcggattatgtcctacttcaaggaagccgagctgaaggacctgctgctgcaagtcggccgcggcctgcgttatatccactccatgagcctggttcacatggatattaagcctagtaatatcttcatcagcaggaccagtatcccaaacgcagcctccgaggagggtgatgaagacgattgggcctccaataaagttatgttcaagattggagatttgggacatgtcaccagaatctcctcaccccaggttgaagagggggatagcagattccttgcaaatgaggtgctgcaggaaaattacactcacctccctaaggccgacattttcgcactggctctgactgtagtttgcgccgccggggccgaacccctgcccaggaacggggatcagtggcacgagattcgccagggaaggctgcccagaattccgcaagttctctctcaagaattcactgagctcctcaaggtcatgatacatcccgatccagagcgtaggccgtcagctatggcactggtgaaacacagtgtactcctgtctgctagcagaaagagtgcagagcagctccgaatcgaactgaacgccgaaaaattcaagaactctctcttgcaaaaagagctaaagaaagcccagatggcaaaagccgccgccgaggagcgtgctctattcacagacagaatggctacacggtcaaccacacagtctaacagaacgagcaggctgatcggcaagaaaatgaatagatcagtatcactcactatctactag

SEQ ID NO: 55784 - DNA, 1299 bp, Artificial Sequence
  derived and/or modified sequence
atggacactgaaaaaagcggcaaaagagagttcgatgtacgccaaacacctcaagtgaacataaaccccttcacccccgatagcctgctgctccactcatccggccagtgtcgcagacgcaagaggacctattggaacgacagctgcggcgaagacatggaggcctccgattatgagctcgaggatgaaacccgtcctgccaagcgcattacaatcactgagagcaacatgaaatctaggtacactacggagttccacgaactggagaagattggctccggcgagttcggttcggtgtttaagtgtgtcaaaaggctggacgggtgcatctacgctattaagcgcagcaaaaagcctctggctggaagcgtggacgagcagaatgcccttcgagaggtttacgcacatgccgttctcggacaacactcacacgtggtgcgctacttttctgcgtgggcagaggacgatcacatgttgattcaaaatgaatattgtaatgggggttcactggccgatgctatatccgagaactatcgtattatgtcatacttcaaggaagcggaacttaaggacctgctcttgcaagttggacgcggactgaggtacatccattctatgtcactggtccacatggacatcaagccttccaacattttcatcagccgcactagcatcccaaatgctgcctctgaggaaggcgacgaggacgattgggcatcgaacaaagtgatgttcaagatcggggatctgggtcacgtgacgaggatctcttcaccccaggtcgaagagggagacagcaggttccttgccaatgaagttcttcaggaaaattacacacacctgccaaaggctgatatctttgccctcgccctgactgtggtctgtgcagccggagcagagccccttccaaggaacggggaccaatggcatgaaattcgtcaaggcaggctgcctcggataccgcaggtgttgtcccaagaatttaccgaactgctgaaagtcatgattcatccagacccagagagacggccttcagccatggctctagtgaagcactccgttctgctctctgcttctcgcaagagtgccgaacagctgaggatcgagctgaatgcagaaaagtttaaaaactctctattgcaaaaagagctcaaaaaggcccagatggcaaaggcagcagcggaggaaagagcactgtttacggacaggatggctaccaggtccacgacacagtcaaaccggacctctcggcttataggtaagaagatgaatcgcagtgttagtttaacaatttattag

SEQ ID NO: 55785 - protein, 377 aa, Artificial Sequence
  derived and/or modified sequence
MRKKWKMGGMKYIFSLLFFLLLEGGKTEQVKHSETYCMFQDKKYRVGERWHPYLEPYGLVYCVNCICSENGNVLCSRVRCPNVHCLSPVHIPHLCCPRCPGDGELSWEHSDGDIFRQPANREARHSYHRSHYDPPPSRQAGGLSRFPGARSHRGALMDSQQASGTIVQIVINNKHKHGQVCVSNGKTYSHGESWHPNLRAFGIVECVLCTCNVTKQECKKIHCPNRYPCKYPQKIDGKCCKVCPGKKAKELPGQSFDNKGYFCGEETMPVYESVFMEDGETTRKIALETERPPQVEVHVWTIRKGILQHFHIEKISKRMFEELPHFKLVTRTTLSQWKIFTEGEAQISQMCSSRVCRTELEDLVKVLYLERSEKGHC

SEQ ID NO: 55786 - protein, 378 aa, Artificial Sequence
  derived and/or modified sequence
MRKKWKMGGMKYIFSLLFFLLLEGGKTEQVKHSETYCMFQDKKYRVGERWHPYLEPYGLVYCVNCICSENGNVLCSRVRCPNVHCLSPVHIPHLCCPRCPGDGELSWEHSDGDIFRQPANREARHSYHRSHYDPPPSRQAGGLSRFPGARSHRGALMDSQQASGTIVQIVINNKHKHGQVCVSNGKTYSHGESWHPNLRAFGIVECVLCTCNVTKQECKKIHCPNRYPCKYPQKIDGKCCKVCPGKKAKEELPGQSFDNKGYFCGEETMPVYESVFMEDGETTRKIALETERPPQVEVHVWTIRKGILQHFHIEKISKRMFEELPHFKLVTRTTLSQWKIFTEGEAQISQMCSSRVCRTELEDLVKVLYLERSEKGHC

SEQ ID NO: 55787 - DNA, 1134 bp, Artificial Sequence
  derived and/or modified sequence
atgaggaagaagtggaaaatgggtggcatgaaatatatcttctccctgctgttttttctgctgctcgaaggtggcaagaccgaacaagtgaaacactctgaaacgtactgtatgttccaggataagaaatatagagtcggagagcgctggcacccgtatctggaaccctacggactggtttattgtgtcaactgtatctgttccgaaaacgggaacgtgctttgctcaagggtgagatgtccaaatgtccactgtctgagccccgtgcacatcccccacttatgctgtcccaggtgtcctggtgacggggaactgagttgggagcactctgacggtgatatcttcagacagccagccaatcgggaggcccgacacagctaccaccggagccactatgatccacctccatcgcgacaggcaggtggcctttccagattcccgggcgcccggagccaccgcggcgccctgatggattctcagcaggcctcaggcaccatcgtccagattgttatcaacaataaacacaaacacgggcaggtgtgtgtaagtaatggaaagacctattctcacggggaaagttggcacccaaatttgcgcgcgttcggaattgtggagtgtgtcctgtgtacttgtaacgtcaccaaacaggaatgtaaaaaaatacattgccccaaccggtatccctgcaagtacccccagaagatcgacggcaaatgttgcaaagtctgccctggcaagaaggccaaggaactccctggtcagtctttcgataataaaggctacttctgtggcgaggagacaatgccagtttatgaatcagtgtttatggaagacggagagaccactcggaaaatcgcacttgagacagagaggcctcctcaggtggaggtgcatgtgtggacaatcaggaagggtattctgcagcattttcacatcgaaaaaatcagtaagcggatgttcgaagagttaccacactttaaactggtaacacgcacgactttgtctcaatggaaaatttttacggaaggagaggctcaaatctctcaaatgtgttctagcagggtgtgcagaacagaattagaggatctcgttaaggtgctgtatctggaacgcagtgagaagggtcattgctag

SEQ ID NO: 55788 - DNA, 1137 bp, Artificial Sequence
  derived and/or modified sequence
atgcgtaaaaagtggaagatgggaggcatgaagtacatattttctctcctgttctttttattgctcgaaggaggaaagactgagcaagtgaagcactccgaaacttattgcatgtttcaggataagaaatatagggtcggggagaggtggcatccatacctcgaaccttacgggctggtatattgtgttaactgcatttgcagtgaaaacgggaacgttctttgttccagggtgaggtgccccaatgttcactgtctgagtcctgtccacatccctcacctgtgttgtccacgatgtcctggagatggggagctgtcatgggagcactctgacggggatatttttcgtcagccagccaatagagaggcccgccattcctaccatagatctcattacgacccacctcccagtcggcaggcaggcggactttccagatttcccggcgcaaggtctcaccgcggggcgttgatggactctcagcaagccagcgggacgattgtccaaatcgttatcaataataaacacaaacatggacaggtatgcgtaagcaatggtaagacatactcccacggcgagtcttggcaccctaatcttcgcgcctttggaattgtagaatgcgtgttgtgcacctgtaacgttacgaaacaggagtgcaagaaaatacattgtcctaaccggtacccttgcaagtacccccagaaaattgacgggaaatgctgtaaggtgtgcccggggaagaaagccaaagaggaactgccggggcagagcttcgacaacaaggggtacttctgtggtgaggagacgatgcctgtgtatgaatcagtctttatggaagacggcgagactaccaggaagatagctctcgagaccgaacggcccccccaggtggaggttcatgtatggacgattaggaaggggatacttcaacacttccatattgagaaaatctctaagcgtatgtttgaagagctcccacatttcaagttggtgacacgcacgaccctttctcagtggaagatctttacagaaggcgaggctcaaatatcccagatgtgcagctcaagagtgtgtcgcactgagttagaggatctcgtaaaggttctgtacctggagcggtcagagaaggggcattgctag

SEQ ID NO: 55789 - DNA, 1134 bp, Artificial Sequence
  derived and/or modified sequence
atgaggaagaagtggaagatgggcggcatgaagtacatcttcagcctgctcttcttcctgctgctggagggcggcaagacagagcaggtgaagcacagcgagacctactgcatgttccaggacaagaagtacagagtgggggagcgctggcacccctacctggagccctacggcctggtgtactgtgtgaactgcatctgcagtgaaaatggaaatgtgctgtgcagccgggtgcgctgccccaacgtgcactgcctgagccctgtgcacatcccccacctgtgctgcccccgctgccctggagatggagagctgtcctgggagcacagtgatggagacatcttccggcagcctgccaaccgggaggcccggcacagctaccacaggagccactatgaccccccacccagccggcaggccggcggcctgagccgcttccctggggcccggagccacagaggagccctgatggacagccagcaggccagcggcaccatcgtgcagatcgtcatcaacaacaagcacaagcacggccaggtgtgtgtgtccaatggcaagacctacagccacggggagagctggcaccccaacctgcgggcctttggaattgtggagtgtgtgctgtgcacctgcaatgtgaccaagcaggagtgcaagaagatccactgccccaaccgctacccctgcaagtacccccagaagattgatggcaagtgctgcaaggtgtgccctgggaagaaggccaaggagctgcccggccagagctttgacaacaagggctacttctgtggggaggagaccatgcctgtgtatgaatctgtgttcatggaggatggagagaccaccaggaagatcgccctggagacagagcggcccccccaggtggaggtgcacgtgtggaccatcaggaagggcatcctgcagcacttccacatcgagaagatcagcaagaggatgtttgaggagctgccccacttcaagctggtgaccaggaccaccctgagccagtggaagatcttcacagaaggagaggcccagatcagccagatgtgcagcagccgggtgtgcaggacagagctggaggacctggtgaaggtgctgtacctggagaggtctgagaagggccactgctag

SEQ ID NO: 55790 - DNA, 1137 bp, Artificial Sequence
  derived and/or modified sequence
atgaggaagaagtggaagatgggcggcatgaagtacatcttcagcctgctcttcttcctgctgctggagggcggcaagacagagcaggtgaagcacagcgagacctactgcatgttccaggacaagaagtacagagtgggggagcgctggcacccctacctggagccctacggcctggtgtactgtgtgaactgcatctgcagtgaaaatggaaatgtgctgtgcagccgggtgcgctgccccaacgtgcactgcctgagccctgtgcacatcccccacctgtgctgcccccgctgccctggagatggagagctgtcctgggagcacagtgatggagacatcttccggcagcctgccaaccgggaggcccggcacagctaccacaggagccactatgaccccccacccagccggcaggccggcggcctgagccgcttccctggggcccggagccacagaggagccctgatggacagccagcaggccagcggcaccatcgtgcagatcgtcatcaacaacaagcacaagcacggccaggtgtgtgtgtccaatggcaagacctacagccacggggagagctggcaccccaacctgcgggcctttggaattgtggagtgtgtgctgtgcacctgcaatgtgaccaagcaggagtgcaagaagatccactgccccaaccgctacccctgcaagtacccccagaagattgatggcaagtgctgcaaggtgtgccctgggaagaaggccaaggaggagctgcccggccagagctttgacaacaagggctacttctgtggggaggagaccatgcctgtgtatgagagcgtcttcatggaggatggagagaccaccaggaagatcgccctggagacagagaggcctccccaggtggaggtgcacgtgtggaccatcaggaagggcatcctgcagcacttccacatcgagaagatcagcaagaggatgtttgaggagctgccccacttcaagctggtgaccaggaccaccctgagccagtggaagatcttcacagaaggagaggcccagatcagccagatgtgcagcagccgggtgtgcaggacagagctggaggacctggtgaaggtgctgtacctggagaggtctgagaagggccactgctag

SEQ ID NO: 55791 - DNA, 1134 bp, Artificial Sequence
  derived and/or modified sequence
atgcggaagaagtggaagatgggcggcatgaagtacatcttcagcctcctgtttttcctgctgctcgaaggtggcaagaccgagcaagtcaaacactctgaaacgtattgtatgtttcaggataaaaagtatagggtcggagagaggtggcacccttacttggagccctacgggttggtctactgcgtaaattgtatttgcagcgaaaacggcaacgtcctgtgttctagagtcagatgccctaatgtgcattgcctctcccccgttcacataccacacttgtgctgcccacgatgccccggggacggtgagctcagttgggagcactccgacggagacatcttccggcaaccagcgaaccgggaagctcgtcacagttaccatcgatcgcattacgatccaccacctagtcgtcaggccggaggcctttcccgctttccaggcgccagatcacatagaggggcgctgatggattcacagcaggcgtctggtactatagtacagatagtgattaataataagcacaaacatggccaagtctgcgtgagtaacgggaagacctactcgcacggagaaagctggcaccccaatttacgagccttcggcatcgtcgaatgtgtactttgtacctgcaatgttaccaaacaggaatgtaaaaagatacattgtccgaataggtacccatgcaagtatcctcagaaaatcgacgggaagtgttgtaaggtttgtcccggcaagaaggccaaggagcttccgggacagtcttttgacaataagggttacttctgcggtgaggaaacaatgccagtatacgaatccgtcttcatggaggacggcgagactacgcggaagattgccttggaaacagaacgcccacctcaagtggaagtgcatgtgtggaccataaggaaaggcatcctgcagcacttccatatcgagaagatcagcaagcgcatgttcgaggaacttccccatttcaaacttgttacacggaccactctgagtcagtggaagatctttacagagggagaagcgcagatttcccagatgtgcagtagcagggtctgccgcaccgaattggaggatctggtcaaggtgctgtacctggaaagatccgaaaaggggcactgttag

SEQ ID NO: 55792 - DNA, 1137 bp, Artificial Sequence
  derived and/or modified sequence
atgcggaagaagtggaagatgggcggcatgaagtacatcttcagcttactgtttttcttacttttggagggcggtaaaaccgagcaagtaaagcattccgagacttactgtatgttccaagataagaagtatagggtgggagaaagatggcacccatatctggagccatatggccttgtctattgcgtaaattgcatttgctcagagaatgggaatgtgctgtgctcaagagttcgctgccctaatgtgcactgcctttcacctgttcatataccccatctctgttgcccgcgctgccctggcgacggagaactcagctgggagcactcagacggggatatcttccgacagccggcaaacagagaggccaggcacagctatcacaggtcccattatgacccaccccctagcagacaagcgggcggtctcagtaggtttcctggggcccggtctcaccgtggggccctgatggattcccagcaagctagcggaacaattgtgcagatagtcattaacaacaagcacaaacacggccaggtctgtgtctccaatgggaagacatactcccacggggaatcctggcatcccaacctgagggcctttgggatcgtggagtgtgtgttgtgcacatgcaatgtgactaaacaggagtgcaagaagattcattgtcctaatcgctatccttgtaaatatccacagaagatcgatggcaaatgctgcaaggtttgcccaggcaagaaagccaaagaggaattaccaggccaatcattcgacaataagggatatttctgtggcgaggagacgatgccagtgtacgaatctgtgttcatggaagacggcgagactaccaggaagatcgcactggagacggagcgacctcctcaggtcgaagtccacgtctggaccatccggaagggcatcctgcagcacttccatatcgagaagattagcaaaagaatgttcgaagaactgccgcactttaagctggtcactaggaccactctttcccagtggaagatttttacagagggtgaggcacagatatcccagatgtgttcttctcgtgtatgtaggacagagcttgaggatctggttaaggtgctctacctggagcgctcagagaagggccattgctag

SEQ ID NO: 55793 - DNA, 1134 bp, Artificial Sequence
  derived and/or modified sequence
atgagaaaaaaatggaaaatgggaggaatgaaatacatcttctccctcctgttctttctgctgctcgagggcggaaaaacagagcaggtgaaacacagcgaaacgtactgcatgttccaagataagaaatacagggtgggcgaaagatggcacccatacctggaaccttacggcttagtatattgtgtgaactgcatttgctctgagaatgggaatgtactgtgttcccgagtgcgctgtccgaatgttcattgcttgtctccagtccacatcccccacctttgctgcccacggtgccctggtgacggggagctgtcttgggaacatagtgatggggatatatttcgccagccagccaatcgcgaggccagacacagctatcatcggtcccactatgacccaccgccatcccgccaggccggaggtctcagtcgttttcctggtgccaggtcacatcgtggggcattgatggatagtcagcaagcctcaggcacaatcgtgcagatagtgattaacaacaaacacaagcatggtcaagtttgtgtgagcaacggtaagacatactctcatggcgagagttggcacccaaacttacgcgctttcggcatcgtagaatgcgtcttgtgtacctgtaacgtgacaaagcaagagtgcaaaaaaattcattgccccaacagatacccttgtaagtacccccagaagattgacggaaagtgctgtaaggtatgccctggtaaaaaagccaaggaactgcccggtcaatccttcgacaacaaaggttatttttgtggtgaggagacaatgcccgtgtacgaatcggtttttatggaagatggagaaaccactcggaagattgccctagagaccgaacgcccaccacaagtggaggtacacgtttggaccatcaggaagggcatcctgcagcatttccatattgaaaagattagcaagcgcatgttcgaggagctgccccattttaagctggtgaccagaactacccttagtcaatggaagatcttcacagaaggggaagcccagatttcacagatgtgtagtagcagggtttgtcgaaccgaacttgaagacctcgtgaaagtcctgtatctggagaggtctgagaaaggtcactgctag

SEQ ID NO: 55794 - DNA, 1137 bp, Artificial Sequence
  derived and/or modified sequence
atgcgtaagaagtggaagatgggtgggatgaagtatatcttcagccttcttttttttctactgctcgaaggtggaaagactgaacaagtgaagcactcagagacttactgcatgtttcaggacaagaagtaccgcgtcggggaaaggtggcatccatatttggagccctatgggctggtgtactgcgtgaactgtatctgctctgagaacggaaacgtcctctgtagcagagtgcgatgcccaaatgtccattgcctgagtccagttcatatccctcatttgtgttgcccccgatgcccaggcgacggcgaactctcctgggagcactctgacggggatattttcagacagcccgctaaccgggaagctagacacagctaccatcgatcccattatgacccccctccgtccagacaagccggtggcttgagtcggtttccaggcgctaggtctcaccgcggtgccctgatggactctcagcaggcttcaggcaccatcgtgcagatcgtaatcaacaataagcacaagcacgggcaagtgtgcgtttccaacggcaaaacttattcccatggcgagtcttggcaccccaacttacgtgcgtttgggattgtggagtgcgttttgtgcacgtgcaacgttaccaaacaggagtgcaagaagattcactgtcctaaccgatatccatgtaaatatcctcagaaaatagacggcaagtgctgcaaagtctgtccaggcaaaaaggccaaggaggagttacccggacagagtttcgacaataagggatatttctgcggcgaggaaacaatgcctgtgtatgagtctgttttcatggaggacggagagacaactagaaagattgctctggaaacagagcgtccaccacaggtggaggtccacgtgtggaccattagaaagggcattctgcagcatttccacatagaaaaaatatctaaacgcatgtttgaggagctgccacactttaagctcgttacccgcactacattaagtcagtggaagatcttcacagagggtgaggcccagatcagccagatgtgctcctctagggtgtgtcggaccgaactggaggatctggtgaaagtgctttacctcgagcgaagcgagaaaggccattgctag

SEQ ID NO: 55795 - DNA, 3850 bp, Artificial Sequence
  derived and/or modified sequence
gtgcttgcggacttcccgccagcgccgagcggccggcttctcgggccaagtggggagcgagcgggagggcgggcaggtggccccgggccgccgcgcccgcgccttggctctgcccccgggagccgagcaagccgctgctccctcgtggtgtgagggcggtgatgtttttcctcccacccacttttgagttccccctcccccctcgcgcgcactctagctctcgccacaacctgccagccccagacctcggacgagagcgccccggggagctcggagcgcgtgcacgcgtggcagacggagaaggccagtgcccagcttgaaggttctgtcaccttttgcagtggtccaaatgagaaaaaagtggaaaatgggaggcatgaaatacatcttttcgttgttgttctttcttttgctagaaggaggcaaaacagagcaagtaaaacattcagagacatattgcatgtttcaagacaagaagtacagagtgggtgagagatggcatccttacctggaaccttatgggttggtttactgcgtgaactgcatctgctcagagaatgggaatgtgctttgcagccgagtcagatgtccaaatgttcattgcctttctcctgtgcatattcctcatctgtgctgccctcgctgcccaggagatggagaactgtcatgggaacattctgatggtgatatcttccggcaacctgccaacagagaagcaagacattcttaccaccgctctcactatgatcctccaccaagccgacaggctggaggtctgtcccgctttcctggggccagaagtcaccggggagctcttatggattcccagcaagcatcaggaaccattgtgcaaattgtcatcaataacaaacacaagcatggacaagtgtgtgtttccaatggaaagacctattctcatggcgagtcctggcacccaaacctccgggcatttggcattgtggagtgtgtgctatgtacttgtaatgtcaccaagcaagagtgtaagaaaatccactgccccaatcgatacccctgcaagtatcctcaaaaaatagacggaaaatgctgcaaggtgtgtccaggtaaaaaagcaaaagaacttccaggccaaagctttgacaataaaggctacttctgcggggaagaaacgatgcctgtgtatgagtctgtattcatggaggatggggagacaaccagaaaaatagcactggagactgagagaccacctcaggtagaggtccacgtttggactattcgaaagggcattctccagcacttccatattgagaagatctccaagaggatgtttgaggagcttcctcacttcaagctggtgaccagaacaaccctgagccagtggaagatcttcaccgaaggagaagctcagatcagccagatgtgttcaagtcgtgtatgcagaacagagcttgaagatttagtcaaggttttgtacctggagagatctgaaaagggccactgttaggcaagacagacagtattggatagggtaaagcaagaaaactcaagctgcagctggactgcaggcttattttgcttaagtcaacagtgccctaaaactccaaactcaaatgcagtcaattattcacgccatgcacagcataatttgctcctttgtgtggagtggtgtgtcagcccttgaacatctcctccaaagagactagaagagtcttaaattatatgtgggaggaggagggatagaacatcacaacactgctctagtttcttggagaatcacatttctttacaggttaaagacaaacaagaccccagggtttttatctagaaagttattcaagtgaaagaaagagaagggaattgcttagtaggagttctgcagtatagaacaattacttgtatgaaattatacctttgaattttagaatgtcatgtgttcttttaaaaaaattagctccccatcctccctcctcactccctccctccctccttctctctctctctctctctccctccctctctcacagacacacacacacacacacacacacacacacacacgcacgtccacactcacattaaacgaaagctttatttgaagcaaagctagccaagattctacgttacttttcccttgactggatcccaagtagcttggaagtttttgtgcccaggagagtaaataactgtgaacaagaggctctgcccttaggtctttgtggctgtttaagtcaccaacaatagagtcagggtaaagaataaaaacactttcatagcctcattcattcacttagaagtggtaataatttttccctaatgataccacttttcttttccccctgtacctatgggacttccagaaagaagttaaattgagtaaaatcatcagaaactgaatccatgtaagaaaaaataattgttgaagaaagaagttgatagaattcaaaaaggccatctttttgctttcacatcaataaaatttaccaagtaatagatcagtactcactaatatttttgagaccatagttgtctggtcagaaaaattatattaaattagtaaattctagaagctctttaaaagggaagttttccttcttctccaattataggagttgatttttactttgcaaagtggctcggtcctcatgagcatctgcatgttgactcttcagttaagaaaattgttgttcatttagggaggtggatattctgatgaagatctttatcctaaaccttcctactatccttgtcttattcatcaagcagatattttagtcaagaattccagagaaggctgctcctaaaatgtctacttgcagcccaataccagagcataaactatccattctggggtctggctttagaaatcatctttgtgggaagacctaattcttcacagcaaggatctcaggcatgccttctagatttgttccctctgaggggcaggaatgaactgtagaaatgttttaaggacccagaaaccccatatgtctcattccatgactataggtgagagaattctttcctaagagggtttgataccaataggggaaaatgtaaaatgttcagtctttatgacaacctggcataaaggagtcaattcttatgaaagagacacaagggccttatggccagggtttcttgggacaagactctcaccagcacatcacacacgttctccttggaagagagaagcagtacatcccggttgagaggtcacaaagcattagtttgtgtgtgtgtgtgtgtgtgtgtgtgtgtgtgtgtgtgtgtgtgtgtggtaaaggggggaaggtgttatgcggctgctccctccgtcccagaggtggcagtgattccataatgtggagactagtaactagatcctaaggcaaagaggtgtttctccttctggatgattcatcccaaagccttcccacccaggtgttctctgaaagcttagccttaagagaacacgcagagagtttccctagatatactcctgcctccaggtgctgggacacacctttgcaaaatgctgtgggaagcaggagctggggagctgtgttaagtcaaagtagaaaccctccagtgtttggtgttgtgtagagaataggacatagggtaaagaggccaagctgcctgtagttagtagagaagaatggatgtggttcttcttgtgtatttatttgtatcataaacacttggaacaacaaagaccataagcatcatttagcagttgtagccattttctagttaactcatgtaaacaagtaagagtaacataacagtattaccctttcactgttctcacaggacatgtacctaattatggtacttatttatgtagtcactgtatttctggatttttaaattaataaaaaagttaattttg

SEQ ID NO: 55796 - DNA, 1537 bp, Artificial Sequence
  derived and/or modified sequence
ccagacctcggacgagagcgccccggggagctcggagcgcgtgcacgcgtggcagacggagaaggccagtgcccagcttgaaggttctgtcaccttttgcagtggtccaaatgagaaaaaagtggaaaatgggaggcatgaaatacatcttttcgttgttgttctttcttttgctagaaggaggcaaaacagagcaagtaaaacattcagagacatattgcatgtttcaagacaagaagtacagagtgggtgagagatggcatccttacctggaaccttatgggttggtttactgcgtgaactgcatctgctcagagaatgggaatgtgctttgcagccgagtcagatgtccaaatgttcattgcctttctcctgtgcatattcctcatctgtgctgccctcgctgcccaggagatggagaactgtcatgggaacattctgatggtgatatcttccggcaacctgccaacagagaagcaagacattcttaccaccgctctcactatgatcctccaccaagccgacaggctggaggtctgtcccgctttcctggggccagaagtcaccggggagctcttatggattcccagcaagcatcaggaaccattgtgcaaattgtcatcaataacaaacacaagcatggacaagtgtgtgtttccaatggaaagacctattctcatggcgagtcctggcacccaaacctccgggcatttggcattgtggagtgtgtgctatgtacttgtaatgtcaccaagcaagagtgtaagaaaatccactgccccaatcgatacccctgcaagtatcctcaaaaaatagacggaaaatgctgcaaggtgtgtccaggtaaaaaagcaaaagaagaacttccaggccaaagctttgacaataaaggctacttctgcggggaagaaacgatgcctgtgtatgagtctgtattcatggaggatggggagacaaccagaaaaatagcactggagactgagagaccacctcaggtagaggtccacgtttggactattcgaaagggcattctccagcacttccatattgagaagatctccaagaggatgtttgaggagcttcctcacttcaagctggtgaccagaacaaccctgagccagtggaagatcttcaccgaaggagaagctcagatcagccagatgtgttcaagtcgtgtatgcagaacagagcttgaagatttagtcaaggttttgtacctggagagatctgaaaagggccactgttaggcaagacagacagtattggatagggtaaagcaagaaaactcaagctgcagctggactgcaggcttattttgcttaagtcaacagtgccctaaaactccaaactcaaatgcagtcaattattcacgccatgcacagcataatttgctcctttgtgtggagtggtgtgtcagcccttgaacatctcctccaaagagactagaagagtcttaaattatatgtgggaggaggagggatagaacatcacaacactgctctagtttcttggagaatcacatttctttacaggttaa

SEQ ID NO: 55797 - DNA, 1134 bp, Artificial Sequence
  derived and/or modified sequence
atgagaaagaagtggaagatgggcggcatgaagtacatcttcagcctgctgttcttcctgctgctggagggcggcaagaccgagcaggtgaagcacagcgagacctactgcatgttccaggacaagaagtacagagtgggcgagagatggcacccctacctggagccctacggcctggtgtactgcgtgaactgcatctgcagcgagaacggcaacgtgctgtgcagcagagtgagatgccccaacgtgcactgcctgagccccgtgcacatcccccacctgtgctgccccagatgccccggcgacggcgagctgagctgggagcacagcgacggcgacatcttcagacagcccgccaacagagaggccagacacagctaccacagaagccactacgaccccccccccagcagacaggccggcggcctgagcagattccccggcgccagaagccacagaggcgccctgatggacagccagcaggccagcggcaccatcgtgcagatcgtgatcaacaacaagcacaagcacggccaggtgtgcgtgagcaacggcaagacctacagccacggcgagagctggcaccccaacctgagagccttcggcatcgtggagtgcgtgctgtgcacctgcaacgtgaccaagcaggagtgcaagaagatccactgccccaacagatacccctgcaagtacccccagaagatcgacggcaagtgctgcaaggtgtgccccggcaagaaggccaaggagctgcccggccagagcttcgacaacaagggctacttctgcggcgaggagaccatgcccgtgtacgagagcgtgttcatggaggacggcgagaccaccagaaagatcgccctggagaccgagagacccccccaggtggaggtgcacgtgtggaccatcagaaagggcatcctgcagcacttccacatcgagaagatcagcaagagaatgttcgaggagctgccccacttcaagctggtgaccagaaccaccctgagccagtggaagatcttcaccgagggcgaggcccagatcagccagatgtgcagcagcagagtgtgcagaaccgagctggaggacctggtgaaggtgctgtacctggagagaagcgagaagggccactgctag

SEQ ID NO: 55798 - DNA, 1137 bp, Artificial Sequence
  derived and/or modified sequence
atgagaaagaagtggaagatgggcggcatgaagtacatcttcagcctgctgttcttcctgctgctggagggcggcaagaccgagcaggtgaagcacagcgagacctactgcatgttccaggacaagaagtacagagtgggcgagagatggcacccctacctggagccctacggcctggtgtactgcgtgaactgcatctgcagcgagaacggcaacgtgctgtgcagcagagtgagatgccccaacgtgcactgcctgagccccgtgcacatcccccacctgtgctgccccagatgccccggcgacggcgagctgagctgggagcacagcgacggcgacatcttcagacagcccgccaacagagaggccagacacagctaccacagaagccactacgaccccccccccagcagacaggccggcggcctgagcagattccccggcgccagaagccacagaggcgccctgatggacagccagcaggccagcggcaccatcgtgcagatcgtgatcaacaacaagcacaagcacggccaggtgtgcgtgagcaacggcaagacctacagccacggcgagagctggcaccccaacctgagagccttcggcatcgtggagtgcgtgctgtgcacctgcaacgtgaccaagcaggagtgcaagaagatccactgccccaacagatacccctgcaagtacccccagaagatcgacggcaagtgctgcaaggtgtgccccggcaagaaggccaaggaggagctgcccggccagagcttcgacaacaagggctacttctgcggcgaggagaccatgcccgtgtacgagagcgtgttcatggaggacggcgagaccaccagaaagatcgccctggagaccgagagacccccccaggtggaggtgcacgtgtggaccatcagaaagggcatcctgcagcacttccacatcgagaagatcagcaagagaatgttcgaggagctgccccacttcaagctggtgaccagaaccaccctgagccagtggaagatcttcaccgagggcgaggcccagatcagccagatgtgcagcagcagagtgtgcagaaccgagctggaggacctggtgaaggtgctgtacctggagagaagcgagaagggccactgctag

SEQ ID NO: 55799 - protein, 151 aa, Artificial Sequence
  derived and/or modified sequence
MAATALLEAGLARVLFYPTLLYTLFRGKVPGRAHRDWYHRIDPTVLLGALPLRSLTRQVSRAGEPGPLPRPRRSVPVGPLGSPPSLLSHLFASAAGTGRERARGDHHERGVRDEVPVQLFTGAQMESRGGCKSHRQDPVIHPHQAWPAGCS

SEQ ID NO: 55800 - DNA, 456 bp, Artificial Sequence
  derived and/or modified sequence
atggccgccaccgccctgctggaggccggcctggccagagtgctgttctaccccaccctgctgtacaccctgttcagaggcaaggtgcccggcagagcccacagagactggtaccacagaatcgaccccaccgtgctgctgggcgccctgcccctgagaagcctgaccagacaggtgagcagagccggcgagcccggccccctgcccagacccagaagaagcgtgcccgtgggccccctgggcagcccccccagcctgctgagccacctgttcgccagcgccgccggcaccggcagagagagagccagaggcgaccaccacgagagaggcgtgagagacgaggtgcccgtgcagctgttcaccggcgcccagatggagagcagaggcggctgcaagagccacagacaggaccccgtgatccacccccaccaggcctggcccgccggctgcagctag

SEQ ID NO: 55801 - DNA, 456 bp, Artificial Sequence
  derived and/or modified sequence
atggctgctaccgcattgctcgaagcgggcctggctagagtgctcttctaccccacactcctctatacactattccgtggtaaagtccccggcagggcccaccgtgactggtatcacagaatagaccccaccgtacttcttggcgccctgccactccgctcattgaccaggcaggtaagcagagcaggagagcctgggccgcttcccagaccacgcagaagtgtgccggtgggtccattgggctctcccccttcactgctgtcgcacttgtttgcctcggccgcaggcactggtagggaacgggctagaggtgaccaccatgagagaggagtgagagatgaggtgcctgttcagctgtttaccggagcccagatggagagcagaggcggatgtaagagccaccgacaagaccccgtcatccacccacaccaagcgtggccggcaggttgctcgtag

SEQ ID NO: 55802 - DNA, 456 bp, Artificial Sequence
  derived and/or modified sequence
atggccgccacagccctgctggaggccggcctggcccgggtgctcttctaccccaccctgctgtacaccctcttccggggcaaggtgcccggccgggcccaccgggactggtaccacagaattgaccccaccgtgctgctgggcgccctgcccctgcggagcctgacccggcaggtgtcccgggccggggagcccggccccctgccccggccccggcgctctgtgcctgtgggccccctgggcagcccccccagcctgctgagccacctgtttgccagcgctgctggcaccggccgggagcgggcccggggggaccaccacgagcggggcgtgagagatgaggtgcctgtgcagctgttcaccggggcccagatggagagcagaggaggctgcaagagccaccggcaggaccccgtcatccacccccaccaggcctggccagctggctgcagctag

SEQ ID NO: 55803 - DNA, 456 bp, Artificial Sequence
  derived and/or modified sequence
atggccgccaccgccctgctggaggccggcctggcccgggtgctgttttacccaacactgctttataccctatttcgcggaaaggttccagggagggcacatcgagactggtaccatcgcatcgatccaaccgtactcctgggtgccttacctcttcggagccttacccgacaagtgtcccgagccggcgaaccgggtcctttacctcgccctcgcaggagtgtaccagtaggacccctgggaagccctcctagcctgctaagtcacctcttcgcctctgccgcagggactgggcgggagcgggctcggggcgaccaccacgagaggggtgtacgggatgaagtgccggtacagcttttcacgggggcccagatggaatccaggggtggatgcaaatcccaccgacaggatcccgtcatccatccccaccaagcctggccagccggctgttcctag

SEQ ID NO: 55804 - DNA, 1014 bp, Artificial Sequence
  derived and/or modified sequence
ctccgaggccgccgggccctcctccagagtcccgccagtcccccagagtccaggccagtccccgccgtcacccggtgcgagcccgcgagaggcctagtgcagctggcagccccgccccggcacccgcctgctcttctcgcgggtccggaccgcgagcgcgggggccgacgggtcgccgctgcgccgggccgggatggcggccaccgcgctgctggaggccggcctggcgcgggtgctcttctacccgacgctgctctacaccctgttccgcgggaaggtgccgggtcgggcgcaccgggactggtaccaccgcatcgaccccaccgtgctgctgggcgcgctgccgttgcggagcttgacgcgccaggtgagccgggccggggagcccgggcccctgccccgtccccgccgctccgtccctgtcgggccgctggggtctccaccgtctttgctgagccacctctttgcctcggcagctggtacaggacgagaacgtgcgcggggtgatcaccatgaacgaggagtacgagacgaggttcctgtgcaactcttcacaggtgcacaaatggagtccagaggaggctgtaagagccatcgccaagatccggtcatacatccacatcaggcctggccagctggatgttcttaaagagttccacaagcagattactgcacgggcaacaaaggatgggacttttgtcatttcaaagacatgatgtatggggattagaaagaactcaagacactcctgcttgatacagaacaaaaagagcttaacaggaccaacagggcttaagcccagacttgacgtaacagaaatgtgccaataggtaataggtaatttttctttctctgacttgttttgttttcttgaaataacactgttgtgtggctagaaaggaaaagatttagtgtggcttgtattcatgggatacaggacagggatggggctatcatcttttcttgaatagggctaaagaagtattttaacaaaaatctattatgtacctaata

SEQ ID NO: 55805 - DNA, 456 bp, Artificial Sequence
  derived and/or modified sequence
atggcggctactgcactgctcgaagccggactggctcgcgtcctgttctaccctactcttctgtatacactgtttagaggcaaggttccagggagagcccaccgtgactggtatcaccgcatcgacccaacagtgttgctcggagcgctacctctccgatccctaactagacaggtgtcaagggctggcgaacctggcccactgcccagacctcgcaggagtgtaccagtgggccctctcggctcccctccaagccttttgtctcatctttttgccagcgcggctggaacaggcagggagagagccagaggagatcatcacgaaaggggtgtaagggatgaagtcccagtccagttatttacaggtgctcagatggaatcacggggaggatgtaagtcccatcgacaggaccccgtgatccacccacaccaggcctggcccgcaggatgctcgtag

SEQ ID NO: 55806 - DNA, 303 bp, Artificial Sequence
  derived and/or modified sequence
atgggcaccagcagcatcttcctgtgcgtgctgttcctgtgcggcgccctcggcctgaccatgagtcccgcacgcggtcgcttgaggtgctatatctgcggattcactaagccatgccatccagtccccactgagtgtagagacgatgaggcatgtggcattagcattggaactagcgggcgaacactggtgcaatggccgtttagtcgaagattgccgacatcaatccacccggcattcccagtggcccctgcctcggcgtgtctgtttcacccgactgaccagagcgagattactgaatag

SEQ ID NO: 55807 - protein, 89 aa, Artificial Sequence
  derived and/or modified sequence
MTTSQKHRDFVAEPMGEKPVGSLAGIGEVLGKKLEERGFDKAYVVLGQFLVLKKDEDLFREWLKDTCGANAKQSRDCFGCLREWCDAFL

SEQ ID NO: 55808 - protein, 28 aa, Artificial Sequence
  derived and/or modified sequence
MTTSQKHRDFVAEPMGEKPVGSLAGIGE

SEQ ID NO: 55809 - DNA, 270 bp, Artificial Sequence
  derived and/or modified sequence
atgactaccagccagaagcaccgagatttcgtggccgaacccatgggcgaaaagcctgtcggatctcttgccggcatcggagaagtgttggggaagaagctggaagagagaggcttcgacaaagcttatgtcgtgctgggccaatttctcgtcctgaaaaaggacgaggacctgtttcgagagtggctgaaggacacctgtggcgccaatgccaagcaatctcgggactgtttcgggtgtctgcgcgaatggtgtgacgcgttcctatag

SEQ ID NO: 55810 - DNA, 270 bp, Artificial Sequence
  derived and/or modified sequence
atgaccaccagtcagaaacatagagacttcgttgcagagcctatgggcgagaagcctgttggcagccttgctggcatcggcgaggtgctcggaaagaaactagaggaaagaggattcgataaggcgtacgtggttctgggccagttcctggttctgaaaaaggacgaggatctgtttagggaatggttgaaggatacctgtggtgccaacgccaaacagtcgagggattgctttggctgtttgcgggagtggtgcgacgcttttctctag

SEQ ID NO: 55811 - DNA, 270 bp, Artificial Sequence
  derived and/or modified sequence
atgacaactagccaaaagcacagagacttcgtcgccgagcccatgggtgaaaagcccgtgggtagcctggccggtataggagaggttctcggaaaaaaattagaagaaagaggattcgacaaggcctacgttgtgctgggacaattccttgttctgaaaaaggacgaggacttattcagagagtggctcaaagatacatgtggagcaaacgctaagcagagcagggactgttttggttgtttacgggagtggtgtgacgcttttctttag

SEQ ID NO: 55812 - DNA, 87 bp, Artificial Sequence
  derived and/or modified sequence
atgaccactagtcagaagcaccgcgacttcgtggccgagcctatgggtgaaaaacccgtaggctctttagccggtatcggagaatag

SEQ ID NO: 55813 - DNA, 270 bp, Artificial Sequence
  derived and/or modified sequence
atgactacatcgcagaagcatcgcgacttcgtggccgagccaatgggtgagaaaccagtcggctctttagccgggattggcgaagtgttgggaaagaagttggaagagcgcggctttgacaaggcttatgtggtgcttggacaattcctggtgctcaaaaaggacgaagacctctttagagaatggctgaaggatacttgtggggcaaacgccaagcagagtcgcgactgttttgggtgcctgcgcgaatggtgtgacgcattcctgtag

SEQ ID NO: 55814 - DNA, 270 bp, Artificial Sequence
  derived and/or modified sequence
atgaccaccagccagaagcaccgggactttgtggccgagcccatgggagagaagcctgtgggcagcctggccggcatcggggaggtgctgggcaagaagctggaggagcggggctttgacaaggcctacgtggtgctgggccagttcctggtgctgaagaaggatgaggacctcttccgggagtggctgaaggacacctgtggggccaatgccaagcagagccgggactgcttcggctgcctgcgggagtggtgtgatgccttcctgtag

SEQ ID NO: 55815 - DNA, 87 bp, Artificial Sequence
  derived and/or modified sequence
atgaccaccagccagaagcaccgggactttgtggccgagcccatgggagagaagcctgtgggcagcctggccggcatcggggagtag

SEQ ID NO: 55816 - DNA, 270 bp, Artificial Sequence
  derived and/or modified sequence
atgaccaccagccagaagcaccgggacttcgtggccgagcccatgggcgagaaacccgtaggcagcctcgctggcattggagaggtgctggggaaaaaactagaagagcgcggttttgataaggcctatgtggtgcttggccagtttctggttctcaaaaaggatgaggacctgttcagagagtggctcaaggatacttgcggagcaaacgcgaaacagtctcgcgactgctttgggtgcctccgggaatggtgcgatgctttcttatag

SEQ ID NO: 55817 - DNA, 270 bp, Artificial Sequence
  derived and/or modified sequence
atgaccaccagccagaagcaccgggacttcgtggccgagcccatgggcgaaaaacccgtgggatccctggctggcattggtgaagtgctagggaagaagttagaggaacgcggcttcgacaaggcatatgtcgtgctggggcagttcctcgtgctgaaaaaagatgaagacctgttccgcgaatggctgaaggacacctgcggagccaacgctaaacagtcaagagattgctttggctgcctccgggagtggtgtgatgcctttttatag

SEQ ID NO: 55818 - DNA, 270 bp, Artificial Sequence
  derived and/or modified sequence
atgaccaccagccagaagcaccgggacttcgtggccgagcccatgggggagaagcccgtgggctctctggctggcattggggaggtcctcggtaagaagctggaggaacgcggcttcgataaagcctacgtggtcttaggccagttcctggtcttaaagaaggacgaagacctctttagagaatggttgaaagacacatgcggcgcaaacgcaaaacagtcaagggactgcttcggctgcctccgagagtggtgcgacgctttcctctag

SEQ ID NO: 55819 - DNA, 87 bp, Artificial Sequence
  derived and/or modified sequence
atgaccaccagccagaagcaccgggacttcgtggccgagcccatgggagaaaaacctgtagggagccttgcgggcattggcgagtag

SEQ ID NO: 55820 - DNA, 270 bp, Artificial Sequence
  derived and/or modified sequence
atgaccaccagccagaagcaccgggacttcgtggccgagcccatgggggagaaacctgtggggagccttgctggaataggggaggtgcttggcaagaaactggaggagaggggcttcgacaaggcatatgtcgtgctgggtcagttcctggtacttaaaaaggatgaggatctttttagggaatggctgaaggatacctgcggcgcgaatgccaagcagtctcgcgactgctttggatgtctgagagaatggtgtgatgcttttctatag

SEQ ID NO: 55821 - DNA, 270 bp, Artificial Sequence
  derived and/or modified sequence
atgaccactagtcagaagcaccgggacttcgtggccgagccaatgggggaaaaaccagttggctcccttgccggaattggcgaggtattagggaaaaagctggaggaacgcggattcgacaaggcctatgttgttctggggcagttccttgtcctgaaaaaggacgaggatctcttccgggagtggttgaaagacacctgcggggctaacgctaagcagtctcgggattgctttggctgcctgcgcgagtggtgcgacgccttcctctag

SEQ ID NO: 55822 - DNA, 270 bp, Artificial Sequence
  derived and/or modified sequence
atgacaacatcccagaaacatagggatttcgtggccgagccgatgggagagaagcctgtcggctcccttgcaggtatcggagaagtactcgggaaaaagttagaagagagggggtttgacaaggcttacgtagtgctggggcaattccttgtgctgaagaaggacgaagatctgtttagagaatggctcaaggatacatgtggtgcaaatgctaaacagagtcgggattgtttcggctgtctaagggagtggtgtgatgcatttctgtag

SEQ ID NO: 55823 - DNA, 270 bp, Artificial Sequence
  derived and/or modified sequence
atgacaacatctcagaaacaccgcgatttcgtcgccgagccaatgggcgaaaagcctgttggctctctggcaggcatcggcgaggtcctcggcaaaaagctcgaggaacgaggcttcgataaggcatatgtggtcctgggtcagttcctcgtgctgaagaaggacgaagacctgttccgtgagtggttaaaggacacctgcggcgcaaacgctaagcagagccgggattgcttcggctgtctccgcgagtggtgcgacgctttcctttag

SEQ ID NO: 55824 - DNA, 87 bp, Artificial Sequence
  derived and/or modified sequence
atgactactagccagaagcacagggactttgttgcagagccaatgggggagaagcctgtcggaagcctggctggaatcggtgaatag

SEQ ID NO: 55825 - DNA, 270 bp, Artificial Sequence
  derived and/or modified sequence
atgacaacctcgcagaagcatcgggatttcgtagctgaaccgatgggagaaaagcccgtgggaagtctggccggtattggggaagtgttggggaagaagctggaagagcgaggattcgataaagcttatgtggtcttaggccagttccttgtgctgaaaaaggatgaagatttgttccgtgagtggctaaaagacacatgcggagctaacgctaagcaaagcagggattgtttcggctgtttgagggagtggtgcgatgcttttctgtag

SEQ ID NO: 55826 - DNA, 1155 bp, Artificial Sequence
  derived and/or modified sequence
ccagtgttcccagttcccaccagtccaactgcgaggagtgcgacgtgagtctgagtctgatccctccgaaaaccgtacttccggcgctgtctcggaggcctcccgtcccctcccttgtccgtcttctaactcttccccacgccaggtccgtcaagcctaagtccttgagttccgggtccgggcagcagagaaaggaagtcctctccctggaggcctatctccctcagaactgcgcgagaagcgagaccttagaaggcagggcttcccgcgaaggaccggaaaggagcgcctactaaggacgccgtcgaggtccggggcgcctcaactctatagctctaactggctagaagtgcccaacgtggaatgtttcttttttaaaggcggctcttgaagcgacccggaagcggaagtggaagaaagttctagtggcttgaggtatccgcaggagcggccgggtggcgggaggaaccgttacgggaactgaagttgcggattaagcctgatcaagatgacaacctcccaaaagcaccgagacttcgtggcagagcccatgggggagaagccagtggggagcctggctgggattggtgaagtcctgggcaagaagctggaggaaaggggttttgacaaggcctatgttgtccttggccagtttctggtgctaaagaaagatgaagacctcttccgggaatggctgaaagacacttgtggcgccaacgccaagcagtcccgggactgcttcggatgccttcgagagtggtgcgacgccttcttgtgatgctctctgggaagctctcaatccccagccctcatccagagtttgcagccgagtagggactcctcccctgtcctctacgaaggaaaagattgctattgtcgtactcacctccgacgtactccggggtcttttgggagttttctcccctaaccatttcaacttttttttggattctcgctcttgcatgcctcccccgtcctttttcccttgccagttccctggtgacagttaccagctttcctgaatggattcccggccccatccctcacccccaccctcactttcaatccgtttgataccatttggctccttttttggcagaacagtcactgtccttgtaaagttttttagatcaataaagtcagtggctttcatga

SEQ ID NO: 55827 - DNA, 946 bp, Artificial Sequence
  derived and/or modified sequence
gtcaagcctaagtccttgagttccgggtccgggcagcagagaaaggaagtcctctccctggaggcctatctccctcagaactgcgcgagaagcgagaccttagaaggcagggcttcccgcgaaggaccggaaaggagcgcctactaaggacgccgtcgaggtccggggcgcctcaactctatagctctaactggctagaagtgcccaacgtggaatgtttcttttttaaaggcggctcttgaagcgacccggaagcggaagtggaagaaagttctagtggcttgagattaagcctgatcaagatgacaacctcccaaaagcaccgagacttcgtggcagagcccatgggggagaagccagtggggagcctggctgggattggtgaagtcctgggcaagaagctggaggaaaggggttttgacaaggcctatgttgtccttggccagtttctggtgctaaagaaagatgaagacctcttccgggaatggctgaaagacacttgtggcgccaacgccaagcagtcccgggactgcttcggatgccttcgagagtggtgcgacgccttcttgtgatgctctctgggaagctctcaatccccagccctcatccagagtttgcagccgagtagggactcctcccctgtcctctacgaaggaaaagattgctattgtcgtactcacctccgacgtactccggggtcttttgggagttttctcccctaaccatttcaacttttttttggattctcgctcttgcatgcctcccccgtcctttttcccttgccagttccctggtgacagttaccagctttcctgaatggattcccggccccatccctcacccccaccctcactttcaatccgtttgataccatttggctccttttttggcagaacagtcactgtccttgtaaagttttttagatcaataaagtcagtggctttca

SEQ ID NO: 55828 - DNA, 670 bp, Artificial Sequence
  derived and/or modified sequence
gaaccccgcgggcggggagcgggtgtgcgcagcgctaggtgtgcgcttcgccctgtaggtagagagaccctttggttagctttccacgccaagtggccgttccaggcaggcagtgtcgtcttggttcagccaaggtcacagagggagtgatagcttccgcgcagccctggctacggactctgggcatctttccactgccccgcttgcgccacctgttaggcaggatcgtttttcctctggggcaagatcaaaatccagattaagcctgatcaagatgacaacctcccaaaagcaccgagacttcgtggcagagcccatgggggagaagccagtggggagcctggctgggattggtgaagtcctgggcaagaagctggaggaaaggggttttgacaaggcctatgttgtccttggccagtttctggtgctaaagaaagatgaagacctcttccgggaatggctgaaagacacttgtggcgccaacgccaagcagtcccgggactgcttcggatgccttcgagagtggtgcgacgccttcttgtgatgctctctgggaagctctcaatccccagccctcatccagagtttgcagccgagtagggactcctcccctgtcctctacgaaggaaaagattgctattgtcgtactcacctccgacgtactccgggg

SEQ ID NO: 55829 - DNA, 586 bp, Artificial Sequence
  derived and/or modified sequence
ccgggcagcagagaaaggaagtcctctccctggaggcctatctccctcagaactgcgcgagaagcgagaccttagaaggcagggcttcccgcgaaggaccggaaaggagcgcctactaaggacgccgtcgaggtccggggcgcctcaactctatagctctaactggctagaagtgcccaacgtggaatgtttcttttttaaaggcggctcttgaagcgacccggaagcggaagtggaagaaagttctagtggcttgagagagaccctttggttagctttccacgccaagtggccgttccaggcaggcagtgtcgtcttggttcagccaaggtcacagagggagtgatagcttccgcgcagccctggctacggactctgggcatctttccactgccccgcttgcgccacctgttaggcaggatcgtttttcctctggggcaagatcaaaatccaggtcctgcaggaagaaactcctcttaaaaataattaagcctgatcaagatgacaacctcccaaaagcaccgagacttcgtggcagagcccatgggggagaagccagtggggagcctggctgggattggtgaag

SEQ ID NO: 55830 - DNA, 1135 bp, Artificial Sequence
  derived and/or modified sequence
gccgcggagcagggccctgattggaggccagaggggttgcggggagaaggggaggagaggggtcgcaggcgctgtggcgggccctgggggagagcttggccgcgctgcggggagggggcggggtgcagcgcgtgggagccgggccgcgggaaggggcgggccgcagcggcgcgcggtgggggcggagctggggcgcggcgtgaaccccgcgggcggggagcgggtgtgcgcagcgctaggtgtgcgcttcgccctgtaggtagagagaccctttggttagctttccacgccaagtggccgttccaggcaggcagtgtcgtcttggttcagccaaggtcacagagggagtgatagcttccgcgcagccctggctacggactctgggcatctttccactgccccgcttgcgccacctgttaggcaggatcgtttttcctctggggcaagatcaaaatccaggtcctgcaggaagaaactcctcttaaaaataattaagcctgatcaagatgacaacctcccaaaagcaccgagacttcgtggcagagcccatgggggagaagccagtggggagcctggctgggattggtgaagtcctgggcaagaagctggaggaaaggggttttgacaaggcctatgttgtccttggccagtttctggtgctaaagaaagatgaagacctcttccgggaatggctgaaagacacttgtggcgccaacgccaagcagtcccgggactgcttcggatgccttcgagagtggtgcgacgccttcttgtgatgctctctgggaagctctcaatccccagccctcatccagagtttgcagccgagtagggactcctcccctgtcctctacgaaggaaaagattgctattgtcgtactcacctccgacgtactccggggtcttttgggagttttctcccctaaccatttcaacttttttttggattctcgctcttgcatgcctcccccgtcctttttcccttgccagttccctggtgacagttaccagctttcctgaatggattcccggccccatccctcacccccaccctcactttcaatccgtttgataccatttggctccttttttggcagaacagtcactgtccttgtaaagttttttagatcaataa

SEQ ID NO: 55831 - DNA, 270 bp, Artificial Sequence
  derived and/or modified sequence
atgaccaccagccagaagcacagagacttcgtggccgagcccatgggcgagaagcccgtgggcagcctggccggcatcggcgaggtgctgggcaagaagctggaggagagaggcttcgacaaggcctacgtggtgctgggccagttcctggtgctgaagaaggacgaggacctgttcagagagtggctgaaggacacctgcggcgccaacgccaagcagagcagagactgcttcggctgcctgagagagtggtgcgacgccttcctgtag

SEQ ID NO: 55832 - DNA, 87 bp, Artificial Sequence
  derived and/or modified sequence
atgaccaccagccagaagcacagagacttcgtggccgagcccatgggcgagaagcccgtgggcagcctggccggcatcggcgagtag

SEQ ID NO: 55833 - protein, 572 aa, Artificial Sequence
  derived and/or modified sequence
MTSRDQPRPKGPPKSTSPCPGISNSESSPTLNYQGILNRLKQFPRFSPHFAAELESIYYSLHKIQQDVAEHHKQIGNVLQIVESCSQLQGFQSEEVSPAEPASPGTPQQVKDKTLQESSFEDIMATRSSDWLRRPLGEDNQPETQLFWDKEPWFWHDTLTEQLWRIFAGVHDEKAKPRDRQQAPGLGQESKAPGSCDPGTDPCPEDASTPRPPEASSSPPEGSQDRNTSWGVVQEPPGRASRFLQSISWDPEDFEDAWKRPDALPGQSKRLAVPCKLEKMRILAHGELVLATAISSFTRHVFTCGRRGIKVWSLTGQVAEDRFPESHLPIQTPGAFLRTCLLSSNSRSLLTGGYNLASVSVWDLAAPSLHVKEQLPCAGLNCQALDANLDANLAFASFTSGVVRIWDLRDQSVVRDLKGYPDGVKSIVVKGYNIWTGGPDACLRCWDQRTIMKPLEYQFKSQIMSLSHSPQEDWVLLGMANGQQWLQSTSGSQRHMVGQKDSVILSVKFSPFGQWWASVGMDDFLGVYSMPAGTKVFEVPEMSPVTCCDVSSNNRLVVTGSGEHASVYQITY

SEQ ID NO: 55834 - protein, 416 aa, Artificial Sequence
  derived and/or modified sequence
MATRSSDWLRRPLGEDNQPETQLFWDKEPWFWHDTLTEQLWRIFAGVHDEKAKPRDRQQAPGLGQESKAPGSCDPGTDPCPEDASTPRPPEASSSPPEGSQDRNTSWGVVQEPPGRASRFLQSISWDPEDFEDAWKRPDALPGQSKRLAVPCKLEKMRILAHGELVLATAISSFTRHVFTCGRRGIKVWSLTGQVAEDRFPESHLPIQTPGAFLRTCLLSSNSRSLLTGGYNLASVSVWDLAAPSLHVKEQLPCAGLNCQALDANLDANLAFASFTSGVVRIWDLRDQSVVRDLKGYPDGVKSIVVKGYNIWTGGPDACLRCWDQRTIMKPLEYQFKSQIMSLSHSPQEDWVLLGMANGQQWLQSTSGSQRHMVGQRQRHPERQVLPLWPVVGKRWNGRLPWRLQHAGGDKSVRGA

SEQ ID NO: 55835 - protein, 572 aa, Artificial Sequence [sequence omitted]

SEQ ID NO: 55836 - protein, 449 aa, Artificial Sequence
  derived and/or modified sequence
MATRSSDWLRRPLGEDNQPETQLFWDKEPWFWHDTLTEQLWRIFAGVHDEKAKPRDRQQAPGLGQESKAPGSCDPGTDPCPEDASTPRPPEASSSPPEGSQDRNTSWGVVQEPPGRASRFLQSISWDPEDFEDAWKRPDALPGQSKRLAVPCKLEKMRILAHGELVLATAISSFTRHVFTCGRRGIKVWSLTGQVAEDRFPESHLPIQTPGAFLRTCLLSSNSRSLLTGGYNLASVSVWDLAAPSLHVKEQLPCAGLNCQALDANLDANLAFASFTSGVVRIWDLRDQSVVRDLKGYPDGVKSIVVKGYNIWTGGPDACLRCWDQRTIMKPLEYQFKSQIMSLSHSPQEDWVLLGMANGQQWLQSTSGSQRHMVGQKDSVILSVKFSPFGQWWASVGMDDFLGVYSMPAGTKVFEVPEMSPVTCCDVSSNNRLVVTGSGEHASVYQITY

SEQ ID NO: 55837 - DNA, 1719 bp, Artificial Sequence
  derived and/or modified sequence
atgaccagcagagaccagcccagacccaagggcccccccaagagcaccagcccctgccccggcatcagcaacagcgagagcagccccaccctgaactaccagggcatcctgaacagactgaagcagttccccagattcagcccccacttcgccgccgagctggagagcatctactacagcctgcacaagatccagcaggacgtggccgagcaccacaagcagatcggcaacgtgctgcagatcgtggagagctgcagccagctgcagggcttccagagcgaggaggtgagccccgccgagcccgccagccccggcaccccccagcaggtgaaggacaagaccctgcaggagagcagcttcgaggacatcatggccaccagaagcagcgactggctgagaagacccctgggcgaggacaaccagcccgagacccagctgttctgggacaaggagccctggttctggcacgacaccctgaccgagcagctgtggagaatcttcgccggcgtgcacgacgagaaggccaagcccagagacagacagcaggcccccggcctgggccaggagagcaaggcccccggcagctgcgaccccggcaccgacccctgccccgaggacgccagcacccccagaccccccgaggccagcagcagcccccccgagggcagccaggacagaaacaccagctggggcgtggtgcaggagccccccggcagagccagcagattcctgcagagcatcagctgggaccccgaggacttcgaggacgcctggaagagacccgacgccctgcccggccagagcaagagactggccgtgccctgcaagctggagaagatgagaatcctggcccacggcgagctggtgctggccaccgccatcagcagcttcaccagacacgtgttcacctgcggcagaagaggcatcaaggtgtggagcctgaccggccaggtggccgaggacagattccccgagagccacctgcccatccagacccccggcgccttcctgagaacctgcctgctgagcagcaacagcagaagcctgctgaccggcggctacaacctggccagcgtgagcgtgtgggacctggccgcccccagcctgcacgtgaaggagcagctgccctgcgccggcctgaactgccaggccctggacgccaacctggacgccaacctggccttcgccagcttcaccagcggcgtggtgagaatctgggacctgagagaccagagcgtggtgagagacctgaagggctaccccgacggcgtgaagagcatcgtggtgaagggctacaacatctggaccggcggccccgacgcctgcctgagatgctgggaccagagaaccatcatgaagcccctggagtaccagttcaagagccagatcatgagcctgagccacagcccccaggaggactgggtgctgctgggcatggccaacggccagcagtggctgcagagcaccagcggcagccagagacacatggtgggccagaaggacagcgtgatcctgagcgtgaagttcagccccttcggccagtggtgggccagcgtgggcatggacgacttcctgggcgtgtacagcatgcccgccggcaccaaggtgttcgaggtgcccgagatgagccccgtgacctgctgcgacgtgagcagcaacaacagactggtggtgaccggcagcggcgagcacgccagcgtgtaccagatcacctactag

SEQ ID NO: 55838 - DNA, 1719 bp, Artificial Sequence
  derived and/or modified sequence
atgaccagcagagaccagcccagacccaagggcccccccaagagcaccagcccctgccccggcatcagcaacagcgagagcagccccaccctgaactaccagggcatcctgaacagactgaagcagttccccagattcagcccccacttcgccgccgagctggagagcatctactacagcctgcacaagatccagcaggacgtggccgagcaccacaagcagatcggcaacgtgctgcagatcgtggagagctgcagccagctgcagggcttccagagcgaggaggtgagccccgccgagcccgccagccccggcaccccccagcaggtgaaggacaagaccctgcaggagagcagcttcgaggacatcatggccaccagaagcagcgactggctgagaagacccctgggcgaggacaaccagcccgagacccagctgttctgggacaaggagccctggttctggcacgacaccctgaccgagcagctgtggagaatcttcgccggcgtgcacgacgagaaggccaagcccagagacagacacttcagcatcttccagggccaggagagcaaggcccccggcagctgcgaccccggcaccgacccctgccccgaggacgccagcacccccagaccccccgaggccagcagcagcccccccgagggcagccaggacagaaacaccagctggggcgtggtgcaggagccccccggcagagccagcagattcctgcagagcatcagctgggaccccgaggacttcgaggacgcctggaagagacccgacgccctgcccggccagagcaagagactggccgtgccctgcaagctggagaagatgagaatcctggcccacggcgagctggtgctggccaccgccatcagcagcttcaccagacacgtgttcacctgcggcagaagaggcatcaaggtgtggagcctgaccggccaggtggccgaggacagattccccgagagccacctgcccatccagacccccggcgccttcctgagaacctgcctgctgagcagcaacagcagaagcctgctgaccggcggctacaacctggccagcgtgagcgtgtgggacctggccgcccccagcctgcacgtgaaggagcagctgccctgcgccggcctgaactgccaggccctggacgccaacctggacgccaacctggccttcgccagcttcaccagcggcgtggtgagaatctgggacctgagagaccagagcgtggtgagagacctgaagggctaccccgacggcgtgaagagcatcgtggtgaagggctacaacatctggaccggcggccccgacgcctgcctgagatgctgggaccagagaaccatcatgaagcccctggagtaccagttcaagagccagatcatgagcctgagccacagcccccaggaggactgggtgctgctgggcatggccaacggccagcagtggctgcagagcaccagcggcagccagagacacatggtgggccagaaggacagcgtgatcctgagcgtgaagttcagccccttcggccagtggtgggccagcgtgggcatggacgacttcctgggcgtgtacagcatgcccgccggcaccaaggtgttcgaggtgcccgagatgagccccgtgacctgctgcgacgtgagcagcaacaacagactggtggtgaccggcagcggcgagcacgccagcgtgtaccagatcacctactag

SEQ ID NO: 55839 - DNA, 1719 bp, Artificial Sequence
  derived and/or modified sequence
atgacctctagggatcaacctcgacctaagggacccccaaagtcaacttcgccttgccccggcatctcaaatagtgagagctccccgacactgaactatcagggcatcctgaaccgcttaaaacagttccctagattttccccccattttgccgccgaactggagtctatctattactccctgcacaagattcaacaagatgtggctgaacaccataagcagattgggaatgtactgcagattgttgaatcctgctcacagcttcagggctttcagtccgaggaggtgtctcccgccgaaccagccagccctggcactccacagcaagtgaaggataaaaccctgcaagagagctcctttgaggacatcatggcaaccaggtccagcgactggctgaggcgccccttaggggaggacaaccagcccgaaacacaactgttttgggacaaagagccctggttctggcacgacactctgaccgaacagctgtggcgaatctttgccggagtgcacgacgaaaaggcaaaaccccgtgatagacagcaagcgccgggccttggtcaggagagcaaggccccggggtcctgtgacccaggcactgacccttgtccggaagacgcttcaacaccacgaccaccggaagccagctcttccccacccgagggaagccaggatagaaacaccagctggggcgtcgttcaggaaccacccgggcgggctagcagattcctgcagagtatcagttgggacccagaggatttcgaggatgcctggaagcgcccagacgcactccctgggcagtccaagcgtctggcagtgccctgcaagctggagaaaatgcgaatcttagcacatggtgaactcgtactggcaacagccatcagtagctttaccaggcacgtgtttacatgcggaaggcgggggataaaagtgtggagcctcaccggccaggtggccgaggataggttcccagagagccatctgcctattcagacacctggtgctttcttgcgcacatgcttgctctcatcaaacagccggtcgctgctgactggaggctacaatctcgcgtccgtgtctgtctgggacctagctgctccgtcgctccacgtcaaagagcaacttccatgcgccggccttaactgtcaggcactggacgcgaacctggatgccaatcttgcctttgcttccttcaccagtggagtcgtccgcatttgggacctgcgcgaccagtccgtggtgcgggatctgaaaggctacccagacggcgtgaagagtattgtagttaaggggtataatatctggacaggaggtcctgacgcatgcttaaggtgctgggaccaacgcactatcatgaaacctctcgagtaccagttcaagagtcagatcatgtcgttgtcccactcaccacaggaagactgggtgcttttaggtatggcaaacgggcagcagtggctgcagtcaaccagcggctcccagagacacatggtgggacagaaggacagtgtgatcttgtctgtgaagttctctccgttcggccaatggtgggcctcagtcggaatggacgatttccttggtgtatactctatgcctgcagggacaaaagtatttgaggtgcctgaaatgtcccctgtgacatgctgtgacgtctcgtccaataaccgtctagtggtgactggttcgggtgagcacgcttctgtatatcaaatcacctattag

SEQ ID NO: 55840 - DNA, 1719 bp, Artificial Sequence
  derived and/or modified sequence
atgaccagtcgcgatcagccaagacccaaagggccccctaaatccacgtccccttgccccggcattagtaattccgagagcagccccaccctcaattatcagggtatcctgaaccgactgaagcagtttccccggttcagcccccacttcgccgctgaactggaaagtatctactattcactgcataaaatacagcaggacgtagccgaacaccacaaacagatcgggaacgtgcttcagattgtggagtcatgctcccaattacagggattccagagcgaagaagtgagtcccgcagagcctgcctcccccggcactccacagcaggttaaggacaaaacccttcaggagagctcattcgaggatatcatggcaactcggagctctgactggctccggaggccactgggggaagacaatcaaccggaaacccagcttttctgggacaaagaaccctggttctggcacgacaccctcacggagcagctgtggcgaatctttgctggcgttcacgatgagaaagcaaaacccagagatcgtcatttcagtattttccagggacaagaatccaaagcacctggcagctgcgaccccggcacagatccctgccctgaagatgctagtactcccagaccaccagaggccagctctagcccgccggaaggcagccaagaccggaacactagctggggcgtcgtacaggagcctcctgggagggcctcacggtttctgcagtcaattagttgggatcccgaggactttgaggatgcttggaagcgcccagatgcactgcccggtcagagcaagagactcgcagtgccttgtaagctggaaaagatgcgcatcttagctcatggcgagcttgtgctggccaccgcaatatcatcattcaccaggcacgtctttacctgtgggcggagaggaattaaagtttggtctttgaccggccaggtcgcagaggacagatttcccgagtcccaccttcctatacagaccccaggcgccttccttaggacttgcttgctgtcttcaaattctaggtcccttctgacaggaggctataatcttgcctccgtgagcgtctgggacctggctgctcctagtttgcacgtgaaagagcagttaccttgcgcaggactgaactgccaggccctcgatgccaaccttgatgcgaacttagcgttcgcgtcttttacttctggcgtcgttcgcatctgggatctacgggatcagtccgtggtacgcgacctgaagggctaccctgatggggtcaagtccatcgtggtgaagggatacaacatttggactgggggcccagacgcttgcctgcggtgttgggaccaacgcaccattatgaaacccctggagtaccaattcaaaagtcagatcatgtctttaagccacagccctcaggaggattgggtcttgctgggaatggcgaatgggcagcagtggctgcaaagtacctccggtagccagcgacacatggtaggacaaaaagatagcgtcatcctgagcgtgaaattttccccgtttggccagtggtgggcatcagtgggcatggacgacttcctaggcgtctatagtatgcctgccggcacaaaagttttcgaggtccctgagatgagccctgtgacatgttgtgacgtgtccagtaataaccgtctggtggtcaccggatctggtgaacatgctagcgtttaccaaatcacctactag

SEQ ID NO: 55841 - DNA, 1719 bp, Artificial Sequence
  derived and/or modified sequence
atgaccagccgggaccagccccggcccaagggcccccccaagagcaccagcccctgccccggcatcagcaacagcgagagcagccccaccctgaactaccagggcatcctgaaccggctgaagcagttcccccgcttcagcccccactttgctgctgagctggagagcatctactacagcctgcacaagatccagcaggatgtggccgagcaccacaagcagattggaaatgtgctgcagatcgtggagagctgcagccagctgcagggcttccagagcgaggaggtgtccccagctgagcccgccagccctggcaccccccagcaggtgaaggacaagaccctgcaggagagcagctttgaggacatcatggccaccaggagcagtgactggctgcggcggcccctgggggaggacaaccagcctgagacccagctgttctgggacaaggagccctggttctggcatgacaccctgacagagcagctgtggaggatctttgctggggtgcatgatgagaaggccaagccccgggaccggcagcaggcccctggcctgggccaggagagcaaggcccctggcagctgtgaccccggcacagacccctgcccagaagatgccagcaccccccggcccccagaggccagcagcagccccccagagggcagccaggacaggaacacctcctggggcgtggtgcaggagcccccaggccgggccagccgcttcctgcagagcatctcctgggaccctgaggactttgaagatgcctggaagaggccagatgccctgcccggccagagcaagaggctggccgtgccctgcaagctggagaagatgaggatcctggcccatggagagctggtgctggccacagccatcagcagcttcaccaggcatgtgttcacctgtggccggcggggcatcaaggtgtggagcctgaccggccaggtggccgaggaccgcttccctgagagccacctgcccatccagacccctggggccttcctgcggacctgcctgctgagcagcaacagccgcagcctgctgactggaggctacaacctggcctctgtgtctgtgtgggacctggccgcccccagcctgcacgtgaaggagcagctgccctgtgccggcctgaactgccaggccctggatgccaacctggatgccaacctggcctttgccagcttcaccagcggcgtggtgcgcatctgggacctgcgggaccagagcgtggtgcgggacctgaagggctacccagatggagtgaagagcatcgtggtgaagggctacaacatctggacaggaggcccagatgcctgcctgcgctgctgggaccagaggaccatcatgaagcccctggagtaccagttcaagagccagatcatgagcctgagccacagcccccaggaggactgggtgctgctgggcatggccaacggccagcagtggctgcagagcaccagcggcagccagaggcacatggtgggccagaaggacagcgtcatcctgtctgtgaagttcagccccttcggccagtggtgggcctctgtgggcatggatgacttcctgggcgtgtacagcatgcctgctggcaccaaggtgtttgaggtgcctgagatgagccctgtgacctgctgtgatgtgagcagcaacaaccggctggtggtgactggaagtggagagcacgcctctgtgtaccagatcacctactag

SEQ ID NO: 55842 - DNA, 1719 bp, Artificial Sequence
  derived and/or modified sequence
atgaccagccgggaccagccccggcccaagggcccccccaagagcaccagcccctgccccggcatcagcaacagcgagagcagccccaccctgaactaccagggcatcctgaaccggctgaagcagttcccccgcttcagcccccactttgctgctgagctggagagcatctactacagcctgcacaagatccagcaggatgtggccgagcaccacaagcagattggaaatgtgctgcagatcgtggagagctgcagccagctgcagggcttccagagcgaggaggtgtccccagctgagcccgccagccctggcaccccccagcaggtgaaggacaagaccctgcaggagagcagctttgaggacatcatggccaccaggagcagtgactggctgcggcggcccctgggggaggacaaccagcctgagacccagctgttctgggacaaggagccctggttctggcatgacaccctgacagagcagctgtggaggatctttgctggggtgcatgatgagaaggccaagccccgggacagacacttcagcatcttccagggccaggagagcaaggcccctggcagctgtgaccccggcacagacccctgcccagaagatgccagcaccccccggcccccagaggccagcagcagccccccagagggcagccaggacaggaacacctcctggggcgtggtgcaggagcccccaggccgggccagccgcttcctgcagagcatctcctgggaccctgaggactttgaagatgcctggaagaggccagatgccctgcccggccagagcaagaggctggccgtgccctgcaagctggagaagatgaggatcctggcccatggagagctggtgctggccacagccatcagcagcttcaccaggcatgtgttcacctgtggccggcggggcatcaaggtgtggagcctgaccggccaggtggccgaggaccgcttccctgagagccacctgcccatccagacccctggggccttcctgcggacctgcctgctgagcagcaacagccgcagcctgctgactggaggctacaacctggcctctgtgtctgtgtgggacctggccgcccccagcctgcacgtgaaggagcagctgccctgtgccggcctgaactgccaggccctggatgccaacctggatgccaacctggcctttgccagcttcaccagcggcgtggtgcgcatctgggacctgcgggaccagagcgtggtgcgggacctgaagggctacccagatggagtgaagagcatcgtggtgaagggctacaacatctggacaggaggcccagatgcctgcctgcgctgctgggaccagaggaccatcatgaagcccctggagtaccagttcaagagccagatcatgagcctgagccacagcccccaggaggactgggtgctgctgggcatggccaacggccagcagtggctgcagagcaccagcggcagccagaggcacatggtgggccagaaggacagcgtcatcctgtctgtgaagttcagccccttcggccagtggtgggcctctgtgggcatggatgacttcctgggcgtgtacagcatgcctgctggcaccaaggtgtttgaggtgcctgagatgagccctgtgacctgctgtgatgtgagcagcaacaaccggctggtggtgactggaagtggagagcacgcctctgtgtaccagatcacctactag

SEQ ID NO: 55843 - DNA, 1719 bp, Artificial Sequence
  derived and/or modified sequence
atgaccagccgggaccagccccggcccaagggcccccccaagagcacaagtccgtgccccgggatttcaaatagcgaaagttcaccaaccctgaactatcaaggcatcctcaaccgtctgaagcagttccctagattctctccacacttcgcagctgaactcgagtctatttattatagcctgcacaagattcaacaggatgtggcggaacaccacaaacaaatcggaaatgtcctgcagatagttgaatcttgcagtcaactgcaaggatttcagtctgaagaagtgtctccagccgagcctgcatcacctggcactccacagcaggtgaaggataaaacgctccaggagtcttcatttgaggacatcatggccacccgcagttctgactggctgagacgtcctctgggcgaagataaccagcccgaaacccagctattctgggataaggagccatggttctggcacgatactctcaccgagcagctgtggcgaatcttcgccggtgtgcacgacgaaaaggccaagcctcgggacaggcagcaggccccaggcctggggcaggaaagcaaggctcccggatcgtgtgatcccggtaccgatccttgccctgaggatgcttccactccaaggccccccgaggccagcagttcccctcctgagggttcccaggatagaaacacgtcctggggggtggtgcaggagcctccaggccgggctagccggttcttgcagagcatatcatgggatccagaggatttcgaggatgcttggaagcgcccagacgcactccctgggcaaagcaaaagacttgccgttccttgtaaactggaaaaaatgaggatcttggcccacggtgaactcgtgcttgctaccgcaatctccagcttcacaagacacgtgtttacatgtggacggaggggaattaaggtttggagccttacgggccaggtcgctgaagaccggttcccagagtcacacttgcctatccagacacctggggctttcctgaggacatgtcttctaagtagcaactcaagatctctgctgaccggcggatacaatctcgctagcgtgtccgtctgggacctcgccgccccttcactccatgtaaaggagcaactcccatgtgccggccttaattgccaagcactcgatgccaatctggacgccaacttggcctttgcgagttttacctctggcgtcgtgcggatatgggatctgcgggatcaaagcgtcgtgcgtgatctcaaaggttacccagatggcgtgaagagcatcgtggttaaggggtataacatctggacaggcggccctgacgcgtgcctgcgttgttgggaccagcgtactatcatgaagcccctggagtatcaattcaagagccagattatgagcctgtctcattcgcctcaggaggactgggtgctccttggaatggcaaacggacagcagtggctgcagagtacttcaggttctcaaagacatatggttggccagaaggactcggtaatcttgagtgttaagttcagcccgttcggccagtggtgggctagcgtaggaatggacgactttctaggcgtctactctatgcccgccgggactaaggtcttcgaagttcctgagatgagcccagtgacctgctgtgatgtgtcctccaataataggttagttgtaactggctccggcgaacatgcttccgtataccagattacttattag

SEQ ID NO: 55844 - DNA, 1719 bp, Artificial Sequence
  derived and/or modified sequence
atgaccagccgggaccagccccggcccaagggcccccccaagagcactagcccctgccccggcatctccaactcagagagctcccctacgctcaattaccaggggatcctaaaccgccttaaacagttccctcggttctctccacactttgcagcagaactcgagtcaatttattattccctacataaaattcagcaggatgttgcggagcatcacaaacagatagggaacgttcttcaaatcgtggaatcctgttcccagctccaggggttccaatccgaagaagtttcaccagctgagccggccagtccagggacgccacagcaggttaaagacaaaacgttacaagaatcttctttcgaagacatcatggctacccgctccagtgattggctgagaagaccactgggagaagataaccaaccggaaacacagctgttttgggataaggagccttggttctggcatgacactctgactgagcaattatggagaattttcgccggcgtacacgatgagaaggcgaagcccagagatcggcattttagcatttttcagggacaagagagtaaggcgcctggatcgtgtgacccaggcacagacccctgtcccgaggacgccagcacgcccaggcctccagaagctagcagcagtcccccggaaggaagccaggacagaaatacatcatggggtgtcgtccaggagccaccagggagggcctctcgcttcctccaatccatttcttgggaccccgaggacttcgaggacgcttggaagcgaccagacgccctgccaggccagtccaaacggctcgcagttccctgcaagctggagaagatgcgaattttggcccatggagaactcgttttagcaacggcaatctcttcattcacccgacatgtgttcacctgcggccgccgtggcataaaagtttggtctctcacaggccaagtggccgaagaccgatttccagagtcccacctgcccattcaaacccctggcgcttttcttcggacctgtttgctgtcatcaaacagtagatcacttctcactggcggatataatctagcatccgtgagcgtttgggacttggccgctccatctctgcatgtcaaagagcagcttccatgtgcaggcctgaattgtcaggccttggacgcaaacctggatgcaaatctcgcatttgcctccttcacctccggggttgtcaggatctgggatctccgcgaccagagcgtggttcgggacctgaagggttatcctgatggcgtgaagagtatagtagtgaagggttacaacatatggacaggaggccctgacgcatgcttgcgatgctgggatcagcgtactataatgaagcctctggagtaccagttcaaaagtcagataatgtctctctcccacagtccacaggaagactgggtcctgttagggatggctaacggccagcagtggctgcagtctacctccgggtcccaacggcacatggtgggccagaaggactcagtaattctgtccgtgaaattttccccattcggtcagtggtgggcttctgtcggcatggacgacttcctcggggtgtattctatgcctgcagggacgaaggtgttcgaagtgccagaaatgagccctgtgacatgttgcgatgtgtcttcaaataaccgccttgtggtgaccgggtctggcgaacacgcttccgtataccagattacgtattag

SEQ ID NO: 55845 - DNA, 1719 bp, Artificial Sequence
  derived and/or modified sequence
atgacatctagggaccagcccaggccgaaagggcctccgaagtctacctcgccctgtccaggcatcagcaattcagagtctagcccaacgctgaactatcaaggcattttaaaccgcctgaagcagtttccacgcttcagccctcacttcgccgcagaactggagtccatctattactcccttcacaaaatccagcaggatgtagccgagcatcataaacagattggaaatgtgcttcagattgtcgaaagttgtagccaactgcaaggctttcagtcagaggaagtctctcctgcagaacctgcctctcccggaacaccccagcaggtgaaagataagactttacaagagtcaagtttcgaggacattatggccaccagatcaagtgactggctgcgtcgcccactgggggaggataaccagcctgaaacacaactgttctgggataaggagccctggttctggcacgacactttgaccgaacaactgtggagaattttcgcgggagtgcacgacgagaaagcaaagccccgagatcgtcagcaagcgcctggactggggcaggagtccaaagcaccaggctcttgtgatcccggaacggatccatgccccgaggatgcttccactcctaggccacctgaagcatctagcagcccacccgaagggtcacaggataggaacacgagctggggcgtcgtgcaggagccccctggaagggcctctagattcttacagtcaatctcatgggatccagaggattttgaggacgcttggaaacggcctgatgctctgcccggacagtccaagaggctagctgttccctgtaaactagagaaaatgaggatcctggcccacggggagctggtcctggccacagccatttcaagctttacaagacatgtgtttacctgtggaagaaggggaattaaggtgtggtcccttaccggacaggttgcagaagacagattccccgaatcccacctgcccattcaaacacctggggctttcctgagaacttgcttgctatcaagcaatagtcggtccctactgacaggaggatacaatctcgcaagcgtgagtgtctgggaccttgccgctccctccctacacgtaaaggagcagcttccgtgtgcaggactcaactgtcaagctctggatgccaatttggacgcaaatcttgcctttgccagtttcaccagcggcgttgtgagaatatgggacctgagggatcaatcagtcgtccgcgatcttaagggctatccggacggagtgaagtctatcgtggtgaagggctacaatatctggactgggggtcccgacgcctgccttcgctgttgggaccagcggactatcatgaagccgctcgaatatcaatttaagtcccagataatgtctctatcacacagcccccaggaagactgggttctgctgggtatggccaatgggcagcagtggctgcaatcgaccagtggaagtcagaggcacatggtgggccagaaggattctgttatcctgtccgtcaagttttctcctttcgggcaatggtgggcctctgtgggtatggatgacttccttggtgtctattctatgccagccggaactaaagtctttgaagtgccagagatgagcccggtgacctgctgcgatgtgtcatcaaataaccgactggtcgtgaccggctcaggcgaacacgcatctgtgtaccagattacgtattag

SEQ ID NO: 55846 - DNA, 1719 bp, Artificial Sequence
  derived and/or modified sequence
atgacttcaagagaccagcctcgtccgaaaggccctcccaagtccacttccccttgcccagggatctcaaactctgaaagcagccccactctgaactatcagggtatactgaatcgtctgaagcagtttcccagattcagcccacatttcgcagctgaactggagagcatatactatagcttacacaagatccagcaagatgttgccgagcaccacaagcagatcggcaacgtcctgcagatcgtggaatcatgttctcagctgcagggcttccagagtgaagaggtaagtcccgcagaacccgcttcacccggtacacctcagcaggtgaaagacaaaacccttcaggagagtagtttcgaggacatcatggcaactcgcagtagtgactggcttcggaggcctctgggcgaggacaaccagcctgaaactcagttgttttgggataaggagccctggttttggcatgatacgcttacagagcaactctggcggatcttcgcaggtgtgcacgatgaaaaggccaagccaagagacaggcatttttcgatcttccagggtcaggaaagcaaagcgccaggttcttgcgaccccggtactgatccatgcccggaggatgcctctactcccagacctccagaagccagctcatcacctcccgaaggtagccaggacaggaacacctcatggggagtggtgcaggagccgccaggcagagcatcccggttcctgcagagcatttcctgggatcccgaagattttgaagacgcttggaaaagacctgacgcgctgccaggtcaatctaagaggttggcagttccttgcaagctggagaaaatgcgcatcttggcccacggagaactggtgttagctacagctatttcttcattcacccgccacgtcttcacgtgtgggcgacgaggcattaaggtgtggtcgcttaccggtcaggtggcggaggataggttcccggagtcgcacttgccaatacagacccccggagccttcttgcggacttgtctcctttctagcaactccaggtcccttttgacgggagggtacaatctggctagcgtttctgtgtgggacctcgctgctccatcactacatgttaaagaacagctcccgtgtgcaggcttaaactgccaagccctcgacgccaatctggacgccaacctggccttcgcctcgttcacatctggagtcgttaggatttgggatctgcgcgatcagagcgtcgttcgagacctcaaggggtatcccgacggagttaagtctatcgtggtgaaggggtataatatctggaccgggggtccagatgcttgccttcgctgttgggaccagcgcacaattatgaagcctctggaatatcagtttaagagccaaatcatgtctctgtcccactctcctcaggaagactgggtgctgttgggaatggcaaatggacagcagtggctacagagcaccagcgggagtcagaggcacatggtgggccaaaaggatagcgtgatcctcagcgtgaaattctctccatttggccaatggtgggcgtcagtaggcatggacgattttctgggcgtttatagcatgcctgccggaactaaggtgttcgaagtgccggaaatgagccccgtgacctgttgcgatgtgtcctccaacaataggctggtcgtgacggggtccggcgagcacgctagtgtctaccagatcacatattag

SEQ ID NO: 55847 - DNA, 1977 bp, Artificial Sequence
  derived and/or modified sequence
agtttcctcttggcctgaacttggctgacctccgcagcttccgcccgactctggctaaagtcttggaggctactgccttgaagatgacctctagggaccagcccagacccaagggccccccgaaaagcacttcgccttgtcctgggatctcgaactctgagagctctccgacgctgaattatcagggcattctaaatcggctcaagcagttccccaggttttctcctcattttgctgcggagttggagagcatttactactcgctgcacaagatccagcaggatgtggcagaacatcacaagcagataggaaacgtcttacagattgtggagagctgcagccaactccagggtttccagtctgaggaggtctcacctgctgaaccagccagccctgggacgccccagcaggtgaaggacaagaccctgcaggagtcgagctttgaggacatcatggccaccaggtcctccgactggctccggcggcctttgggggaggacaatcagccggagacccagctgttctgggacaaggagccttggttttggcacgacactctgaccgagcaactctggcggatttttgccggcgtccacgatgagaaggcaaagcccagagacagacagcaggcaccaggcctggggcaggaaagcaaggcaccaggatcctgtgacccaggaacagacccatgtcctgaagatgcctccacccccaggccacctgaggcctcctccagtccccctgagggttcccaagacaggaacacaagttggggtgtggtccaggagcctcctggaagagcctctcggtttctacagtccatatcctgggaccctgaggactttgaagatgcatggaagaggccagatgccttgcccgggcagtcaaagagactcgccgtcccgtgcaaactggaaaagatgcggatcttggcacacggggagctcgtgctcgccacggccatcagcagcttcacgcggcacgtgttcacctgtggcagaagaggcatcaaggtgtggagcctgactggacaggtggctgaggacaggttccctgagagccacctgcctatacagacccctggggccttcctgcgcacctgcctgctgtcctcaaacagcaggagcctgctcaccggtggctacaacctggccagcgtgagcgtgtgggacctggcggcgccctccctgcatgtgaaggagcagttgccctgtgcaggtctcaactgccaggccctggatgccaacctggatgccaacctggccttcgccagcttcaccagtggtgtggtcaggatctgggacctgcgggatcagagtgtggtcagggacctcaagggttatcctgatggagtcaagagtatcgtggtcaagggctacaacatctggactgggggtccggatgcctgtctgcggtgctgggaccagaggaccatcatgaaacctctggagtaccaattcaagtctcagataatgagcctgtcccacagcccccaggaggactgggtgctgctgggcatggccaatggccagcagtggctgcaaagcaccagcgggagccagcggcacatggtggggcaaaaagacagcgtcatcctgagcgtcaagttctccccctttggccagtggtgggcaagcgttggaatggacgacttccttggcgtctacagcatgccggcggggacaaaagtgttcgaggtgcctgagatgtctccagtcacgtgctgtgacgtctcttccaacaaccgcctcgttgtcacaggctccggggagcacgcctccgtgtaccagatcacctactgaggggcctcgctgctgtcatcccactccggctcctcttttcatccccccccttccccccccccaacaagggggacatggtggagggaagcgggaaggctcttctgtggcatcgcacgatctagtctgtggtgtagactggtcgccatcacgtgtaataaagcacccgggaaaggca

SEQ ID NO: 55848 - DNA, 1880 bp, Artificial Sequence
  derived and/or modified sequence
gaacttggctgacctccgcagcttccgcccggtgagggacccttgtcctgggatctcgaactctgagagctctccgacgctgaattatcagggcattctaaatcggctcaagcagttccccaggttttctcctcattttgctgcggagttggagagcatttactactcgctgcacaagatccagcaggatgtggcagaacatcacaagcagataggaaacgtcttacagattgtggagagctgcagccaactccagggtttccagtctgaggaggtctcacctgctgaaccagccagccctgggacgccccagcaggtgaaggacaagaccctgcaggagtcgagctttgaggacatcatggccaccaggtcctccgactggctccggcggcctttgggggaggacaatcagccggagacccagctgttctgggacaaggagccttggttttggcacgacactctgaccgagcaactctggcggatttttgccggcgtccacgatgagaaggcaaagcccagagacagacagcaggcaccaggcctggggcaggaaagcaaggcaccaggatcctgtgacccaggaacagacccatgtcctgaagatgcctccacccccaggccacctgaggcctcctccagtccccctgagggttcccaagacaggaacacaagttggggtgtggtccaggagcctcctggaagagcctctcggtttctacagtccatatcctgggaccctgaggactttgaagatgcatggaagaggccagatgccttgcccgggcagtcaaagagactcgccgtcccgtgcaaactggaaaagatgcggatcttggcacacggggagctcgtgctcgccacggccatcagcagcttcacgcggcacgtgttcacctgtggcagaagaggcatcaaggtgtggagcctgactggacaggtggctgaggacaggttccctgagagccacctgcctatacagacccctggggccttcctgcgcacctgcctgctgtcctcaaacagcaggagcctgctcaccggtggctacaacctggccagcgtgagcgtgtgggacctggcggcgccctccctgcatgtgaaggagcagttgccctgtgcaggtctcaactgccaggccctggatgccaacctggatgccaacctggccttcgccagcttcaccagtggtgtggtcaggatctgggacctgcgggatcagagtgtggtcagggacctcaagggttatcctgatggagtcaagagtatcgtggtcaagggctacaacatctggactgggggtccggatgcctgtctgcggtgctgggaccagaggaccatcatgaaacctctggagtaccaattcaagtctcagataatgagcctgtcccacagcccccaggaggactgggtgctgctgggcatggccaatggccagcagtggctgcaaagcaccagcgggagccagcggcacatggtggggcaaagacagcgtcatcctgagcgtcaagttctccccctttggccagtggtgggcaagcgttggaatggacgacttccttggcgtctacagcatgccggcggggacaaaagtgttcgaggtgcctgagatgtctccagtcacgtgctgtgacgtctcttccaacaaccgcctcgttgtcacaggctccggggagcacgcctccgtgtaccagatcacctactgaggggcctcgctgctgtcatcccactccggctcctcttttcatccccccccttccccccccccaacaagggggacatggtggagggaagcgggaaggctcttctgtggcatcgcacgatctagtctgtggtgtagactggtcgccatcacgtgtaataaagcacccgggaaaggc

SEQ ID NO: 55849 - DNA, 2039 bp, Artificial Sequence
  derived and/or modified sequence
attgatctgcttcgcggtccaggtggcggctgggtggggcctgggcgggacggggcggggacaaggcgggacgaggcggggcccgatgggtcaaatggcccccggtgggggaaggaggagtttcctcttggcctgaacttggctgacctccgcagcttccgcccgactctggctaaagtcttggaggctactgccttgaagatgacctctagggaccagcccagacccaagggccccccgaaaagcacttcgccttgtcctgggatctcgaactctgagagctctccgacgctgaattatcagggcattctaaatcggctcaagcagttccccaggttttctcctcattttgctgcggagttggagagcatttactactcgctgcacaagatccagcaggatgtggcagaacatcacaagcagataggaaacgtcttacagattgtggagagctgcagccaactccagggtttccagtctgaggaggtctcacctgctgaaccagccagccctgggacgccccagcaggtgaaggacaagaccctgcaggagtcgagctttgaggacatcatggccaccaggtcctccgactggctccggcggcctttgggggaggacaatcagccggagacccagctgttctgggacaaggagccttggttttggcacgacactctgaccgagcaactctggcggatttttgccggcgtccacgatgagaaggcaaagcccagagacagacacttttccattttccaggggcaggaaagcaaggcaccaggatcctgtgacccaggaacagacccatgtcctgaagatgcctccacccccaggccacctgaggcctcctccagtccccctgagggttcccaagacaggaacacaagttggggtgtggtccaggagcctcctggaagagcctctcggtttctacagtccatatcctgggaccctgaggactttgaagatgcatggaagaggccagatgccttgcccgggcagtcaaagagactcgccgtcccgtgcaaactggaaaagatgcggatcttggcacacggggagctcgtgctcgccacggccatcagcagcttcacgcggcacgtgttcacctgtggcagaagaggcatcaaggtgtggagcctgactggacaggtggctgaggacaggttccctgagagccacctgcctatacagacccctggggccttcctgcgcacctgcctgctgtcctcaaacagcaggagcctgctcaccggtggctacaacctggccagcgtgagcgtgtgggacctggcggcgccctccctgcatgtgaaggagcagttgccctgtgcaggtctcaactgccaggccctggatgccaacctggatgccaacctggccttcgccagcttcaccagtggtgtggtcaggatctgggacctgcgggatcagagtgtggtcagggacctcaagggttatcctgatggagtcaagagtatcgtggtcaagggctacaacatctggactgggggtccggatgcctgtctgcggtgctgggaccagaggaccatcatgaaacctctggagtaccaattcaagtctcagataatgagcctgtcccacagcccccaggaggactgggtgctgctgggcatggccaatggccagcagtggctgcaaagcaccagcgggagccagcggcacatggtggggcaaaaagacagcgtcatcctgagcgtcaagttctccccctttggccagtggtgggcaagcgttggaatggacgacttccttggcgtctacagcatgccggcggggacaaaagtgttcgaggtgcctgagatgtctccagtcacgtgctgtgacgtctcttccaacaaccgcctcgttgtcacaggctccggggagcacgcctccgtgtaccagatcacctactgaggggcctcgctgctgtcatcccactccggctcctcttttcatccccccccttccccccccccaacaagggggacatggtggagggaagcgggaaggctcttctgtggcatcgcacgatc

SEQ ID NO: 55850 - DNA, 1883 bp, Artificial Sequence
  derived and/or modified sequence
gaacttggctgacctccgcagcttccgcccggtgagggacccttgtcctgggatctcgaactctgagagctctccgacgctgaattatcagggcattctaaatcggctcaagcagttccccaggttttctcctcattttgctgcggagttggagagcatttactactcgctgcacaagatccagcaggatgtggcagaacatcacaagcagataggaaacgtcttacagattgtggagagctgcagccaactccagggtttccagtctgaggaggtctcacctgctgaaccagccagccctgggacgccccagcaggtgaaggacaagaccctgcaggagtcgagctttgaggacatcatggccaccaggtcctccgactggctccggcggcctttgggggaggacaatcagccggagacccagctgttctgggacaaggagccttggttttggcacgacactctgaccgagcaactctggcggatttttgccggcgtccacgatgagaaggcaaagcccagagacagacagcaggcaccaggcctggggcaggaaagcaaggcaccaggatcctgtgacccaggaacagacccatgtcctgaagatgcctccacccccaggccacctgaggcctcctccagtccccctgagggttcccaagacaggaacacaagttggggtgtggtccaggagcctcctggaagagcctctcggtttctacagtccatatcctgggaccctgaggactttgaagatgcatggaagaggccagatgccttgcccgggcagtcaaagagactcgccgtcccgtgcaaactggaaaagatgcggatcttggcacacggggagctcgtgctcgccacggccatcagcagcttcacgcggcacgtgttcacctgtggcagaagaggcatcaaggtgtggagcctgactggacaggtggctgaggacaggttccctgagagccacctgcctatacagacccctggggccttcctgcgcacctgcctgctgtcctcaaacagcaggagcctgctcaccggtggctacaacctggccagcgtgagcgtgtgggacctggcggcgccctccctgcatgtgaaggagcagttgccctgtgcaggtctcaactgccaggccctggatgccaacctggatgccaacctggccttcgccagcttcaccagtggtgtggtcaggatctgggacctgcgggatcagagtgtggtcagggacctcaagggttatcctgatggagtcaagagtatcgtggtcaagggctacaacatctggactgggggtccggatgcctgtctgcggtgctgggaccagaggaccatcatgaaacctctggagtaccaattcaagtctcagataatgagcctgtcccacagcccccaggaggactgggtgctgctgggcatggccaatggccagcagtggctgcaaagcaccagcgggagccagcggcacatggtggggcaaaaagacagcgtcatcctgagcgtcaagttctccccctttggccagtggtgggcaagcgttggaatggacgacttccttggcgtctacagcatgccggcggggacaaaagtgttcgaggtgcctgagatgtctccagtcacgtgctgtgacgtctcttccaacaaccgcctcgttgtcacaggctccggggagcacgcctccgtgtaccagatcacctactgaggggcctcgctgctgtcatcccactccggctcctcttttcatccccccccttccccccccccaacaagggggacatggtggagggaagcgggaaggctcttctgtggcatcgcacgatctagtctgtggtgtagactggtcgccatcacgtgtaataaagcacccgggaaaggca

SEQ ID NO: 55851 - protein, 548 aa, Artificial Sequence
  derived and/or modified sequence
MKTLETQPLAPDCCPSDQDPAPAHPSPHASPMNKNADSELMPPPPERGDPPRLSPDPVAGSAVSQELREGDPVSLSTPLETEFGSPSELSPRIEEQELSENTSLPAEEANGSLSEEEANGPELGSGKAMEDTSGEPAAEDEGDTAWNYSFSQLPRFLSGSWSEFSTQPENFLKGCKWAPDGSCILTNSADNILRIYNLPPELYHEGEQVEYAEMVPVLRMVEGDTIYDYCWYSLMSSAQPDTSYVASSSRENPIHIWDAFTGELRASFRAYNHLDELTAAHSLCFSPDGSQLFCGFNRTVRVFSTARPGRDCEVRATFAKKQGQSGIISCIAFSPAQPLYACGSYGRSLGLYAWDDGSPLALLGGHQGGITHLCFHPDGNRFFSGARKDAELLCWDLRQSGYPLWSLGREVTTNQRIYFDLDPTGQFLVSGSTSGAVSVWDTDGPGNDGKPEPVLSFLPQKDCTNGVSLHPSLPLLATASGQRVFPEPTESGDEGEELGLPLLSTRHVHLECRLQLWWCGGAPDSSIPDDHQGEKGQGGTEGGVGELI

SEQ ID NO: 55852 - protein, 188 aa, Artificial Sequence
  derived and/or modified sequence
MKTLETQPLAPDCCPSDQDPAPAQPDTSYVASSSRENPIHIWDAFTGELRASFRAYNHLDELTAAHSLCFSPDGSQLFCGFNRTVRVFSTARPGRDCEVRATFGKHLCLQGRRRGKGTATCTGAFCEPGATCGGSRRPLYGPGSRCSPVGRGANRLRAGRKPSQGQPAGQRTASFLNSYPVSCGAFGL

SEQ ID NO: 55853 - DNA, 1647 bp, Artificial Sequence
  derived and/or modified sequence
atgaagaccctggagacccagcccctggcccccgactgctgccccagcgaccaggaccccgcccccgcccaccccagcccccacgccagccccatgaacaagaacgccgacagcgagctgatgccccccccccccgagagaggcgacccccccagactgagccccgaccccgtggccggcagcgccgtgagccaggagctgagagagggcgaccccgtgagcctgagcacccccctggagaccgagttcggcagccccagcgagctgagccccagaatcgaggagcaggagctgagcgagaacaccagcctgcccgccgaggaggccaacggcagcctgagcgaggaggaggccaacggccccgagctgggcagcggcaaggccatggaggacaccagcggcgagcccgccgccgaggacgagggcgacaccgcctggaactacagcttcagccagctgcccagattcctgagcggcagctggagcgagttcagcacccagcccgagaacttcctgaagggctgcaagtgggcccccgacggcagctgcatcctgaccaacagcgccgacaacatcctgagaatctacaacctgccccccgagctgtaccacgagggcgagcaggtggagtacgccgagatggtgcccgtgctgagaatggtggagggcgacaccatctacgactactgctggtacagcctgatgagcagcgcccagcccgacaccagctacgtggccagcagcagcagagagaaccccatccacatctgggacgccttcaccggcgagctgagagccagcttcagagcctacaaccacctggacgagctgaccgccgcccacagcctgtgcttcagccccgacggcagccagctgttctgcggcttcaacagaaccgtgagagtgttcagcaccgccagacccggcagagactgcgaggtgagagccaccttcgccaagaagcagggccagagcggcatcatcagctgcatcgccttcagccccgcccagcccctgtacgcctgcggcagctacggcagaagcctgggcctgtacgcctgggacgacggcagccccctggccctgctgggcggccaccagggcggcatcacccacctgtgcttccaccccgacggcaacagattcttcagcggcgccagaaaggacgccgagctgctgtgctgggacctgagacagagcggctaccccctgtggagcctgggcagagaggtgaccaccaaccagagaatctacttcgacctggaccccaccggccagttcctggtgagcggcagcaccagcggcgccgtgagcgtgtgggacaccgacggccccggcaacgacggcaagcccgagcccgtgctgagcttcctgccccagaaggactgcaccaacggcgtgagcctgcaccccagcctgcccctgctggccaccgccagcggccagagagtgttccccgagcccaccgagagcggcgacgagggcgaggagctgggcctgcccctgctgagcaccagacacgtgcacctggagtgcagactgcagctgtggtggtgcggcggcgcccccgacagcagcatccccgacgaccaccagggcgagaagggccagggcggcaccgagggcggcgtgggcgagctgatctag

SEQ ID NO: 55854 - DNA, 1647 bp, Artificial Sequence
  derived and/or modified sequence
atgaaaactctcgaaacccagcctcttgcccctgactgctgccccagcgatcaggatcccgcacccgcacacccctcgccccacgcttctccgatgaacaagaatgctgattcggagctgatgccaccgccccccgaacgcggcgacccaccacgtctcagtcccgatcctgtggccggcagcgcagtgagccaggagctgagagagggagaccctgtctccttgagtacccctctcgagactgaattcgggtcaccatccgaactgtcaccccgtatcgaggaacaggagctgagtgaaaatacttccttgccagcagaggaagcaaacggctcattgtcggaggaagaagctaacgggccagagctgggatccggtaaagcgatggaagatacctccggcgagcccgctgccgaagacgagggggatacggcgtggaactacagcttctctcaactgccgcggttcttatcgggatcttggtctgaattctctactcagcctgagaatttcctcaaaggatgcaagtgggccccggacggctcttgcattctcacaaattcagcggacaatatactccgaatatacaaccttcctcctgagctgtaccatgaaggcgagcaggtcgaatatgcagaaatggtgccagtgctgcggatggtagagggcgataccatatatgactattgttggtattcattgatgtcatcggcacagcctgacacctcctatgtcgcatcaagttctagggaaaatccaatccacatctgggatgccttcacaggtgaacttagagcgtctttccgagcctacaatcatctcgatgagctgaccgcggcccattctttgtgcttcagtcccgatggaagtcaattattttgcggcttcaatagaacagtgagggtcttttccaccgcaaggccagggcgtgactgcgaggtacgtgctactttcgctaaaaagcagggtcaaagtggaatcatctcctgcatcgctttctcacccgcacagccattatatgcctgtggaagctacggtcggtccctgggtttatacgcctgggatgatggatcaccgctggccttgctgggcggccaccaggggggtatcacgcatctctgttttcacccagatggaaataggttctttagcggcgcacgtaaggacgctgagcttctttgctgggacctcaggcagagcgggtatcctctctggtctctgggccgtgaggtgaccactaatcagcgcatttatttcgacctggatccaaccggacagttcctggtctcaggatccacgtccggggccgttagcgtctgggatactgacggtccgggcaatgatgggaagccggagccggtcttgtctttcctgccacagaaagactgtaccaacggagtatccctgcacccgagtctgcccttgctggccaccgcatccggacagagggtttttcctgagcctactgaaagcggggacgaaggcgaggaactaggcctaccactgctgagtacaaggcacgtgcaccttgagtgtaggctgcagctatggtggtgcggcggcgccccagactccagcattcccgacgatcaccaaggcgaaaaaggccaggggggaaccgagggaggagtgggcgagctgatctag

SEQ ID NO: 55855 - DNA, 1647 bp, Artificial Sequence
  derived and/or modified sequence
atgaagacccttgagacccagccgctcgctcctgattgctgcccctccgatcaagatcctgcaccggcccacccatcacctcacgcctctcctatgaacaagaacgctgattccgaacttatgcctcctcctccagaaaggggtgatcctccaaggctgagtcctgaccctgtggccggcagcgcagtttcccaggaactccgggagggcgaccccgtgtctctctctacccccttagagaccgaattcggcagcccaagtgagctgtccccccggatagaagagcaggagctgagcgagaatacaagccttcctgcagaagaggcgaatggaagtctgtccgaagaggaagccaatggtccggagctcggcagcggtaaggccatggaggatactagcggggaacctgcagccgaggacgaaggagacactgcatggaattattctttcagtcagctgcctcgcttcctctcaggctcttggagtgagttttctacacagcctgaaaactttcttaaggggtgcaaatgggcaccggatggcagctgtatcctcacaaattccgccgataacattttacggatttacaatctgcccccggaactctatcacgagggtgagcaggtggaatatgcggaaatggttcctgtgctgcggatggttgagggagacaccatctatgattactgctggtattccctgatgtcctctgctcagcctgatacaagctacgtcgcaagtagctctcgggagaatcctatacacatctgggacgcattcactggagagctgcgcgcaagcttcagagcatataaccacttggatgagttgacagccgctcacagtctctgctttagccccgatggctcccaactgttctgcgggttcaacaggacagtgcgcgtattcagtacagctcgccctggcagagattgcgaagtgcgtgctaccttcgcgaagaagcaggggcaatctgggattatatcatgcatcgcctttagcccagctcagcctctttacgcctgcggaagttacggaagatctctcggactatacgcatgggatgatggatcccccctggccctgctaggcggccaccagggcggaatcacacatctgtgctttcacccagatggaaacagatttttctccggagcacggaaagacgccgagcttctctgctgggatctgcgccagtcaggataccccctgtggtctctaggtcgagaggtgaccacaaaccagagaatttatttcgacttagatcctactggtcagttcctggtgagtggctccacctccggagcagtatctgtgtgggacactgatggacccgggaatgatggcaagcctgagccagtactgagtttccttccccagaaagactgtacaaatggcgtttcactacatcctagcctcccccttctggccaccgcctcaggccagagagtcttccctgagccgaccgagtctggggacgagggtgaggagcttgggctgccactcttatccactcgccacgtccatctggagtgccgactgcaactttggtggtgcggaggcgctcccgacagcagtatcccagatgaccaccaaggcgagaaaggacaaggcggcacagaggggggagtcggggaactgatttag

SEQ ID NO: 55856 - DNA, 1647 bp, Artificial Sequence
  derived and/or modified sequence
atgaaaacattagagactcagcctctggcaccagactgttgccctagcgatcaggacccggccccagctcatccctctccacacgccagccctatgaacaagaatgcagacagcgaactaatgccaccccctcccgaacgcggagacccaccccggctctcccccgaccctgtggccggtagcgccgtgagccaggaactacgagagggggatcccgtcagcctgagtacacctcttgagaccgaattcgggagtccctccgaattgtccccccgtatagaggagcaggagcttagcgagaataccagcttgcccgccgaagaggcaaacggatccctgtccgaggaggaagcgaatgggcctgaactggggagcgggaaagcgatggaggataccagtggtgaaccggctgccgaggatgaaggcgacaccgcttggaattactcattctcccagcttccgagattccttagcggctcctggtccgaattttcaacacagcccgaaaacttcttgaaaggctgtaagtgggcacctgacggatcctgcattctgactaactctgcagataacatcttgcggatctacaacttaccgccagagctttatcacgaaggggaacaggtagaatacgccgagatggtccccgtacttagaatggtagaaggcgacacgatctacgattattgctggtactccttgatgtcgtctgctcagccagataccagttacgtagcatcctcatcccgcgagaaccctattcacatttgggacgcctttacaggtgaactgagggcgtccttcagggcttacaatcatctggatgaactcacagccgcacactccctttgcttctccccggatggatcccaactgttctgcgggttcaatcgcacagtgcgtgtcttctctaccgcccggccaggaagggattgtgaagtgagggcaacttttgcaaagaagcaagggcagagcgggattatatcatgtattgccttctcccctgctcagccgctgtatgcctgtggaagttacggacgctcactgggactgtacgcgtgggacgatggatccccgttagctctgctgggcggccaccagggcggtatcactcatctatgcttccatccggacggcaaccgtttttttagtggagcacggaaggatgcagaactcttatgctgggatctcaggcagagcggttaccctctgtggtccctgggcagagaggtgacaaccaatcagcgcatctattttgacctggaccccacgggccagttcctagtcagtggttccacatctggggccgtgagcgtgtgggatactgatggcccaggaaatgatgggaagccagagcctgttctgagttttttgccccagaaggactgtacgaacggcgtgagcctgcatccctccctgccacttctggccacagctagcggacagcgggtgtttcccgaacccactgagtcaggtgacgagggggaggaactgggactgccactactctcgacacggcatgtgcatctagagtgtcgcctgcaactctggtggtgcgggggcgccccggacagttcaataccagatgaccaccagggcgagaagggtcagggggggaccgaaggcggggttggagagctgatctag

SEQ ID NO: 55857 - DNA, 1647 bp, Artificial Sequence
  derived and/or modified sequence
atgaaaactcttgagacccaaccattagcgcctgactgctgcccttcagaccaggaccctgccccagctcatccatcaccccacgcctccccaatgaataaaaacgccgattcagaactaatgcctcccccaccggagagaggcgatcctccccgcctatcgcccgaccctgtggccgggtctgccgtttcccaagaactgcgggagggtgaccccgtgagcctctctacgcccctggaaacagagtttgggagtcccagtgagctctcccctcggatcgaagaacaggaactgagtgaaaacaccagcctgcccgccgaggaagctaacggaagcctgtctgaggaggaggccaacggccccgaactgggttccggaaaggccatggaggatactagtggagagcctgcagctgaagacgagggcgacaccgcctggaactacagcttttcccagctgcctagattcctgtcaggctcgtggtctgagttctcaacccagcccgaaaacttcctgaagggctgtaagtgggctcccgacggatcgtgtattctcacgaacagtgcagacaacattctacggatatataacctaccacccgagttgtatcacgaaggggagcaggtagaatacgcggaaatggtgcccgttctccgaatggtggagggcgacaccatctacgactactgctggtatagcctgatgagctccgcgcagcctgacaccagttatgtcgcttcaagtagtcgagagaaccctatccacatctgggacgcgttcaccggcgagcttagggccagcttccgtgcatataatcatctggatgagcttacagctgcccattcattatgcttcagtcccgatggatctcagctgttctgcggctttaataggactgtgcgcgtgttctccactgccagacccggacgggactgtgaggtgcgggctaccttcgccaagaagcagggccaatcagggataattagttgtatcgccttctctccagcacagcccctgtacgcatgcggcagctatggccggtccctcggtctgtacgcctgggatgatgggtcccctctagccctgctgggtggtcaccaaggcggcatcacgcacctgtgctttcatccagacggcaatagattcttctccggggcacgaaaagatgcggagctcctgtgttgggacctgcggcagtcggggtaccccctttggtctcttggcagggaagttacaacaaatcagaggatctattttgacttggacccaaccggccagttcctggttagcggcagtacaagcggggccgtcagcgtatgggacacggacggccctggcaatgacggcaagccggagcctgtactgtcttttcttccacagaaagactgtactaacggagtgtccctgcatccatccctccccctcctggctacagcctccggtcagagagtgtttcccgagccaacggagagcggagacgaaggagaagaacttggcctcccactcctgagcacccggcacgtccacctcgagtgcaggctgcagctgtggtggtgtggaggggcaccagactcaagcattcctgacgatcaccagggcgaaaagggacaaggtgggactgaggggggagttggggagctgatctag

SEQ ID NO: 55858 - DNA, 1647 bp, Artificial Sequence
  derived and/or modified sequence
atgaagaccctggagacccagcccctggccccagactgctgccccagcgaccaggaccctgccccagcccaccccagcccccacgccagccccatgaacaagaatgctgacagcgagctgatgcctcctcctcctgagcggggggaccccccccggctgagcccagaccctgtggccggcagcgctgtgtcccaggagctgcgggagggggaccctgtgtccctgagcacccccctggagacagaatttggcagccccagcgagctgagccccagaattgaggagcaggagctgtctgagaacaccagcctgcctgctgaggaggccaacggcagcctgtctgaggaggaggccaatggacctgagctgggcagcggcaaggccatggaggacaccagcggggagcctgctgctgaagatgaaggagacacagcctggaactacagcttcagccagctgccccgcttcctgagcggctcctggagcgagttcagcacccagcctgagaacttcctgaagggctgcaagtgggccccagatggcagctgcatcctgaccaacagcgctgacaacatcctgcgcatctacaacctgcccccagagctgtaccacgagggggagcaggtggagtatgcagagatggtgcctgtgctgaggatggtggagggggacaccatctatgactactgctggtacagcctgatgagcagcgcccagcctgacaccagctatgtggccagcagcagccgggagaaccccatccacatctgggatgccttcaccggggagctgcgggccagcttccgggcctacaaccacctggatgagctgacagctgcccacagcctgtgcttctccccagatggcagccagctgttctgtggcttcaacagaacagtgcgggtcttcagcacagcccggcccggccgggactgtgaggtgcgggccacctttgccaagaagcagggccagagcggcatcatcagctgcatcgccttctccccagcccagcccctgtatgcctgtggcagctatggccgcagcctgggcctgtatgcctgggatgatggcagccccctggccctgctgggcggccaccagggcggcatcacccacctgtgcttccacccagatggcaaccgcttcttcagcggggccaggaaggatgctgagctgctgtgctgggacctgcggcagagcggctaccccctgtggagcctgggccgggaggtgaccaccaaccagaggatctactttgacctggaccccaccggccagttcctggtgtctggcagcaccagcggggctgtgtctgtgtgggacacagatggccctggaaatgatggcaagccagagcctgtgctgtccttcctgccccagaaggactgcaccaatggagtgtccctgcaccccagcctgcccctgctggccacagccagcggccagagggtcttccctgagcccacagaaagtggagatgaaggagaggagctgggcctgcccctgctgagcaccaggcatgtgcacctggagtgccgcctgcagctgtggtggtgtggcggggccccagacagcagcatcccagatgaccaccagggcgagaagggccagggcggcacagagggcggcgtgggggagctgatctag

SEQ ID NO: 55859 - DNA, 1647 bp, Artificial Sequence
  derived and/or modified sequence
atgaagaccctggagacccagcccctggcccccgactgctgcccctccgaccaggacccggctccggcccatcctagcccccatgcgagccccatgaacaagaatgccgacagtgaactgatgccgccaccccccgagcggggtgaccctccacggctgtcccctgatcccgtggctgggtccgccgtctcccaggaactgcgtgagggcgatcctgtttctctgtcgacacctctggagaccgaatttggctcaccgagcgagttatcgcccagaatcgaagaacaagaactctccgaaaatacgagtctacccgccgaagaggccaacggttccctttctgaggaggaggctaatgggccagagctgggtagtggaaaggctatggaggatacttctggcgaaccggctgcagaagatgagggcgacaccgcctggaattacagtttcagtcagctcccgcgatttctgtccggctcttggagtgagttctcaacacagcctgagaactttctgaaaggctgtaaatgggcaccagacggctcctgtatcctgaccaattctgccgataacatcctgaggatctacaatcttccacccgagctttatcatgagggggaacaggtggaatacgccgaaatggtaccagtgttacggatggttgagggggatacgatatacgattattgttggtactccctgatgtcatctgcccaaccagacacctcttacgtggcctcaagctcaagggagaaccctatccacatctgggacgcctttaccggcgagttacgggcgtcattcagggcctacaaccatctcgacgagttaacagccgcccactctctgtgtttttctccagatggttcacagttgttttgtggcttcaataggaccgtcagagtgttctctaccgcacggccagggagagactgtgaagtgcgcgccacctttgcaaagaagcagggccagtctggcatcatcagctgcatcgctttcagcccggcccagccactttatgcatgtggttcatacggccgcagcctaggattgtacgcctgggacgatggttcccctcttgcacttctggggggacatcaaggggggataacccacctctgttttcatcctgatggcaatcgctttttttccggagccagaaaggatgctgagctgctttgctgggacttacgacagtccggataccccctctggagcctgggtcgggaggttacaactaaccagcgaatttactttgacctggaccccactggtcagttcctggtgtctggtagtacgtcaggagccgtgagcgtgtgggataccgacgggcctggaaatgatggcaaaccagagcccgtgctgagcttcttgcctcagaaagactgcacgaatggggtgtctttgcacccgtcgcttccgctgttagccactgcctccgggcagcgggtcttcccagaacccaccgagtccggcgacgagggagaggaactggggctcccgcttctcagcaccagacacgtgcacctcgaatgtcgcctccagctgtggtggtgcgggggagctcccgactcgtcaatccccgacgatcaccagggggagaagggccagggtggaactgagggtggtgtgggggagctgatatag

SEQ ID NO: 55860 - DNA, 1647 bp, Artificial Sequence
  derived and/or modified sequence
atgaagaccctggagacccagcccctggcccccgactgctgcccctccgatcaggatcctgcacccgcccacccctcacctcacgcctcaccaatgaataaaaacgctgactctgagctcatgccacctccccctgagagaggcgacccacctagattgagtccagatccagtggccggatctgcagtttcgcaggaactgcgtgagggggaccctgtgagtctctccacgcctttggaaaccgaattcggatccccatcagaattaagcccaagaattgaggaacaggagctgagcgagaatacatccctgccagcagaggaggcgaacggttccctgagtgaagaagaagcgaacggaccagagcttggctccggcaaggcgatggaggacacctcaggggagccggccgcagaagacgaaggcgataccgcttggaattactcattctcacagctgcctaggttcctgtccgggtcttggagcgaattcagcactcagcccgaaaattttctgaaaggttgtaagtgggcgcctgacggctcctgtattctgaccaactctgcagataacatactgcgaatttacaacctgcctcccgaactttaccacgagggcgaacaggtcgagtatgcagaaatggtcccagtgcttcgaatggtggagggagacaccatctacgattattgctggtactccctcatgtccagcgctcaacccgatacaagctacgtggctagtagcagtagggagaaccccatccatatatgggacgcattcacaggcgagctgcgagcttctttccgtgcttacaaccacctagatgagttaacagccgcacactccttgtgcttttctccagatggctcacagctcttttgcggctttaatcggacagtccgggtttttagcaccgcccgcccggggcgggattgcgaggtgcgagcaacctttgccaagaaacagggccagtctgggattatttcgtgtatagccttcagtcctgcccagcctctctatgcttgtggaagttatggacgttctctgggtctttacgcatgggacgatggcagtccacttgctctcctgggaggccaccagggaggaattacgcatctgtgctttcaccccgacggcaaccgtttcttcagtggagccagaaaggatgccgagctactgtgctgggatctgagacagtccggctacccactgtggtctttggggagggaagtcaccacaaaccagcgaatctatttcgatctggatcccacaggacagttcttagtgtctggcagcacatctggggctgtgtcagtgtgggataccgacgggcccgggaatgatggcaaacccgagcccgtcctgtcatttttgccccagaaagactgcaccaacggggtatcgttgcacccctctttgcctttgctggctactgcaagcgggcagagagtcttcccagaaccaactgaatcaggcgacgagggcgaagaattgggattgccactgctgagcactagacacgtgcatctggagtgcagacttcagctgtggtggtgtggaggggcacctgattcatccatcccagatgaccaccagggagagaaaggtcagggcggcactgaaggcggcgtgggcgagcttatttag

SEQ ID NO: 55861 - DNA, 1647 bp, Artificial Sequence
  derived and/or modified sequence
atgaagaccctggagacccagcccctggcccccgactgctgcccctctgaccaagacccggcacccgcccatcctagcccgcatgcttctccaatgaacaaaaatgctgacagcgagctaatgcctcccccaccggagcgaggcgatccgcccagactaagtcccgacccagtggccggcagcgccgtgagtcaagaattacgcgagggtgaccctgtgagtctgtctacaccactggaaaccgagtttggaagcccctctgaactgtcccctaggatagaggagcaggaactctcggagaacaccagtctgcccgctgaggaagcaaacggctctctctcagaggaagaagctaatggaccggagttgggttcgggcaaagccatggaggatacctccggtgaacccgccgccgaggatgagggagatacagcctggaattattcattttcccaactgcctaggttcctgtctgggagttggtccgaattctctacacagccagagaactttcttaagggctgcaagtgggcgcctgatggtagctgcatccttaccaacagcgccgataacatactgcgcatctataacctgccaccagagctgtaccatgagggtgagcaagtcgagtatgcggagatggtaccagttctgagaatggtggaaggcgataccatttatgattattgttggtactccttgatgtcttctgcccaaccagatacgtcgtacgtagctagttcgagcagggaaaaccctatccatatttgggacgcattcactggcgaattaagagccagctttagagcgtataatcacctcgatgaactgacagcagctcatagtctctgtttttcaccggacggatctcagctgttctgcgggttcaatagaaccgtgcgagtttttagcactgctcgaccagggcgggactgcgaggtgcgcgccacctttgctaagaagcaagggcagtcaggcattatctcttgcatcgcattttcgcctgcccagcctctttacgcatgtggtagctacggacgcagtctgggcctgtatgcctgggatgacggctcgcctctggctttgcttggcggccatcagggaggcatcacccatctgtgcttccatccggacggcaaccggtttttcagcggcgctagaaaggatgcagaactgctgtgttgggacctgcgacagtctgggtaccctctgtggtctttaggtagggaggttacaacaaaccagcgcatatattttgacctggatcccactggacagttcttagtgtctggaagcactagcggcgcagtgagtgtgtgggacactgatggacctggcaacgatggaaaacccgagccagtgctgtcgtttttgcctcagaaagattgtaccaacggagtgtcattgcaccctagtctgcctctccttgccacagccagtggtcagcgagtgttccccgagcccacggaatccggagacgaaggagaagaactcgggttgcctctcttatccactagacatgtccatcttgagtgtcgcctacagctgtggtggtgtggcggcgcaccagacagctccattcccgatgaccaccagggagaaaaaggccagggcggcactgaagggggggtcggagagttaatttag

SEQ ID NO: 55862 - DNA, 1647 bp, Artificial Sequence
  derived and/or modified sequence
atgaagaccctggagacccagcccctggcccccgactgctgcccctccgaccaggatccagcccccgcccacccctctccccatgcatctccaatgaacaaaaacgcagatagtgagttgatgccccctcctccggagaggggcgacccaccccgcctatctcctgaccctgtcgcaggttcagccgtttcgcaagaactccgagagggtgatcccgtcagtctctcaacgccgctggagactgagtttggaagcccttcagaactgtcaccaaggatcgaggagcaggagctttccgaaaatacgagcctacctgccgaggaagcaaacggatcacttagcgaggaggaggccaatggacctgagctgggttctggcaaagcaatggaagacactagcggggagcccgccgccgaggacgagggggacacggcttggaactactcattttcacagctgcctcgtttcttgtcggggtcctggtccgagttcagtacgcagcctgagaattttctgaaggggtgcaaatgggctcccgacggctcatgcatcctgacaaattctgccgacaatattctgaggatctacaacttgcctccagaattataccacgagggcgaacaggtggagtacgccgaaatggtccccgtgctccgaatggtggagggagatacaatctacgattattgttggtactctctgatgtctagcgcccagcccgacacttcctatgtggccagctcctcgcgggaaaacccaattcacatatgggacgctttcaccggggaacttagggcctccttcagagcctataatcacttagatgagctcactgccgcacactccctctgcttcagtcctgacgggagtcagctcttctgcggcttcaaccgaaccgttagggtgttcagtaccgcacggccaggaagagactgtgaagtgagagcaacattcgcaaagaaacaagggcagagtggtatcatcagctgtattgcctttagtcccgcacagcctctgtacgcctgcgggagctacgggaggagtttaggtctgtacgcctgggatgacggcagtccacttgctctgctggggggacatcaggggggaatcacccacttgtgcttccaccctgacggaaacagatttttttcgggggcacgtaaggatgccgagttgttatgttgggacttacggcaaagcgggtatcctctgtggtctctcggaagagaggtgaccactaatcaaaggatttatttcgatctggacccaacagggcaattcctggtcagcgggagtacttccggtgcggtgtccgtctgggacaccgatggccctggaaatgatggaaaaccagagcctgtcctgtccttcctgccacaaaaagactgcacaaacggggtctccctccatccaagcctgcctttgttggctacagcatctggacagcgcgtctttccagagccaaccgagtccggcgatgaaggagaggaactcgggttacctctgctgtccactcgccacgtccatctagagtgccggctgcagctgtggtggtgtgggggagcacccgatagttccatcccggacgaccatcagggggaaaagggacaaggcggtaccgaaggtggcgtcggtgagctaatctag

SEQ ID NO: 55863 - DNA, 1647 bp, Artificial Sequence
  derived and/or modified sequence
atgaaaacactcgaaactcaaccgctggcccctgattgctgccccagtgaccaggaccccgcaccagcccatccaagtccgcatgcatcacctatgaataagaatgcagatagcgaactgatgccaccaccccctgaacgaggggacccacctagattaagccctgatccagtcgctggatcagccgtctcccaggagctacgagagggcgacccagtctccctgagcacgcctctggagacagagttcggctcccccagcgagctgagccccaggatcgaggaacaggagttgtccgaaaacacatccctacccgctgaggaagcgaatggctctttgagcgaggaggaggctaatggaccagaattaggttcgggaaaggccatggaggacacttctggggaacctgcggcagaggacgaaggcgacaccgcctggaactatagttttagccaactcccacggtttctctctggatcatggagtgaattttctacccagcccgagaatttcctgaagggctgcaaatgggccccagatgggagctgcattctcaccaattcagccgacaacatcctccgcatctataacctgcctccagagttgtatcatgaaggcgagcaggtggagtatgctgagatggttccggtgctgagaatggttgagggagacaccatatacgactattgttggtatagtctcatgtcctctgcccagcctgatacttcttatgtggcctccagttctagggagaaccctatccacatctgggatgcatttactggcgagcttcgcgcttcttttcgtgcttataatcacctggatgagcttactgcagcccattccctgtgtttttcccccgacggctctcagctattctgcggattcaaccgcaccgtccgggtattctcaactgctcgacccggaagggactgtgaagtgcgcgcaacatttgctaaaaaacagggacagtctggtatcatctcttgcatcgcatttagtcccgctcagcccttgtatgcctgcgggtcatatggccgaagtctgggattgtacgcatgggacgatggaagcccattagccctcttgggaggccaccaggggggaatcacccatctgtgtttccaccccgatgggaatcgtttctttagcggtgcgagaaaggacgccgaactcctttgttgggatctgagacagtctggctatcctttgtggagcctcggccgtgaagttacaactaaccaacggatctacttcgacctggacccaaccggccagtttcttgtgtctgggagcacaagcggagctgtatccgtctgggataccgatgggccaggcaatgacggaaagccagagcccgttttatcgtttcttccccagaaggactgtacaaatggtgtgtcattgcatcctagcctgcccctccttgccacagcatccggtcagcgtgtttttccagagcctactgaatcaggcgacgagggagaagagctcggactgccactgctgtccacaagacacgtgcaccttgaatgtagactgcagctctggtggtgtgggggagccccagacagctcaatccctgatgatcaccagggagagaaaggccagggcggtaccgaggggggagtgggggaactgatttag

SEQ ID NO: 55864 - DNA, 1647 bp, Artificial Sequence
  derived and/or modified sequence
atgaagacactcgagacgcaaccactcgcacctgattgttgcccatcagatcaagatccggctcccgctcatccctcaccgcatgccagtcccatgaataagaacgctgactccgagctgatgccccctcctcctgaaagaggcgatcccccacggctgtctccggatcccgtggctgggagcgcagtgtcacaggagctgcgggagggagatccagtgtccctgagtacgcccctcgagacggaattcggctcaccaagcgaactctctccccgaatcgaggagcaagaactgtccgagaacacgagtctgccagccgaagaggctaatgggagtttgtcagaagaagaagcaaatgggccagaactcggctccggcaaggccatggaggatactagcggagaacccgcagctgaagacgagggcgatacagcctggaattattctttttcgcaactccctcggttcttatctgggtcatggtccgagttcagcactcagccagagaactttctcaaaggctgcaaatgggctccagacggtagctgcattcttactaatagtgcagataatatactacggatctacaacctgcccccagaactgtaccatgagggggagcaggtcgagtacgccgagatggtcccggtgcttagaatggtggagggtgacaccatctacgactactgttggtattcgctgatgtcctccgcccagcccgatacttcttatgtcgcaagttcctcccgtgagaatcctatacacatctgggatgcctttacaggcgagttacgagctagttttcgggcatacaaccacttagacgagttgaccgccgctcactcactgtgttttagccctgatgggagccagcttttctgcggctttaaccgcactgtgagggtcttttccacagctagacctggcagggattgtgaggttcgggcaaccttcgcaaagaagcaggggcagagcgggatcatatcctgcatcgccttctctccagcccagccactctatgcttgcggctcgtatgggagaagcctcggactatatgcctgggatgatgggagccctttggcccttctcggaggtcaccaaggaggaatcacacatctttgtttccatcccgatggcaataggttcttcagcggcgctcggaaggacgctgaactgctttgctgggatctgcggcagtccggatacccactctggtccctgggcagagaggtcacaaccaatcagcgcatttacttcgatttggacccaactggtcagttcttagtgagtggctctacctcgggagccgtgagtgtgtgggatactgatggtcctggaaatgacggcaaaccggaacctgtgctgtcttttctgccccaaaaggattgcaccaacggggtgagtctgcaccccagcctgcccctcctggcaactgcctcaggacagcgagtctttcccgagcccactgaatccggcgatgaaggagaggagcttgggctgcccctgctgtccacacgacacgtccatctggaatgtagattgcaactgtggtggtgcgggggtgcccctgattcaagcattcccgacgatcaccaaggtgagaaggggcagggaggcacagaagggggtgtaggcgagttgatctag

SEQ ID NO: 55865 - DNA, 1647 bp, Artificial Sequence
  derived and/or modified sequence
atgaagactctggagacacagccattagcccctgactgttgtccaagtgaccaggatcctgcccctgcgcatccgagcccacacgcttcccccatgaataaaaacgctgattctgagcttatgccgccaccccctgagaggggtgatcctccaagactaagtccggacccagtcgctggatccgcggtctcacaggaactcagggagggggatcctgtgagtttgtcaacccctctcgaaactgagttcggcagtccttcagaactctcacccaggattgaggaacaggaactcagtgagaatacctctcttcctgcggaggaggctaacggctccctgtcggaagaagaagcgaacggtcccgaactgggcagcgggaaggccatggaagatacttccggcgagcctgcggctgaagatgagggagataccgcctggaattactcattttcacagctgccccgttttctgagtggatcctggtccgagtttagcacccagcccgaaaattttctgaagggttgcaagtgggccccagatggtagttgcatactcacaaattccgcggacaacatcttgaggatatacaatctgcccccagagctttaccacgaaggtgagcaagtggaatatgcagaaatggtgcctgtgcttcgcatggtcgaaggcgacaccatctatgattactgctggtactctctgatgtctagcgcacaaccagatacgtcctacgttgccagctcatcacgcgaaaaccccattcatatctgggacgcattcactggtgaactgcgtgcaagctttagggcatacaatcacctggatgagttgacagccgctcacagtctttgcttttcgccagacggtagccagctgttttgtggattcaatcgaacggtgagagtgttctccaccgcccgacccggaagagattgcgaggtgcgggcaactttcgccaagaaacagggacagtccggaattatcagctgtattgcctttagccccgctcaaccactgtacgcctgcggtagctacggacgctctttggggctttatgcctgggatgacggctctccactggcccttctgggcggtcaccagggaggtattactcatctctgtttccaccctgacggtaatagattctttagcggagcgagaaaagatgcggagctgctttgctgggatctgcgacagtcaggctaccccctttggagcctaggtcgtgaagtgacaacaaatcagagaatctatttcgacctggatcccactggacagttcttggttagcgggtccacatccggcgctgtatccgtgtgggacaccgatggtcctggcaatgacggaaagcctgaaccagtgttgagctttcttcctcagaaggactgtacaaatggtgtcagtctacatccttctttgcccctactggccactgcatctgggcaacgcgtctttcccgaaccgaccgaatccggggatgagggcgaagagctgggcctcccccttttgtctacaaggcacgtgcatttggagtgcaggcttcagctgtggtggtgtgggggagccccagactcctcaattcccgacgaccatcagggagagaaggggcagggtggaacagaaggcggagttggggaactaatatag

SEQ ID NO: 55866 - DNA, 1647 bp, Artificial Sequence
  derived and/or modified sequence
atgaaaactctagaaacccagccactcgccccagactgttgccccagcgatcaagatccagcacctgctcatccgtcaccacatgcatcgccgatgaacaaaaacgccgacagcgagctaatgcctcccccacccgaaagaggagatcccccaagactgagccccgaccctgttgccggttccgcagttagtcaggagctgagggagggggatcccgtctcactgtccacaccactagagacagagttcggatcccctagcgaattgtctccaaggatcgaggaacaagaactgagcgaaaacaccagcctgccggcagaggaagctaacgggtctttatcagaggaggaagccaatggccctgagcttggctccggaaaggccatggaagacacatccggcgagcctgctgccgaggatgagggcgacacagcatggaattatagttttagccagctaccccgttttttgtccggaagttggagcgaattttctacccagcccgagaactttttaaagggctgtaaatgggccccagatggaagctgcatcctgacaaacagcgccgataacattttgagaatctacaatctacctcccgagctctatcacgaaggagaacaggtcgagtacgctgagatggtgcccgtgctcagaatggtggagggtgatacaatttatgactattgctggtactcccttatgtcttctgcacaacccgacacatcatatgtggcctcgtcgtctcgcgagaaccctattcacatttgggacgcattcacgggtgagttgcgcgctagcttcagagcctacaaccatctcgacgagctgaccgcagcccattctttgtgcttctcgcccgatgggtctcaacttttttgcggatttaatcgcaccgtccgggtttttagcacagcacggccagggagggattgcgaggtcagggccacatttgcaaaaaaacaaggacaaagcgggattatctcttgcatcgccttctctcccgcacagcctctttacgcctgtggttcatacggtaggtcactgggactctacgcatgggacgatggcagcccactagcgcttctcgggggacaccagggcggaatcactcatctctgcttccatcccgatggaaatcggtttttttcaggagccagaaaggacgcagaactgctgtgttgggacttgcggcagtccgggtatccattgtggagcctcggcagggaggtgaccaccaaccagagaatatactttgatttggatccaacaggccagtttctcgtgagcggcagcacgtctggcgctgtgtccgtttgggataccgacggccctggcaacgatgggaaacctgaacccgttttaagtttcctgccccagaaagactgtaccaatggagtgtcattgcacccttctctacccctgttggcaactgcatccgggcagagagtgtttcctgagccaactgaatcgggagacgaaggagaagaattggggctccccctactgtccaccaggcacgtgcatcttgagtgccgtctgcaactgtggtggtgcggaggtgcaccagattcatcaattccagacgatcaccagggcgagaaaggccagggcggaacagagggaggcgttggggagctgatatag

SEQ ID NO: 55867 - DNA, 4011 bp, Artificial Sequence
  derived and/or modified sequence
ttctttttttttttcctccgggaagatgagatatactcattcttgaaaatacctccgggcttgccttctgcacacttctttccctccctgtctcacgccatggtagcgtccgcctaggttgcaggcgacccgcggggtggggcacaccattcaaagaaggggagggattgaggtttgcatcaaaacaaatacccctgcctttgcaaaggccataactaagtaatccagaaaaagaaatgcaggcggagaatagcagcctccctctgccaagtaagaggaaccggcctaaaggacattttctctctctctcctcccctctcatcgggtgaatagtgagctgctccggcaaaaagaaaccggaaatgctgctgcaagaggcagaaatgtaaatgtggagccaaacaataacagggctgccgggcctctcagattgcgacggtcctcctcggcctggcgggcaaacccctggtttagcacttctcacttccacgactgacagccttcaattggattttctccatctagcggagccgggggctgcctggaaagatcgctccaggaaggacaaaggtccggaagttgtgggaccttagcagcttgggctccccggatcacccccaaatgatcatttcggaatggagccccagttttcactaggatgccatgggctctaaaatatacagctatgagttctcaatgtttcgagatccaaaagtctcagacctcaatgctttgtgcatcttttatttcagggattccctacgcccagcaccgggtggatgtgcaaagaagtacgctttaggccggctcaaggttccccaaagctccactcctctgcctaggcgttcaactttgagttcggatggtcctaacatccccatcatctacacccaggtctcccaacaatgcaactcctatgatgatccctctagccaagcttccatcccactcacccccaaactcgctaagtccccactgccccacccccagccccagcgattttcccgagctgaaaatacacggagccgagagcccgtgactcagagaggactcatcaagttcagtcaggagcttacccaatccagggaagcgtgtcaccgtcgtggaaagcacgctcccagcccgaacgcaaagtgtccccggagcccagcagctacctgctccctggacggtggctctagacttttgagaagctcaaaacttttagcgccagtcttgagcacatgggaggggaaaaccccaatcccatcaacccctgcgaggctcctggcacaaagctggacagtcgccatgacaagtaagggcaagtaatccgcctgccggaggaagcaaaggaaatggagttggggaggagggtgcagagtcaggattctcgccgacctggtgccgtagatactaacattttggggtggaaaattctgcaagccagagctgtgagggcagaattggtggaaatcattttggaggaatcctgcattgtgtcaaatatgaagggtggaaggaagaaagcttttgcgtttgctctcagctggatcctttcttctcatcagttaaaatgtcattttttaggaaggctttccgtaatatcacaccctaacgttttctcccagatactttatatcacaccatcttatttaatctccttcacaacccttatcactctgataagatttatttgttcattgctttcagtacatggaaacgtaagccttatgaggatatagaatttttctactatcttattcattgttgtattcctgagtgcctatatcagtgctgggtagcaagtaagagctcgataataaatattttttgaatgagggagacaggtctgaagcctggagaatgagatgcagaagaggtgcaagacctgctgcgccctctgcaggcggcgggggggcggtgcaggtgctttaagaattaccgcgggactcggtagggggagcgtaggcgcttctcgccaagatagaagcgttcagactacaactcccagcagccacgaggagccctagggcttgatgggaacgggaaaccttctaacctttcacgtcccggctccgcgggttccgtgggtcgcccgcgaaatctgatccgggatgcggcggcccaatcggaaggtggaccgaaatcccgcgacagcaagaggcccgtagcgacccgcggtgctaaggaacacagtgctttcaaaagaattggcgtccgctgttcgcctctcctcccgggagtcttctgcctactcccagaagaggagggaagcacaggtgggtttctttagctctgcgtcggatccctgagaacttcgaagccatcctggctgaggctaatctccgctgtgcttcctctgcagtatgaagactttggagactcaaccgttagctccggactgctgtccttcagaccaggacccagctccagcccatccttctccccacgcttccccgatgaataaaaatgcggactctgaactgatgccaccgcctcccgaaaggggggatccgccccggttgtccccagatcctgtggctggctcagctgtgtcccaggagctacgggagggggacccagtttctctctccactcccctggaaacagagtttggttcccctagtgagttgagtcctcgaatcgaggagcaagaactttctgaaaatacaagccttcctgcagaagaagcaaacgggagcctttctgaagaagaagcgaacgggccagagttggggtctggaaaagccatggaagatacctctggggaacccgctgcagaggacgagggagacaccgcttggaactacagcttctcccagctgcctcgatttctcagtggttcctggtcagagttcagcacccaacctgagaacttcttgaaaggctgtaagtgggctcctgacggttcctgcatcttgaccaatagtgctgataacatcttgcgaatttataacctgcccccagagctgtaccatgagggggagcaggtggaatatgcagaaatggtccctgtccttcgaatggtggaaggtgataccatctatgattactgctggtattctctgatgtcctcagcccagccagacacctcctacgtggccagcagcagccgggagaacccgattcatatctgggacgcattcactggagagctccgggcttcctttcgcgcctacaaccacctggatgagctgacggcagcccattcgctctgcttctccccggatggctcccagctcttctgtggcttcaaccggactgtgcgtgttttttccacggcccggcctggccgagactgcgaggtccgagccacatttgcaaaaaagcagggccagagcggcatcatctcctgcatagccttcagcccagcccagcccctctatgcctgtggctcctacggccgctccctgggtctgtatgcctgggatgatggctcccctctcgccttgctgggagggcaccaagggggcatcacccacctctgctttcatcccgatggcaaccgcttcttctcaggagcccgcaaggatgctgagctcctgtgctgggatctccggcagtctggttacccactgtggtccctgggtcgagaggtgaccaccaatcagcgcatctacttcgatctggacccgaccgggcagttcctagtgagtggcagcacgagcggggctgtctctgtgtgggacacggacgggcctggcaatgatgggaagccggagcccgtgttgagttttctgccccagaaggactgcaccaatggcgtgagcctgcaccctagcctgcctctcctggccactgcctccggtcagcgtgtgtttcctgagcccacagagagtggggacgaaggagaggagctgggccttcccttgctctccacgcgccacgtccaccttgaatgtcggcttcagctctggtggtgtgggggggcgccagactccagcatccctgatgatcaccagggcgagaaagggcagggaggaacggagggaggtgtgggtgagctgatataaaaaggtttttatgata

SEQ ID NO: 55868 - DNA, 1905 bp, Artificial Sequence
  derived and/or modified sequence
gggaacgggaaaccttctaacctttcacgtcccggctccgcgggttccgtgggtcgcccgcgaaatctgatccgggatgcggcggcccaatcggaaggtggaccgaaatcccgcgacagcaagaggcccgtagcgacccgcggtgctaaggaacacagtgctttcaaaagaattggcgtccgctgttcgcctctcctcccgggagtcttctgcctactcccagaagaggagggaagcacagtatgaagactttggagactcaaccgttagctccggactgctgtccttcagaccaggacccagctccagcccatccttctccccacgcttccccgatgaataaaaatgcggactctgaactgatgccaccgcctcccgaaaggggggatccgccccggttgtccccagatcctgtggctggctcagctgtgtcccaggagctacgggagggggacccagtttctctctccactcccctggaaacagagtttggttcccctagtgagttgagtcctcgaatcgaggagcaagaactttctgaaaatacaagccttcctgcagaagaagcaaacgggagcctttctgaagaagaagcgaacgggccagagttggggtctggaaaagccatggaagatacctctggggaacccgctgcagaggacgagggagacaccgcttggaactacagcttctcccagctgcctcgatttctcagtggttcctggtcagagttcagcacccaacctgagaacttcttgaaaggctgtaagtgggctcctgacggttcctgcatcttgaccaatagtgctgataacatcttgcgaatttataacctgcccccagagctgtaccatgagggggagcaggtggaatatgcagaaatggtccctgtccttcgaatggtggaaggtgataccatctatgattactgctggtattctctgatgtcctcagcccagccagacacctcctacgtggccagcagcagccgggagaacccgattcatatctgggacgcattcactggagagctccgggcttcctttcgcgcctacaaccacctggatgagctgacggcagcccattcgctctgcttctccccggatggctcccagctcttctgtggcttcaaccggactgtgcgtgttttttccacggcccggcctggccgagactgcgaggtccgagccacatttgcaaaaaagcagggccagagcggcatcatctcctgcatagccttcagcccagcccagcccctctatgcctgtggctcctacggccgctccctgggtctgtatgcctgggatgatggctcccctctcgccttgctgggagggcaccaagggggcatcacccacctctgctttcatcccgatggcaaccgcttcttctcaggagcccgcaaggatgctgagctcctgtgctgggatctccggcagtctggttacccactgtggtccctgggtcgagaggtgaccaccaatcagcgcatctacttcgatctggacccgaccgggcagttcctagtgagtggcagcacgagcggggctgtctctgtgtgggacacggacgggcctggcaatgatgggaagccggagcccgtgttgagttttctgccccagaaggactgcaccaatggcgtgagcctgcaccctagcctgcctctcctggccactgcctccggtcagcgtgtgtttcctgagcccacagagagtggggacgaaggagaggagctgggccttcccttgctctccacgcgccacgtccaccttgaatgtcggcttcagctctggtggtgtgggggggcgccagactccagcatccctgatgatcaccagggcgagaaagggcagggaggaacggagggaggtgtgggtgagctgatataaaaaggtttttatgata

SEQ ID NO: 55869 - DNA, 1818 bp, Artificial Sequence
  derived and/or modified sequence
tgaattcgagttccgcctcctaccaggaagaaccggctcgggccggagggctgcacggaggaccacacggacgcctgcgggcccgccccttccgcttcacgacgttcagcctgcgtctggaactggaatggcctagcccaaagctagataacagtatgaagactttggagactcaaccgttagctccggactgctgtccttcagaccaggacccagctccagcccatccttctccccacgcttccccgatgaataaaaatgcggactctgaactgatgccaccgcctcccgaaaggggggatccgccccggttgtccccagatcctgtggctggctcagctgtgtcccaggagctacgggagggggacccagtttctctctccactcccctggaaacagagtttggttcccctagtgagttgagtcctcgaatcgaggagcaagaactttctgaaaatacaagccttcctgcagaagaagcaaacgggagcctttctgaagaagaagcgaacgggccagagttggggtctggaaaagccatggaagatacctctggggaacccgctgcagaggacgagggagacaccgcttggaactacagcttctcccagctgcctcgatttctcagtggttcctggtcagagttcagcacccaacctgagaacttcttgaaaggctgtaagtgggctcctgacggttcctgcatcttgaccaatagtgctgataacatcttgcgaatttataacctgcccccagagctgtaccatgagggggagcaggtggaatatgcagaaatggtccctgtccttcgaatggtggaaggtgataccatctatgattactgctggtattctctgatgtcctcagcccagccagacacctcctacgtggccagcagcagccgggagaacccgattcatatctgggacgcattcactggagagctccgggcttcctttcgcgcctacaaccacctggatgagctgacggcagcccattcgctctgcttctccccggatggctcccagctcttctgtggcttcaaccggactgtgcgtgttttttccacggcccggcctggccgagactgcgaggtccgagccacatttgcaaaaaagcagggccagagcggcatcatctcctgcatagccttcagcccagcccagcccctctatgcctgtggctcctacggccgctccctgggtctgtatgcctgggatgatggctcccctctcgccttgctgggagggcaccaagggggcatcacccacctctgctttcatcccgatggcaaccgcttcttctcaggagcccgcaaggatgctgagctcctgtgctgggatctccggcagtctggttacccactgtggtccctgggtcgagaggtgaccaccaatcagcgcatctacttcgatctggacccgaccgggcagttcctagtgagtggcagcacgagcggggctgtctctgtgtgggacacggacgggcctggcaatgatgggaagccggagcccgtgttgagttttctgccccagaaggactgcaccaatggcgtgagcctgcaccctagcctgcctctcctggccactgcctccggtcagcgtgtgtttcctgagcccacagagagtggggacgaaggagaggagctgggccttcccttgctctccacgcgccacgtccaccttgaatgtcggcttcagctctggtggtgtgggggggcgccagactccagcatccctgatgatcaccagggcgagaaagggcagggaggaacggagggaggtgtgggtgagctgatataaaaaggtttttatgata

SEQ ID NO: 55870 - DNA, 1828 bp, Artificial Sequence
  derived and/or modified sequence
ccggagcccagcagctacctgctccctggacggtggctctagacttttgagaagctcaaaacttttagcgccagtcttgagcacatgggaggggaaaaccccaatcccatcaacccctgcgaggctcctggcacaaagctggacagtcgccatgacaagtaaggtatgaagactttggagactcaaccgttagctccggactgctgtccttcagaccaggacccagctccagcccatccttctccccacgcttccccgatgaataaaaatgcggactctgaactgatgccaccgcctcccgaaaggggggatccgccccggttgtccccagatcctgtggctggctcagctgtgtcccaggagctacgggagggggacccagtttctctctccactcccctggaaacagagtttggttcccctagtgagttgagtcctcgaatcgaggagcaagaactttctgaaaatacaagccttcctgcagaagaagcaaacgggagcctttctgaagaagaagcgaacgggccagagttggggtctggaaaagccatggaagatacctctggggaacccgctgcagaggacgagggagacaccgcttggaactacagcttctcccagctgcctcgatttctcagtggttcctggtcagagttcagcacccaacctgagaacttcttgaaaggctgtaagtgggctcctgacggttcctgcatcttgaccaatagtgctgataacatcttgcgaatttataacctgcccccagagctgtaccatgagggggagcaggtggaatatgcagaaatggtccctgtccttcgaatggtggaaggtgataccatctatgattactgctggtattctctgatgtcctcagcccagccagacacctcctacgtggccagcagcagccgggagaacccgattcatatctgggacgcattcactggagagctccgggcttcctttcgcgcctacaaccacctggatgagctgacggcagcccattcgctctgcttctccccggatggctcccagctcttctgtggcttcaaccggactgtgcgtgttttttccacggcccggcctggccgagactgcgaggtccgagccacatttgcaaaaaagcagggccagagcggcatcatctcctgcatagccttcagcccagcccagcccctctatgcctgtggctcctacggccgctccctgggtctgtatgcctgggatgatggctcccctctcgccttgctgggagggcaccaagggggcatcacccacctctgctttcatcccgatggcaaccgcttcttctcaggagcccgcaaggatgctgagctcctgtgctgggatctccggcagtctggttacccactgtggtccctgggtcgagaggtgaccaccaatcagcgcatctacttcgatctggacccgaccgggcagttcctagtgagtggcagcacgagcggggctgtctctgtgtgggacacggacgggcctggcaatgatgggaagccggagcccgtgttgagttttctgccccagaaggactgcaccaatggcgtgagcctgcaccctagcctgcctctcctggccactgcctccggtcagcgtgtgtttcctgagcccacagagagtggggacgaaggagaggagctgggccttcccttgctctccacgcgccacgtccaccttgaatgtcggcttcagctctggtggtgtgggggggcgccagactccagcatccctgatgatcaccagggcgagaaagggcagggaggaacggagggaggtgtgggtgagctgatataaaaaggtttttatgata

SEQ ID NO: 55871 - protein, 337 aa, Artificial Sequence
  derived and/or modified sequence
MLLGLAAMELKVWVDGIQRVVCGVSEQTTCQEVVIALAQAIGQTGRFVLVQRLREKERQLLPQECPVGAQATCGQFASDVQFVLRRTGPSLAGRPSSDSCPPPERCLIRASLPVKPRAALGCEPRKTLTPEPAPSLSRPGPAAPVTPTPGCCTDLRGLELRVQRNAEELGHEAFWEQELRREQAREREGQARLQALSAATAEHAARLQALDAQARALEAELQLAAEAPGPPSPMASATERLHQDLAVQERQSAEVQGSLALVSRALEAAERALQAQAQELEELNRELRQCNLQQFIQQTGAALPPPPRPDRGPPGTQVGVVLGGGWEVRTWPSPTPS

SEQ ID NO: 55872 - DNA, 1014 bp, Artificial Sequence
  derived and/or modified sequence
atgctcctcggtttggctgcaatggagctcaaagtgtgggtggacgggattcagcgtgtggtctgcggagtgagtgagcagaccacatgtcaggaggttgtgatcgccttggcgcaagccataggtcagaccggacgctttgtgctggtgcagaggttgagggaaaaagaacgtcaactacttccccaggagtgccctgttggggcccaagctacttgcgggcagttcgcttctgatgtacagtttgttctccggaggaccggaccatctttagccgggaggccaagttctgatagctgccctccaccagaaagatgcctgattcgcgcaagtttacccgtgaaaccacgcgccgctctggggtgcgaacctcggaaaactttgaccccggagccagcaccaagcctttctagaccaggccccgctgctcccgtgactcccacaccagggtgctgcacagatctgagaggcctggagctcagagtccagcgcaacgccgaggaacttggccacgaggcgttctgggaacaagagctgagaagggaacaggcccgcgagcgtgaggggcaagcccggctccaggcactttcagccgctactgccgagcatgcagcaagattgcaggccctggatgcccaggcccgggccttggaggcagagttgcagttggcagcggaagctccaggcccaccaagcccaatggcctccgcgaccgagcgcctccaccaagacttggctgtacaggaaaggcagtctgcagaagtccagggaagccttgccctggtgagtagggccctggaggcagctgagagagcacttcaggcccaggcccaggagctcgaggaactgaatagggagctgagacagtgcaatttgcagcaattcatccagcaaaccggagcggctttgcctccaccaccacggcccgaccgggggcctccgggaactcaggtgggtgtggtacttgggggcggatgggaagtgcggacatggccttctcccactccatcttag

SEQ ID NO: 55873 - DNA, 1014 bp, Artificial Sequence
  derived and/or modified sequence
atgcttctgggcctagccgcgatggagttaaaggtctgggtggacggcattcagagggtggtctgcggcgtcagcgagcagaccacgtgccaggaagtggtcattgcgcttgcgcaagccatcggtcagacaggtagatttgtgctggtccagcggcttagggagaaagagcgccagttgctgcctcaggagtgccctgtaggggcgcaagccacgtgtggtcagtttgcaagcgatgtacaatttgtcctgaggagaaccgggccgagcttggccggacggccatccagtgattcttgccctcctccagagcggtgcctgattcgggcatcgctccccgtgaagccccgcgcagccctggggtgcgagccccgcaagaccttgactccagagcctgcccctagcttgagccgaccagggcccgccgcacccgtaactcccacccctgggtgctgtacagacctgcggggactggagctaagggtccagaggaatgcagaagaactggggcacgaggcattctgggagcaggagctgaggagagagcaggcgcgcgaacgcgagggtcaggcaaggttgcaggcactttccgcggccacagccgaacacgctgcgcgtctgcaagcactcgatgctcaggcccgggcactcgaggccgaactgcagctggccgccgaggctccagggccccctagtcctatggcttccgctactgagcgtttgcatcaagatctggccgtgcaggaacgacagtcggcggaagttcagggcagtcttgcactcgtgtctcgtgctttggaggccgctgagcgagccctgcaggcgcaagctcaggagctggaagagctcaacagggagttacgtcagtgcaacttacagcagttcatacagcaaacaggagctgctctgcccccaccccctcgaccagatagagggcctcctgggacccaggtgggggtggtgttggggggtggatgggaggtccgcacatggccttctccaacaccatcctag

SEQ ID NO: 55874 - DNA, 1014 bp, Artificial Sequence
  derived and/or modified sequence
atgctgctgggcctggccgccatggagctgaaggtgtgggtggatggcatccagagggtggtgtgtggggtgtctgagcagaccacctgccaggaggtggtgattgccctggcccaggccatcggccagacaggccgctttgtgctggtgcagaggctgcgggagaaggagcggcagctgctgccccaggagtgccctgtgggcgcccaggccacctgtggccagtttgccagtgatgtgcagtttgtgctgcggaggacaggccccagcctggccggccggcccagcagtgacagctgccccccacctgagcgctgcctgatccgggccagcctgcctgtgaagccccgggccgccctgggctgtgagcccaggaagaccctgaccccagagcccgcccccagcctgagcaggcctggccctgctgcccctgtgacccccaccccaggctgctgcacagacctgcggggcctggagctgcgggtgcagagaaatgctgaggagctgggccacgaggccttctgggagcaggagctgcggcgggagcaggcccgggagcgggagggccaggcccggctgcaggccctgtctgctgccacagctgagcacgccgcccggctgcaggccctggatgcccaggcccgggccctggaggccgagctgcagctggccgctgaggcccctggcccccccagccccatggccagcgccacagagcggctgcaccaggacctggccgtgcaggagcggcagagcgctgaggtgcagggcagcctggccctggtgtcccgggccctggaggccgctgagcgggccctgcaggcccaggcccaggagctggaggagctgaaccgggagctgcggcagtgcaacctgcagcagttcatccagcagacaggagctgccctgcccccaccacccaggccagaccggggccccccaggcacccaggtgggcgtggtgctgggcggcggctgggaggtgaggacctggcccagccccacccccagctag

SEQ ID NO: 55875 - DNA, 1014 bp, Artificial Sequence
  derived and/or modified sequence
atgctgctgggcctggccgccatggagctgaaggtgtgggtggacggcattcagcgcgtagtctgtggtgtgtccgagcagaccacttgccaggaagtggtgatcgcactggcacaggcaatcggacagaccggtcgcttcgttctggtacaacgccttagggagaaggaaaggcagctgttaccacaggaatgtcccgtcggggcccaggctacatgcggtcagtttgcgtcagatgttcagttcgtgctgcgtcggaccggtccatcactggcaggacggcccagttcagactcttgcccccctccggagcggtgcctcattagagcttcacttccagtcaaaccacgggccgccctcggttgtgagccaagaaagacattaacacctgagccagctcctagcctttcaaggcccggcccggcagcacccgtgacaccaacccctggctgctgcaccgacttaagaggtcttgaactccgcgtccagcgcaacgcagaggagttgggacacgaagccttctgggagcaagaactgaggcgagaacaggcccgcgaaagggaaggtcaggccagacttcaagccctgtcagcagcgacggctgagcatgctgccaggctccaggcacttgatgcccaggcccgggcattagaggcagaacttcagttggccgcggaggccccagggcctcctagccctatggctagcgcaacggaacgcttacaccaggacctcgccgtacaggagcggcaaagcgctgaggttcagggctctctcgcactcgtctctagggccctggaggccgccgagcgggccctccaggctcaagcccaagagctggaggagttaaatcgggagctgagacagtgcaacctccagcaattcatccagcagaccggcgccgcgcttccaccacccccaagacccgacaggggaccccccggcacgcaggttggggtcgtgctgggcggaggttgggaggtgaggacctggccttctccaaccccgtcatag

SEQ ID NO: 55876 - DNA, 1014 bp, Artificial Sequence
  derived and/or modified sequence
atgctgctgggcctggccgccatggagctgaaggtgtgggtggacgggatccagcgcgtggtgtgcggagtatccgagcagactacatgtcaggaggtggtgattgctcttgcccaggctatcggccagaccggaaggtttgtgttagttcagcgcctgagggaaaaagagaggcagctactccctcaggaatgccccgtcggagctcaggccacatgtggacagtttgcatccgatgtacagtttgtgctgaggcgcacgggcccaagcttggccggacggccttcctctgactcctgccctccaccagagcgctgtttaatcagggcctctttgcccgtgaagcctcgcgcagcactcggctgcgagcccagaaagacactgactcctgagcccgcaccatccctctccaggccgggcccagctgcacctgttacacctactcctggatgctgtacggacctgaggggcctcgagcttagggtccagcgcaatgccgaggagttaggccatgaagccttctgggagcaggagcttaggagggagcaggccagagagcgggaagggcaggccaggttgcaggccctctccgccgccactgccgagcacgctgcccggctgcaggctctcgacgctcaagcaagggccctcgaggcggaattacagctcgctgcagaggcacctggcccaccatcccctatggcttccgccaccgagagacttcatcaggatttggctgtacaggagcgccagtcagccgaagtccaaggttccctcgctctcgtgtctcgggccctggaggctgccgagcgcgctctgcaggcgcaggcacaggaattggaggaactgaatagggagctgcggcaatgcaatttgcagcagttcatccagcagacaggcgcagccctgcctcctcctccgcggccagaccgaggcccccctgggactcaggtaggcgtggtcctaggtggcggatgggaggtgcggacttggccatcccctacaccctcctag

SEQ ID NO: 55877 - DNA, 1014 bp, Artificial Sequence
  derived and/or modified sequence
atgctcttgggactcgctgccatggagttgaaagtttgggtggacggaatccagcgcgtcgtctgtggtgtctcagagcagaccacatgtcaggaggtggtcatagccttggctcaggctatcgggcagaccgggagattcgtgctggtgcaaagactaagggaaaaggagcggcagcttttgccgcaggaatgccctgtgggggcacaagccacctgcggtcaattcgcctctgacgtgcagtttgtgctgcgtcgtactggaccctcattagctgggcgaccatcttccgactcctgccctccacctgaaagatgcctgattagagcttcactaccggtgaagccaagggccgcactgggatgcgagcctcgtaaaactctaacacctgaacctgccccaagcctgagccgcccaggcccagccgcacccgtgacacccacgcctgggtgctgtacagacctgaggggattagaacttagagtgcagaggaacgccgaagagctgggtcacgaggccttctgggaacaggaactccgccgtgagcaggcaagggaaagagaaggtcaggccaggctccaggccctcagcgccgctactgccgagcacgccgcacgcctacaggcccttgatgcccaggcccgtgctctggaggcagagctgcagcttgcagccgaggctccgggaccaccttcccccatggcttccgctacagaacggttgcaccaggacctcgcagtgcaggagagacagagcgcagaggttcagggttccctcgctctcgtctcaagggctctcgaggccgctgaacgagctttacaagcccaggcccaagaactggaagaactgaaccgcgaactgcgccagtgcaacctccaacaattcatccaacagacaggggcagcgctgccaccccctccgcgtcccgacagaggaccccctggaacgcaagtcggcgttgtgctcggagggggttgggaagtgcggacatggccgagtccaacgccgagctag

SEQ ID NO: 55878 - DNA, 1014 bp, Artificial Sequence
  derived and/or modified sequence
atgctgctggggctggccgcaatggaattgaaagtgtgggtagacgggattcagcgcgtggtttgcggcgtgagcgaacagacaacctgccaggaagtggtgattgccctagcacaggccattggccaaaccggacggtttgtgctggtgcagcgcctccgcgagaaggaacggcagctattaccccaggaatgcccggtgggggcacaggccacttgtgggcagtttgcgtccgatgtgcaattcgtgctaaggcgaactgggccaagccttgcagggaggccctcctctgatagctgtcccccacccgaaaggtgtttaattcgagcgagtctcccagtaaagccacgggctgccctgggatgcgaacctcggaaaaccctgactcccgagcccgctccaagcctctcgcggcctggcccagccgctccagtgacaccaactccaggttgctgtaccgacctgagagggcttgagctgcgcgtgcaaaggaatgctgaggaactgggacacgaggcattctgggaacaggagctgagacgggagcaggcacgggaacgggagggccaggcccgactccaagctttaagcgcggctactgcggaacacgctgccagactccaggcactcgacgcccaagcgcgagccttggaggcggagctgcagttagccgcagaagcacccggtcccccttcccctatggcaagcgccacagagaggctccaccaggatctggctgtgcaagagcgacagtcagctgaggttcagggctcactggcgcttgttagtcgagccctggaggccgctgagcgcgctttgcaggcacaggctcaggagttggaggagttgaaccgcgaactgagacaatgtaacctccagcagtttatccaacagaccggagctgcgcttccgccacccccacgcccagatagggggcctcctggcactcaggttggtgtcgttttgggaggcggatgggaagtgcgtacctggccatcaccgacccccagctag

SEQ ID NO: 55879 - DNA, 1014 bp, Artificial Sequence
  derived and/or modified sequence
atgctgctgggcctggccgccatggagctgaaggtgtgggtggacggcatccagagagtggtgtgcggcgtgagcgagcagaccacctgccaggaggtggtgatcgccctggcccaggccatcggccagaccggcagattcgtgctggtgcagagactgagagagaaggagagacagctgctgccccaggagtgccccgtgggcgcccaggccacctgcggccagttcgccagcgacgtgcagttcgtgctgagaagaaccggccccagcctggccggcagacccagcagcgacagctgccccccccccgagagatgcctgatcagagccagcctgcccgtgaagcccagagccgccctgggctgcgagcccagaaagaccctgacccccgagcccgcccccagcctgagcagacccggccccgccgcccccgtgacccccacccccggctgctgcaccgacctgagaggcctggagctgagagtgcagagaaacgccgaggagctgggccacgaggccttctgggagcaggagctgagaagagagcaggccagagagagagagggccaggccagactgcaggccctgagcgccgccaccgccgagcacgccgccagactgcaggccctggacgcccaggccagagccctggaggccgagctgcagctggccgccgaggcccccggcccccccagccccatggccagcgccaccgagagactgcaccaggacctggccgtgcaggagagacagagcgccgaggtgcagggcagcctggccctggtgagcagagccctggaggccgccgagagagccctgcaggcccaggcccaggagctggaggagctgaacagagagctgagacagtgcaacctgcagcagttcatccagcagaccggcgccgccctgccccccccccccagacccgacagaggcccccccggcacccaggtgggcgtggtgctgggcggcggctgggaggtgagaacctggcccagccccacccccagctag

SEQ ID NO: 55880 - protein, 320 aa, Artificial Sequence
  derived and/or modified sequence
MLLGLAAMELKVWVDGIQRVVCGVSEQTTCQEVVIALAQAIGQTGRFVLVQRLREKERQLLPQECPVGAQATCGQFASDVQFVLRRTGPSLAGRPSSDSCPPPERCLIRASLPVKPRAALGCEPRKTLTPEPAPSLSRPGPAAPVTPTPGCCTDLRGLELRVQRNAEELGHEAFWEQELRREQAREREGQARLQALSAATAEHAARLQALDAQARALEAELQLAAEAPGPPSPMASATERLHQDLAVQERQSAEVQGSLALVSRALEAAERALQAQAQELEELNRELRQCNLQQFIQQTGAALPPPPRPDRGPPGTQWPP

SEQ ID NO: 55881 - DNA, 963 bp, Artificial Sequence
  derived and/or modified sequence
atgctgctcgggctggcagcgatggaattgaaagtctgggtcgatggcattcagcgggtggtgtgcggcgtgagtgaacagacaacatgccaggaggttgtgatagcccttgcccaggccattggccagaccggtcgctttgtattagtgcagagattacgcgagaaggaacgacagctcctgccccaggaatgcccagtgggcgcccaggcgacatgtgggcagttcgcatctgatgtgcaattcgttttgcgccggacaggccccagccttgcgggaagaccatcctcagattcctgcccaccacccgagcggtgtctaatccgggctagtttgccagtgaagccacgtgccgccctggggtgcgagcctcgcaaaactctgacccctgagcccgcaccctctctctcacgaccaggccccgctgcccccgttacccccacacccgggtgttgtacagacctccgtggcctggaactccgagttcagcgcaacgccgaggagctgggtcacgaggccttctgggagcaagagctccggcgcgagcaggcccgcgagcgtgagggccaggctcggctgcaagccctgtcagctgctacggctgagcacgcagctagactacaagcccttgatgcccaggcgagggctcttgaagcagaactacagttggctgcagaagcccccggacccccttcacctatggcctctgctaccgagcgtcttcaccaagatctggctgtgcaggagcgccagtccgctgaagttcaggggagcttagccctggtctcccgggccctggaggcagctgaaagggccctccaggcccaggcccaagaactggaggaattgaaccgagaacttagacaatgtaatttacagcaattcatccagcagacgggcgctgcacttccaccccccccacggcccgaccgtggtccacccggaacccagtggcccccttag

SEQ ID NO: 55882 - DNA, 255 bp, Artificial Sequence
  derived and/or modified sequence
atgctactcggcctggccgcaatggagttgaaggtgtgggtcgacggaattcagcgtgtagtatgcggcgttagcgagcagactacttgccaggaagtagtgatcgccctggcccaggccatcgggcagaccgggcgcttcgtgctggtccagcggttgcgcgaaaaggaaaggcaactgttgccacaggaatgccctgtaggggcacaagccacctgtgggcaatttgcatcggacgtgcaatttgtgctgtag

SEQ ID NO: 55883 - DNA, 963 bp, Artificial Sequence
  derived and/or modified sequence
atgctgctgggcctggccgccatggagctgaaggtgtgggtggatggcatccagagggtggtgtgtggggtgtctgagcagaccacctgccaggaggtggtgattgccctggcccaggccatcggccagacaggccgctttgtgctggtgcagaggctgcgggagaaggagcggcagctgctgccccaggagtgccctgtgggcgcccaggccacctgtggccagtttgccagtgatgtgcagtttgtgctgcggaggacaggccccagcctggccggccggcccagcagtgacagctgccccccacctgagcgctgcctgatccgggccagcctgcctgtgaagccccgggccgccctgggctgtgagcccaggaagaccctgaccccagagcccgcccccagcctgagcaggcctggccctgctgcccctgtgacccccaccccaggctgctgcacagacctgcggggcctggagctgcgggtgcagagaaatgctgaggagctgggccacgaggccttctgggagcaggagctgcggcgggagcaggcccgggagcgggagggccaggcccggctgcaggccctgtctgctgccacagctgagcacgccgcccggctgcaggccctggatgcccaggcccgggccctggaggccgagctgcagctggccgctgaggcccctggcccccccagccccatggccagcgccacagagcggctgcaccaggacctggccgtgcaggagcggcagagcgctgaggtgcagggcagcctggccctggtgtcccgggccctggaggccgctgagcgggccctgcaggcccaggcccaggagctggaggagctgaaccgggagctgcggcagtgcaacctgcagcagttcatccagcagacaggagctgccctgcccccaccacccaggccagaccggggccccccaggcacccagtggcccccatag

SEQ ID NO: 55884 - DNA, 255 bp, Artificial Sequence
  derived and/or modified sequence
atgctgctgggcctggccgccatggagctgaaggtgtgggtggatggcatccagagggtggtgtgtggggtgtctgagcagaccacctgccaggaggtggtgattgccctggcccaggccatcggccagacaggccgctttgtgctggtgcagaggctgcgggagaaggagcggcagctgctgccccaggagtgccctgtgggcgcccaggccacctgtggccagtttgccagtgatgtgcagtttgtgctgtag

SEQ ID NO: 55885 - DNA, 963 bp, Artificial Sequence
  derived and/or modified sequence
atgctgctgggcctggccgccatggagctgaaggtgtgggtggacggtatccagcgtgtggtgtgcggcgttagcgagcagacaacttgtcaggaggtggtgattgcactggcacaagctataggtcagactggacgttttgtcctggtgcagagactgcgtgaaaaggaaaggcagcttttacctcaggagtgccccgtcggcgctcaggctacctgcggccaattcgccagcgacgtccaattcgtcttgagaaggacgggccccagcctggctgggcggcccagttcagatagctgccctcccccggaaagatgtctgattcgagcatcactgccagttaagcctcgtgccgctctggggtgcgaaccccggaaaaccctgactcccgagccagctccaagtctctccagaccgggaccagctgctcccgtgacgccgactcccggttgctgcactgacctccgcggactcgagctgcgggtccagcgcaacgccgaagagctcggccacgaggccttctgggaacaggaactaaggcgtgaacaggcccgggaaagggagggccaggcccgcctccaggcgctatccgcagcaactgccgaacacgcggccaggctacaggctctcgatgctcaagcacgggctctcgaagctgaattgcagctggcggcagaggccccaggaccaccctctcctatggctagcgccacagagcgtttgcaccaagatctcgccgtacaagaacgtcaatccgcagaagttcagggcagtctagccttagtgtccagagccctagaagctgccgagcgcgccctgcaggcccaagcacaggagctggaggaactcaatcgagagcttcgacagtgtaatctacagcagtttatccaacagacaggtgctgcacttcctcctcctccacggccagaccggggccctcccggaactcagtggcctccctag

SEQ ID NO: 55886 - DNA, 255 bp, Artificial Sequence
  derived and/or modified sequence
atgctgctgggcctggccgccatggagctgaaggtgtgggtggacgggattcagagagtggtctgtggcgtcagcgagcagaccacatgtcaggaggttgtgattgccctggctcaagccatcgggcaaaccgggcggtttgtactggttcagcgacttcgggaaaaggaaaggcagctcttgcctcaggaatgccccgtgggggcccaggccacatgtggtcaatttgccagtgatgtgcagttcgtgctctag

SEQ ID NO: 55887 - DNA, 963 bp, Artificial Sequence
  derived and/or modified sequence
atgttgctaggcttggccgcaatggagctcaaagtgtgggtggatggaattcaacgagtcgtgtgtggcgtatccgaacagaccacatgccaagaagtcgtgattgccctcgcacaggctattggtcaaacaggtcgcttcgtgttagtgcaacggttaagggagaaggaacgtcagcttctgccccaggaatgtcctgtgggcgcacaggccacctgtgggcagtttgcttctgatgttcagtttgtgctacggaggacaggacccagtcttgcaggtagaccctcgtctgattcatgcccccctcccgagcggtgtttgattcgcgctagcctgcccgtcaagcctcgggctgcacttggttgcgagcctcgtaagacattgactcctgagcctgctccatctcttagtcgacctggtcccgctgctcccgtaactcccacccctgggtgctgtacggacctgcgtggcctggagttgcgggttcaaagaaacgcggaagagctcgggcacgaggcgttttgggagcaggaactccgtcgagagcaggccagggaaagagaagggcaagctagattgcaggcattatcggcggcaaccgcggagcatgccgctcggctccaagcccttgacgcacaggcccgagcgttggaggctgagttacagttagcagctgaggctccgggacctccaagtcccatggcttctgctaccgagcgccttcaccaggacctggccgtccaggaacgtcagtctgccgaggtgcaagggtctctggcacttgtgtcaagggccttagaggcagcagaacgagctttacaggcccaggcccaggagctggaggagctcaatcgcgaactccgccagtgcaatcttcagcagttcatacagcagacaggcgcagccttgccccctcctcctaggcccgatcggggacccccaggcactcagtggccaccgtag

SEQ ID NO: 55888 - DNA, 255 bp, Artificial Sequence
  derived and/or modified sequence
atgttgctcggcctggctgctatggagctcaaagtttgggtggacggaattcagagagtggtgtgtggggtttctgagcagaccacgtgccaggaagtcgtcatcgctctggcccaggccatcggtcagaccgggagatttgttctagtccagcggttgagggagaaggaaaggcagttgcttccacaagagtgcccagtaggcgcacaggctacatgtgggcagttcgcctctgatgtgcaattcgttctgtag

SEQ ID NO: 55889 - DNA, 963 bp, Artificial Sequence
  derived and/or modified sequence
atgctgctgggcctggccgccatggagctgaaggtgtgggtggacggcatccagagagtggtgtgcggcgtgagcgagcagaccacctgccaggaggtggtgatcgccctggcccaggccatcggccagaccggcagattcgtgctggtgcagagactgagagagaaggagagacagctgctgccccaggagtgccccgtgggcgcccaggccacctgcggccagttcgccagcgacgtgcagttcgtgctgagaagaaccggccccagcctggccggcagacccagcagcgacagctgccccccccccgagagatgcctgatcagagccagcctgcccgtgaagcccagagccgccctgggctgcgagcccagaaagaccctgacccccgagcccgcccccagcctgagcagacccggccccgccgcccccgtgacccccacccccggctgctgcaccgacctgagaggcctggagctgagagtgcagagaaacgccgaggagctgggccacgaggccttctgggagcaggagctgagaagagagcaggccagagagagagagggccaggccagactgcaggccctgagcgccgccaccgccgagcacgccgccagactgcaggccctggacgcccaggccagagccctggaggccgagctgcagctggccgccgaggcccccggcccccccagccccatggccagcgccaccgagagactgcaccaggacctggccgtgcaggagagacagagcgccgaggtgcagggcagcctggccctggtgagcagagccctggaggccgccgagagagccctgcaggcccaggcccaggagctggaggagctgaacagagagctgagacagtgcaacctgcagcagttcatccagcagaccggcgccgccctgccccccccccccagacccgacagaggcccccccggcacccagtggcccccctag

SEQ ID NO: 55890 - DNA, 255 bp, Artificial Sequence
  derived and/or modified sequence
atgctgctgggcctggccgccatggagctgaaggtgtgggtggacggcatccagagagtggtgtgcggcgtgagcgagcagaccacctgccaggaggtggtgatcgccctggcccaggccatcggccagaccggcagattcgtgctggtgcagagactgagagagaaggagagacagctgctgccccaggagtgccccgtgggcgcccaggccacctgcggccagttcgccagcgacgtgcagttcgtgctgtag

SEQ ID NO: 55891 - protein, 391 aa, Artificial Sequence
  derived and/or modified sequence
MSTLLISSSDALLEELERSTLQDSDEYSNPAPLPLDQHSRKETNLDETSEILSIQDNTSPLPAQLVYTTNIQELNVYSEAQEPKESPPPSKTSAAAQLDELMAHLTEMQAKVAVRADAGKKHLPDKQDHKASLDSMLGGLEQELQDLGIATVPKGHCASCQKPIAGKVIHALGQSWHPEHFVCTHCKEEIGSSPFFERSGLAYCPNDYHQLFSPRCAYCAAPILDKVLTAMNQTWHPEHFFCSHCGEVFGAEGFHEKDKKPYCRKDFLAMFSPKCGGCNRPVLENYLSAMDTVWHPECFVCGDCFTSFSTGSFFELDGRPFCELHYHHRRGTLCHGCGQPITGRCISAMGYKFHPEHFVCAFCLTQLSKGIFREQNDKTYCQPCFNKLFPL

SEQ ID NO: 55892 - DNA, 1176 bp, Artificial Sequence
  derived and/or modified sequence
atgtcaaccctccttatttcatcgtctgatgccctgctggaggagctggagagatctacattacaggattccgacgaatactcaaatcccgctcccctccctctggatcagcactcccggaaggagactaatctcgacgagacgtccgagatcctatccattcaggataatacatccccacttcctgcacagcttgtatataccacaaatatccaggagttaaatgtgtattccgaggcgcaagaacctaaagagtctccccctccttccaagacgtcagcggcagctcagcttgacgagcttatggcccacctgacagaaatgcaggctaaagtggccgtacgcgcggatgctggaaaaaaacacctcccggacaagcaggaccataaagcatcgcttgatagcatgctgggcgggctcgagcaggagctgcaagacctgggaatcgccactgtgccgaagggtcactgcgcctcatgccagaagccaatagccggcaaagtgatccacgcactcggccagagctggcacccggagcattttgtgtgcacacactgtaaagaggagatcggttcctctccattttttgagagatctgggctcgcctactgccccaacgattaccaccagttattcagtccaagatgcgcctattgcgcggcgcccattctcgacaaagtcctgactgcaatgaatcagacctggcaccctgaacatttcttttgctcacattgtggcgaggtattcggggcggaaggcttccacgagaaggataaaaagccttactgcaggaaagacttcctggcaatgttttcacctaagtgtggtggatgcaatcggcctgttctggagaactatctatccgccatggacacagtttggcaccctgagtgttttgtctgtggagattgcttcaccagtttcagtacggggtcattctttgagttggatggaagaccattttgtgagttgcattatcaccaccgccgtggaacactatgccacggctgcgggcagcctatcactgggagatgcatttctgctatgggctataaattccatcctgagcactttgtgtgtgctttttgcttgacccagctcagtaagggtatcttccgtgagcagaacgacaaaacatattgccaaccttgttttaataaactctttccactgtag

SEQ ID NO: 55893 - DNA, 1176 bp, Artificial Sequence
  derived and/or modified sequence
atgagcaccctgctgatcagcagcagtgatgccctgctggaggagctggagaggagcaccctgcaggacagtgatgagtacagcaacccagcccccctgcccctggaccagcacagcaggaaggagaccaacctggatgagaccagcgagatcctgagcatccaggacaacaccagccccctgcctgcccagctggtgtacaccaccaacatccaggagctgaatgtgtacagcgaggcccaggagcccaaggagagccccccacccagcaagaccagcgctgctgcccagctggatgagctgatggcccacctgacagagatgcaggccaaggtggccgtgcgggcagatgctgggaagaagcacctgcctgacaagcaggaccacaaggccagcctggacagcatgctgggcggcctggagcaggagctgcaggacctgggcatcgccaccgtgcccaagggccactgtgccagctgccagaagcccatcgccggcaaggtgatccacgccctgggccagagctggcaccctgagcactttgtgtgcacccactgcaaggaggagatcggcagcagccccttctttgagaggagcggcctggcctactgccccaatgactaccaccagctgttcagcccccgctgtgcctactgtgccgcccccatcctggacaaggtgctgacagccatgaaccagacctggcaccctgagcacttcttctgcagccactgtggggaggtgtttggagctgagggcttccacgagaaggacaagaagccctactgcaggaaggacttcctggccatgttcagccccaagtgtggcggctgcaacagacctgtgctggagaactacctgagcgccatggacacagtgtggcacccagaatgttttgtgtgtggggactgcttcaccagcttcagcacaggcagcttctttgagctggatggccggcccttctgtgagctgcactaccaccacagaagaggcaccctgtgccacggctgcggccagcccatcaccggccgctgcatcagcgccatgggctacaagttccaccctgagcactttgtgtgtgccttctgcctgacccagctgagcaagggcatcttccgggagcagaatgacaagacctactgccagccctgcttcaacaagctgttccccctgtag

SEQ ID NO: 55894 - DNA, 1879 bp, Artificial Sequence
  derived and/or modified sequence
actttttcttactttttatctgggcgttggcgtacctttctcggggtgtctgcgtaactgcccagacttgccttggtttggtcagatgacacctcctctgggactggctagccagcgttcatgtctacattattgatctcgtcttccgatgccttattggaggaactggaacgctccacccttcaggacagtgatgaatattccaacccagctcctcttcccctggatcagcattccagaaaggagactaaccttgatgagacttcggagatcctttctattcaggataacacaagtcccttgccggcgcagctcgtgtatactaccaatatccaggagctcaatgtctacagtgaagcccaagagccaaaggaatcaccaccaccttctaaaacgtcagcagctgctcagttggatgagctcatggctcacctgactgagatgcaggccaaggttgcagtgagagcagatgctggcaagaagcacttaccagacaagcaggatcacaaggcctccctggactcaatgcttgggggtctggagcaggaattgcaggaccttggcattgccacagtgcccaagggccattgtgcatcctgccagaaaccgattgctgggaaggtgatccatgctctagggcaatcatggcatcctgagcattttgtctgtactcattgcaaagaagagattggctccagtcccttctttgagcggagtggcttggcctactgccccaacgactaccaccaacttttttctccacgctgtgcttactgcgctgctcccatcctggataaagtgctgacagcaatgaaccagacctggcacccagagcacttcttctgctctcactgcggagaggtgtttggtgcagaaggctttcatgagaaggacaagaagccatattgccgaaaggatttcttagccatgttctcacccaagtgtggtggctgcaatcgcccagtgttggaaaactacctttcagccatggacactgtctggcacccagagtgctttgtttgtggggactgcttcaccagtttttctactggctccttctttgaactggatggacgtccattctgtgagctccattaccatcaccgccggggaacgctctgccatgggtgtgggcagcccatcactggccgttgtatcagtgccatggggtacaagttccatcctgagcactttgtgtgtgctttctgcctgacacagttgtcgaagggcattttcagggagcagaatgacaagacctattgtcaaccttgcttcaataagctcttcccactgtaatgccaactgatccatagcctcttcagattccttataaaatttaaaccaagagaggagaggaaagggtaaattttctgttactgaccttctgcttaatagtcttatagaaaaaggaaaggtgatgagcaaataaaggaacttctagactttacatgactaggctgataatcttattttttaggcttctatacagttaattctataaattctctttctccctctcttctccaatcaagcacttggagttagatctaggtccttctatctcgtccctctacagatgtattttccacttgcataattcatgccaacactggttttcttaggtttctccattttcacctctagtgatggccctactcatatcttctctaatttggtcctgatacttgtttcttttcacgttttcccatttccctgtggctcactgtcttacaatcactgctgtggaatcatgataccacttttagctctttgcatcttccttcagtgtatttttgtttttcaagaggaagtagattttaactggacaactttgagtactgacatcattgataaataaactggcttgtggtttcaataa

SEQ ID NO: 55895 - DNA, 1176 bp, Artificial Sequence
  derived and/or modified sequence
atgagcaccctgctgatcagcagcagcgacgccctgctggaggagctcgaaagaagcactctgcaggactctgatgagtatagcaatcctgctcccctgcccctagaccagcatagccgcaaagaaaccaacctcgacgagactagtgaaatactgtccattcaagataacacctctcccctccctgcacagctggtctacactacaaatattcaagaactcaacgtttatagtgaagctcaggagcccaaggaatctcctcctccatctaaaacaagtgcggccgcccagctggacgagttaatggcacacctcactgagatgcaggctaaggtggccgtccgggcggatgccggcaaaaagcacctacccgataagcaggaccataaggcttcacttgactccatgcttggcggactggaacaggagctgcaggatttgggaattgcaacggtgcctaaaggacactgtgcttcttgccagaaacctattgctggcaaagtcattcatgcacttggccagtcctggcatcccgaacacttcgtatgtacccattgcaaggaagagataggctcttccccttttttcgagagatcgggactggcttactgccctaatgactatcatcagctattctccccacgctgcgcatattgcgctgcaccaatactggataaggtcctgactgcaatgaatcaaacttggcaccccgagcacttcttttgttcgcactgtggagaggtctttggcgccgaggggttccacgagaaggataagaagccctactgccggaaagatttcctcgccatgtttagtcccaagtgtggtggttgcaatcgacctgttctcgagaactatttgtccgccatggataccgtgtggcatcctgagtgcttcgtctgcggggactgctttacttcattttccacgggtagtttttttgaactggatggacgtccattttgtgagctgcattaccatcacagaagaggaaccttgtgccatggttgtggacagccaatcactggtcggtgtatttcagcgatgggctataaatttcaccccgagcattttgtgtgtgctttctgtctcacgcagcttagcaaggggatatttcgcgaacagaacgacaagacatattgccagccgtgctttaacaagctgttcccactgtag

SEQ ID NO: 55896 - DNA, 1176 bp, Artificial Sequence
  derived and/or modified sequence
atgtctacccttctgatcagctctagtgacgctctgttagaggagttggaacgctcaacgctccaggactcagacgagtactccaatcccgcaccactgccgttggaccagcactccagaaaagagactaacttggatgaaactagcgaaatcctatccatccaggataacactagtcctctgccagcacagctggtctatacaaccaatattcaggagctcaacgtgtactcggaagcgcaggaacccaaggagtctccgcctcccagtaagaccagtgcagccgcacagctcgacgaactgatggcacatctgacggagatgcaagccaaagtggctgtcagagcagacgccggtaagaaacatttacccgataagcaagatcataaagcgtctctggatagcatgctgggcggactcgagcaagaactccaggaccttgggatcgccacggtgccaaaaggacactgcgcttcctgtcagaagcctatcgcaggaaaggtcattcacgcactggggcagagttggcaccctgaacatttcgtatgtacgcattgcaaagaggagattggctccagtcctttttttgagagatcagggctggcctattgtccaaacgactatcaccagctgttctctcccaggtgtgcttattgcgctgcaccaatcctggacaaggtccttacggccatgaaccagacttggcacccagagcacttcttttgcagccactgtggtgaggtgtttggcgcagaaggcttccatgagaaggataagaagccatactgtcgcaaagacttccttgccatgttttcccccaaatgtggcggttgcaacaggccagttctcgaaaattacctgtccgccatggataccgtgtggcacccagaatgttttgtttgcggagattgctttaccagttttagcaccggtagctttttcgagttggacggcagacctttttgcgaactgcactaccaccataggagaggcacactgtgccacggctgtggacaaccaataaccggacgttgtatctctgcgatgggttataaatttcatcctgagcatttcgtttgcgcattctgcctgactcagctatcaaaaggtatcttcagagagcaaaacgacaagacctactgtcaaccgtgctttaacaaactctttcccttgtag

SEQ ID NO: 55897 - DNA, 1176 bp, Artificial Sequence
  derived and/or modified sequence
atgagcaccctgctgatcagcagcagcgacgccctgctggaggagctggagagaagcaccctgcaggacagcgacgagtacagcaaccccgcccccctgcccctggaccagcacagcagaaaggagaccaacctggacgagaccagcgagatcctgagcatccaggacaacaccagccccctgcccgcccagctggtgtacaccaccaacatccaggagctgaacgtgtacagcgaggcccaggagcccaaggagagccccccccccagcaagaccagcgccgccgcccagctggacgagctgatggcccacctgaccgagatgcaggccaaggtggccgtgagagccgacgccggcaagaagcacctgcccgacaagcaggaccacaaggccagcctggacagcatgctgggcggcctggagcaggagctgcaggacctgggcatcgccaccgtgcccaagggccactgcgccagctgccagaagcccatcgccggcaaggtgatccacgccctgggccagagctggcaccccgagcacttcgtgtgcacccactgcaaggaggagatcggcagcagccccttcttcgagagaagcggcctggcctactgccccaacgactaccaccagctgttcagccccagatgcgcctactgcgccgcccccatcctggacaaggtgctgaccgccatgaaccagacctggcaccccgagcacttcttctgcagccactgcggcgaggtgttcggcgccgagggcttccacgagaaggacaagaagccctactgcagaaaggacttcctggccatgttcagccccaagtgcggcggctgcaacagacccgtgctggagaactacctgagcgccatggacaccgtgtggcaccccgagtgcttcgtgtgcggcgactgcttcaccagcttcagcaccggcagcttcttcgagctggacggcagacccttctgcgagctgcactaccaccacagaagaggcaccctgtgccacggctgcggccagcccatcaccggcagatgcatcagcgccatgggctacaagttccaccccgagcacttcgtgtgcgccttctgcctgacccagctgagcaagggcatcttcagagagcagaacgacaagacctactgccagccctgcttcaacaagctgttccccctgtag

SEQ ID NO: 55898 - protein, 152 aa, Artificial Sequence
  derived and/or modified sequence
PSVVDQIAKVEDILKRLNLIKRERIQVLKDLKEKILILNKKSIANYEQQLFQQELEKYRGFQNRLVQATHKQAALMRELTVAFNGLLQDKRVRAEQSKYESFQRQRGAVIGRYKRAYQEFLDLEAGLQSAKTWYKEMKETVESLEKNVETFV

SEQ ID NO: 55899 - protein, 953 aa, Artificial Sequence
  derived and/or modified sequence
MSQLRLLPSRLGVQAARLLAAHDVPVFGWRSRSSGPPATFPSSKGGGGSSYMEEMYFAWLENPQSVHKIRGHHVAQLDPLGILDADLDSFVPSDLITTIDKLAFYDLQEADLDKEFQLPTTTFIGGSENTLSLREIIRRLENTYCQHIGLEFMFINDVEQCQWIRQKFETPGVMQFSSEEKRTLLARLVRSMRFEDFLARKWSSEKRFGLEGCEVMIPALKTIIDKSSEMGIENVILGMPHRGRLNVLANVIRKDLEQIFCQFDPKLEAADEGSGDVKYHLGMYHERINRVTNRNITLSLVANPSHLEAVDPVVQGKTKAEQFYRGDAQGKKVMSILVHGDAAFAGQGVVYETFHLSDLPSYTTNGTVHVVVNNQIGFTTDPRMARSSPYPTDVARVVNAPIFHVNADDPEAVIYVCSVAAEWRNTFNKDVVVDLVCYRRRGHNEMDEPMFTQPLMYKQIHRQVPVLKKYADKLIAEGTVTLQEFEEEIAKYDRICEEAYGRSKDKKILHIKHWLDSPWPGFFNVDGEPKSMTCPATGIPEDMLTHIGSVASSVPLEDFKIHTGLSRILRGRADMTKNRTVDWALAEYMAFGSLLKEGIHVRLSGQDVERGTFSHRHHVLHDQEVDRRTCVPMNHLWPDQAPYTVCNSSLSEYGVLGFELGYAMASPNALVLWEAQFGDFHNTAQCIIDQFISTGQAKWVRHNGIVLLLPHGMEGMGPEHSSARPERFLQMSNDDSDAYPAFTKDFEVSQLYDCNWIVVNCSTPANYFHVLRRQILLPFRKPLIIFTPKSLLRHPEAKSSFDQMVSGTSFQRVIPEDGAAARAPEQVQRLIFCTGKVYYDLVKERSSQDLEEKVAITRLEQISPFPFDLIKQEAEKYPGAELAWCQEEHKNMGYYDYISPRFMTILRRARPIWYVGRDPAAAPATGNRNTHLVSLKKFLDTAFNLQAFEGKTF

SEQ ID NO: 55900 - DNA, 2862 bp, Artificial Sequence
  derived and/or modified sequence
atgagccagctgagactgctgcccagcagactgggcgtgcaggccgccagactgctggccgcccacgacgtgcccgtgttcggctggagaagcagaagcagcggcccccccgccaccttccccagcagcaagggcggcggcggcagcagctacatggaggagatgtacttcgcctggctggagaacccccagagcgtgcacaagatcagaggccaccacgtggcccagctggaccccctgggcatcctggacgccgacctggacagcttcgtgcccagcgacctgatcaccaccatcgacaagctggccttctacgacctgcaggaggccgacctggacaaggagttccagctgcccaccaccaccttcatcggcggcagcgagaacaccctgagcctgagagagatcatcagaagactggagaacacctactgccagcacatcggcctggagttcatgttcatcaacgacgtggagcagtgccagtggatcagacagaagttcgagacccccggcgtgatgcagttcagcagcgaggagaagagaaccctgctggccagactggtgagaagcatgagattcgaggacttcctggccagaaagtggagcagcgagaagagattcggcctggagggctgcgaggtgatgatccccgccctgaagaccatcatcgacaagagcagcgagatgggcatcgagaacgtgatcctgggcatgccccacagaggcagactgaacgtgctggccaacgtgatcagaaaggacctggagcagatcttctgccagttcgaccccaagctggaggccgccgacgagggcagcggcgacgtgaagtaccacctgggcatgtaccacgagagaatcaacagagtgaccaacagaaacatcaccctgagcctggtggccaaccccagccacctggaggccgtggaccccgtggtgcagggcaagaccaaggccgagcagttctacagaggcgacgcccagggcaagaaggtgatgagcatcctggtgcacggcgacgccgccttcgccggccagggcgtggtgtacgagaccttccacctgagcgacctgcccagctacaccaccaacggcaccgtgcacgtggtggtgaacaaccagatcggcttcaccaccgaccccagaatggccagaagcagcccctaccccaccgacgtggccagagtggtgaacgcccccatcttccacgtgaacgccgacgaccccgaggccgtgatctacgtgtgcagcgtggccgccgagtggagaaacaccttcaacaaggacgtggtggtggacctggtgtgctacagaagaagaggccacaacgagatggacgagcccatgttcacccagcccctgatgtacaagcagatccacagacaggtgcccgtgctgaagaagtacgccgacaagctgatcgccgagggcaccgtgaccctgcaggagttcgaggaggagatcgccaagtacgacagaatctgcgaggaggcctacggcagaagcaaggacaagaagatcctgcacatcaagcactggctggacagcccctggcccggcttcttcaacgtggacggcgagcccaagagcatgacctgccccgccaccggcatccccgaggacatgctgacccacatcggcagcgtggccagcagcgtgcccctggaggacttcaagatccacaccggcctgagcagaatcctgagaggcagagccgacatgaccaagaacagaaccgtggactgggccctggccgagtacatggccttcggcagcctgctgaaggagggcatccacgtgagactgagcggccaggacgtggagagaggcaccttcagccacagacaccacgtgctgcacgaccaggaggtggacagaagaacctgcgtgcccatgaaccacctgtggcccgaccaggccccctacaccgtgtgcaacagcagcctgagcgagtacggcgtgctgggcttcgagctgggctacgccatggccagccccaacgccctggtgctgtgggaggcccagttcggcgacttccacaacaccgcccagtgcatcatcgaccagttcatcagcaccggccaggccaagtgggtgagacacaacggcatcgtgctgctgctgccccacggcatggagggcatgggccccgagcacagcagcgccagacccgagagattcctgcagatgagcaacgacgacagcgacgcctaccccgccttcaccaaggacttcgaggtgagccagctgtacgactgcaactggatcgtggtgaactgcagcacccccgccaactacttccacgtgctgagaagacagatcctgctgcccttcagaaagcccctgatcatcttcacccccaagagcctgctgagacaccccgaggccaagagcagcttcgaccagatggtgagcggcaccagcttccagagagtgatccccgaggacggcgccgccgccagagcccccgagcaggtgcagagactgatcttctgcaccggcaaggtgtactacgacctggtgaaggagagaagcagccaggacctggaggagaaggtggccatcaccagactggagcagatcagccccttccccttcgacctgatcaagcaggaggccgagaagtaccccggcgccgagctggcctggtgccaggaggagcacaagaacatgggctactacgactacatcagccccagattcatgaccatcctgagaagagccagacccatctggtacgtgggcagagaccccgccgccgcccccgccaccggcaacagaaacacccacctggtgagcctgaagaagttcctggacaccgccttcaacctgcaggccttcgagggcaagaccttctag

SEQ ID NO: 55901 - DNA, 2862 bp, Artificial Sequence
  derived and/or modified sequence
atgtctcagctgagactgttaccaagccgtctcggggtccaggctgcacgactgctcgctgctcatgatgtgcccgtcttcggatggcgcagtagatctagcggcccacccgcaacctttccgagtagtaaaggagggggcggcagcagttatatggaggagatgtacttcgcatggctcgaaaatcctcagtccgttcataagatccgtggtcaccatgtggcccagttagaccctctgggaatactggacgcagaccttgattcatttgtaccaagcgatctgatcacaactattgataagctggctttttacgatctgcaggaggccgatctcgataaagagttccagctgcccactacaacttttatcggcggaagcgaaaacacactatccctccgagagatcatacgaagattagaaaatacgtattgccagcatattggactagaattcatgttcattaatgatgtggagcagtgccaatggatcaggcagaaattcgagacaccaggcgtgatgcaattcagtagcgaagagaaacgaacactcttggctaggttagtgcggagtatgcgctttgaagacttcctggctagaaagtggtcctctgaaaagcgatttggtttggaagggtgcgaggtaatgatccccgcattaaaaacaatcattgataagtcttccgaaatgggaatcgagaacgtgatcttaggtatgccccatagagggcgcctcaatgtattagccaacgtgattcgcaaggacctcgaacagatattctgtcaattcgaccccaagttggaggccgctgatgagggtagtggagacgttaaataccacctcggtatgtaccatgaaagaattaaccgagtcaccaatcgtaacatcactttatcactcgtggctaaccccagtcatctggaggccgtggatcccgttgtgcagggaaagacaaaggcagaacagttctaccgcggcgacgcccaaggcaagaaagtaatgagcatccttgtgcacggtgacgccgcgttcgctggtcagggagttgtgtacgaaaccttccatctctccgatctcccctcctatacaaccaatggcactgtgcatgtggtggttaacaaccagatcggatttactacagaccccagaatggctcgttcctcaccttatcctacagacgtggctcgcgtggttaatgctcccattttccatgttaatgctgacgaccctgaagctgtgatctatgtgtgttccgtagctgccgagtggcggaacacattcaataaggacgtcgtggtggatctggtctgctacagaagacgtggtcacaatgagatggacgaaccaatgtttacccagccgttaatgtacaagcaaatacatcgacaggtcccagtcctcaaaaagtacgctgataagctgatcgccgaaggaacagtgactttgcaggaatttgaggaggagattgctaagtacgatcggatctgcgaggaggcatatggcaggtccaaggataagaagatcttgcacattaaacactggctcgacagcccttggcctggcttcttcaacgtggatggtgagcctaaatctatgacctgccctgcaacagggattcctgaggatatgttgactcacataggcagtgtagcttcgtccgtccccctggaagactttaagatccacaccggcctgtccagaatacttcgtgggagagctgacatgaccaagaataggacggtggattgggctttagctgagtacatggccttcggcagtttactcaaggagggcattcacgttcggctgagcggtcaagacgtggaacgcggaacgttttctcataggcaccatgtgttacacgaccaagaggtcgatagacggacatgtgtgcctatgaatcacctgtggccagaccaggcaccctacaccgtgtgtaactcttcactgagcgagtatggagttctgggcttcgaactgggctacgcgatggccagtcccaacgcactggtcctttgggaagcccaatttggggatttccataatactgcccaatgcattatagaccagttcatatcaacaggtcaggcaaagtgggtgcgccataatgggatagttctgctactgccccatggcatggaaggcatgggccctgagcactcctcagctaggcccgaaaggtttctacaaatgtcaaatgatgacagtgacgcttaccctgcattcaccaaggactttgaagtctctcagctgtacgactgcaactggatagtcgtgaactgtagtacacctgcaaattatttccacgtgcttagacggcaaattctcctcccatttagaaagccccttataatcttcaccccaaaaagcttactcagacaccccgaggccaaaagtagctttgaccagatggtgtctggcacgagtttccaacgggtgattcctgaggacggtgctgcagctcgggctcctgagcaggttcaaagattgatcttctgcacaggtaaggtgtattatgaccttgtgaaggagaggtcctcccaggatttggaagaaaaggttgccattacaagattagagcagatatctcccttcccgtttgacctcatcaagcaggaggcagaaaagtacccaggtgcagagctcgcatggtgccaggaggagcacaaaaatatgggctactacgactacatctcaccgcgcttcatgaccattctgcgacgcgcaagacccatctggtatgtgggcagggacccagcagctgcacctgctacaggcaaccggaatacgcacctggtgtccttgaagaagtttttggatactgcattcaatttgcaagcctttgaggggaaaaccttctag

SEQ ID NO: 55902 - DNA, 2862 bp, Artificial Sequence
  derived and/or modified sequence
atgagccagctgcggctgctgcccagccggctgggcgtgcaggccgcccggctgctggccgcccatgatgtgcctgtgtttggctggaggagccgcagcagcggccccccagccaccttccccagcagcaagggcggcggcggcagcagctacatggaggagatgtactttgcctggctggagaacccccagagcgtgcacaagatccggggccaccacgtggcccagctggaccccctgggcatcctggatgctgacctggacagctttgtgcccagcgacctgatcaccaccatcgacaagctggccttctatgacctgcaggaggccgacctggacaaggagttccagctgcccaccaccaccttcatcggcggcagcgagaacaccctgagcctgcgggagatcatccggcggctggagaacacctactgccagcacatcggcctggagttcatgttcatcaatgatgtggagcagtgccagtggatccggcagaagtttgagaccccaggagtgatgcagttcagcagcgaggagaagaggaccctgctggcccggctggtgcgctccatgagatttgaggacttcctggccaggaagtggagcagcgagaagcgcttcggcctggagggctgtgaggtgatgatcccagccctgaagaccatcatcgacaagagcagcgagatgggcattgaaaatgtcatcctgggcatgccccaccggggccgcctgaatgtgctggccaacgtcatcaggaaggacctggagcagatcttctgccagtttgaccccaagctggaggccgcagatgagggcagcggagatgtgaagtaccacctgggcatgtaccacgagcgcatcaacagagtgaccaacagaaacatcaccctgagcctggtggccaaccccagccacctggaggccgtggaccctgtggtgcagggcaagaccaaggccgagcagttctacagaggagatgcccagggcaagaaggtgatgagcatcctggtgcatggagatgctgcctttgctggccagggcgtggtgtatgagaccttccacctgagtgacctgcccagctacaccaccaatggaacagtgcacgtggtggtgaacaaccagatcggcttcaccacagaccccaggatggcccggagcagcccctaccccacagatgtggcccgggtggtgaatgcccccatcttccacgtgaatgctgatgatcctgaggccgtcatctacgtgtgcagcgtggccgctgagtggaggaacaccttcaacaaggatgtggtggtggacctggtgtgctacagaagaagaggccacaatgagatggatgagcccatgttcacccagcccctgatgtacaagcagatccaccggcaggtgcctgtgctgaagaagtatgctgacaagctgattgctgagggcaccgtgaccctgcaggagtttgaggaggagatcgccaagtatgaccgcatctgtgaggaggcctacggccgcagcaaggacaagaagatcctgcacatcaagcactggctggacagcccctggccaggcttcttcaacgtggatggagagcccaagtccatgacctgcccagccaccggcatccctgaggacatgctgacccacatcggctctgtggccagctctgtgcccctggaggacttcaagatccacacaggcctgagccgcatcctgcggggccgggctgacatgaccaagaacagaacagtggactgggccctggccgagtacatggccttcggcagcctgctgaaggagggcatccacgtgcggctgagcggccaggatgtggagcggggcaccttcagccaccgccaccacgtgctgcatgaccaggaggtggacaggaggacctgtgtgcccatgaaccacctgtggccagaccaggccccctacacagtgtgcaacagcagcctgtctgaatatggagtgctgggctttgagctgggctacgccatggccagccccaatgccctggtgctgtgggaggcccagtttggagacttccacaacacagcccagtgcatcatcgaccagttcatcagcacaggccaggccaagtgggtgcgccacaatggaattgtgctgctgctgccccacggcatggagggcatgggccctgagcacagcagcgcccggcctgagcgcttcctgcagatgagcaatgatgacagtgatgcctacccagccttcaccaaggactttgaggtgtcccagctgtatgactgcaactggatcgtggtgaactgcagcaccccagccaactacttccacgtgctgcggcggcagatcctgctgcccttcaggaagcccctcatcatcttcacccccaagagcctgctgcggcaccctgaggccaagagcagctttgaccagatggtgtctggcaccagcttccagagggtcatcccagaagatggagctgctgcccgggcccctgagcaggtgcagaggctcatcttctgcaccgggaaggtgtactatgacctggtgaaggagaggagcagccaggacctggaggagaaggtggccatcacccggctggagcagatcagccccttcccctttgacctgatcaagcaggaggccgagaagtacccaggagctgagctggcctggtgccaggaggagcacaagaacatgggctactatgactacatcagcccccgcttcatgaccatcctgcggcgggcccggcccatctggtacgtgggccgggaccctgctgctgccccagccactggaaacagaaacacccacctggtgtccctgaagaagttcctggacacagccttcaacctgcaggcctttgagggcaagaccttctag

SEQ ID NO: 55903 - DNA, 2862 bp, Artificial Sequence
  derived and/or modified sequence
atgagccagctgcggctgctgcccagccggctgggcgtgcaggccgctcggcttctagccgcacacgatgtgccagtgtttgggtggcgtagtcgatcctctggtcctcccgccacattcccatcttcaaagggaggcgggggctcttcatacatggaggaaatgtacttcgcctggctggaaaatccgcagtctgtccacaaaattaggggtcatcatgtagctcagctggaccccctggggatcctcgacgcagacctggactcatttgtgccatctgacctgattactaccatcgacaagctggctttttatgaccttcaggaagctgatctcgataaggagttccagctccccactacaacattcataggcgggagcgagaacacactcagtctacgcgagatcattcggaggctcgagaacacctattgccagcacattggtctggaatttatgtttataaacgatgttgagcaatgccagtggattcggcagaaatttgagacaccaggagttatgcagttcagttccgaggagaagagaaccctactggctagactggtgagatctatgcggtttgaggacttccttgcccgcaaatggtcctctgaaaagagatttggtctggaaggatgtgaggtgatgatccccgctctgaagacaatcatcgacaaaagtagtgaaatgggtattgagaacgttatcttgggcatgccacaccgggggaggctgaacgttctggccaatgtgatccgcaaggacttggaacagattttctgccagttcgatcctaaactggaggcggccgacgagggaagcggcgatgtgaagtatcacctcgggatgtatcacgaaagaataaaccgcgttaccaatcgaaatataaccctgagtttagtggccaacccctcacacctggaagccgtcgaccccgttgtacaaggcaaaactaaggcggaacagttttacaggggagatgcccaggggaagaaagtgatgtctatcctggtccacggagacgccgcgtttgccggacagggcgtagtgtacgaaacatttcatttaagcgacctgccaagttacactaccaatgggacagtacatgtggttgtcaacaaccagattggattcaccactgatccacgaatggccagatcatccccttatccaaccgacgtggcccgcgtcgtcaatgcacctattttccacgtgaacgccgatgatcccgaagccgtcatctacgtttgctccgtagccgctgaatggcgcaatacgtttaataaggacgtcgttgtggacctggtgtgctacaggaggcgagggcacaacgagatggacgagcccatgttcactcagcctctcatgtacaagcaaatccaccggcaggtgcccgtactgaagaaatacgcagacaagctgatagccgagggtacggtcacgctccaagaattcgaagaggagatcgctaaatatgataggatctgtgaggaggcatatggccgaagtaaggacaagaagattctgcacattaagcattggctggattccccttggccaggattcttcaatgttgacggagaacccaaaagcatgacatgcccagcaacaggcatccctgaagacatgctgacacatatcggctcagttgccagttcggtccctctggaggattttaagatacatacaggtttgtctcggattctgaggggtcgggcggatatgacaaagaaccggacagtggattgggcccttgccgaatacatggccttcggcagcctcctcaaagaaggaatacacgtgaggcttagcggccaggacgtagagagagggaccttcagtcataggcaccacgttctgcatgaccaggaagtagacaggcgcacttgtgtgcctatgaatcacctatggcctgatcaagccccatatacagtgtgtaacagcagccttagcgagtacggagtgctgggctttgaattgggctatgcgatggcaagtcctaatgctttagtcctgtgggaagcccagttcggcgatttccacaacactgcgcagtgtattatcgaccaatttatcagtaccggacaggcaaagtgggttcggcacaatgggatcgtccttctgcttcctcacgggatggaaggaatggggccagaacactcatcggcaagaccagagcggttcttacagatgtccaacgatgacagcgacgcctatcctgctttcaccaaggacttcgaggtgtcccagctctatgactgcaactggatcgtagtgaactgcagcacacccgcgaattacttccacgtgctcaggcgacagatcctgctcccgttcaggaagcccttgataatcttcacccccaagagtctcctacgccatccagaagctaagagctcttttgatcagatggtctctggcaccagcttccagcgagttattccagaggacggtgccgccgctcgcgcccccgagcaggttcaaaggttaatcttttgcactggcaaggtatactatgacctcgtcaaagaacgaagctcccaggacttggaagagaaagtcgctattacacgactggaacagatctcaccattccccttcgatttgataaagcaggaagcggaaaagtatccaggagctgaactggcatggtgtcaggaggagcacaagaatatggggtactacgattatatctccccacgatttatgacaatattacgacgggcccgccccatctggtacgtgggtcgagatcctgcagctgcccccgccactgggaatcggaatacccacctggtatccctcaaaaagttcctggacacggcttttaacctgcaggctttcgagggcaagacattttag

SEQ ID NO: 55904 - DNA, 3588 bp, Artificial Sequence
  derived and/or modified sequence
gagtctcaggggcgcgcgcccgtgggcggctgcgtcacgtgacccaggtaattggcacggcgcgcgcgcaccccttccgcgcagccccctgacctgcagcctccggacctcgctgcagcgcggacccggcccgcccgcccgaatgagtcagctgaggctgctgccgtcccgtcttggggtacaggctgcgaggctcctggctgcacatgacgtcccggtgtttggctggcgcagcaggtcctccgggccaccggccaccttcccaagcagcaaaggtggaggcggctccagttacatggaggagatgtacttcgcctggttggaaaacccccagagtgtccacaagatccggggtcaccatgtggcccagctggaccccctgggcattctggatgcagacctggactcctttgtgccctcagacttgatcacaaccattgataaactggccttctatgaccttcaggaggctgaccttgataaggagttccagctgccgacaaccaccttcattgggggctctgaaaacaccctctctctgcgggagatcattcggcgcctggagaacacctactgccagcacattggcctggagttcatgttcatcaacgatgtggagcagtgccagtggatccggcagaagtttgagacccctggtgtgatgcagttctccagcgaggagaagcggaccctgctggcccggctagtgcgctccatgaggtttgaagacttcctggcccggaaatggtcctcagagaagcggtttggcctggagggctgtgaagtgatgattcctgccctcaagaccatcatcgacaaatccagcgagatggggattgagaatgtcatcttggggatgccacacaggggaaggctgaacgtgctggccaacgtgatccgcaaggacctggagcagatcttctgccagtttgaccccaagctggaggcggcggacgagggctccggggatgtcaagtaccacctgggcatgtaccatgagaggatcaaccgcgtcaccaaccggaacatcactctgtcgctggttgccaacccctcccacctggaggcagtggaccctgtggtgcaggggaagacaaaggcagagcagttctaccgtggagatgcccagggcaagaaggtcatgtccatcctggttcatggggacgccgcctttgctggccagggcgtggtatatgagaccttccacctgagcgacctgccctcctacacgaccaatggtaccgtgcacgtcgtcgtcaacaaccagattggattcaccacagacccccgaatggcccgctcctcaccatacccgaccgacgtggcccgggtggtcaatgcgcctatcttccatgtgaatgccgatgacccagaggctgtgatatatgtgtgcagtgtggcagccgaatggagaaacactttcaacaaagatgttgtcgtggacctggtctgttaccgccggcgtggccacaatgagatggacgagcccatgttcacccagccgctcatgtacaagcagatccacagacaggtgcctgtgctgaagaagtacgcagacaagctgattgccgagggcacagtcaccctgcaggagtttgaggaagaaattgccaaatacgaccggatctgtgaggaggcttatggcaggtccaaggataaaaagattctgcatataaagcactggttggactccccctggcctggcttcttcaacgtagatggggagcccaagagcatgacatgcccagccacggggatccctgaggacatgctcacccacatcggcagtgtggccagctctgtgcccctggaggactttaagatccacactggcctctctcgcattctgcggggccgtgcggacatgaccaagaaccggacggtggactgggcgttggcagagtacatggcctttggctccctgctgaaggaaggcatccacgtgcggctcagcgggcaggatgtggagaggggcacattcagtcaccggcaccatgttctccatgaccaggaggttgaccgcaggacgtgtgtgcctatgaatcatctctggcctgaccaggccccgtacaccgtgtgcaacagctccctctcggagtacggagtcctgggctttgagctgggctatgccatggccagccccaatgccctggtcctctgggaggcccagtttggggacttccacaacacggcccagtgcatcatcgaccagttcatcagcaccggccaggccaagtgggtgcggcataatggcattgtgctgctgctgccccatggcatggaaggcatgggcccagagcactcgtcagcgaggcccgaaaggttcctgcagatgagcaatgatgactcggatgcctaccctgcattcaccaaggacttcgaggtgagccagctctatgactgcaactggatcgtggtcaactgctccacaccggccaactacttccacgtgctgcgccggcagatcctgctgcccttccgcaagccgctgattatcttcacacctaaatctctgctgaggcacccagaggccaagtccagctttgaccaaatggtatccgggaccagcttccagcgggtgattcctgaagatggggccgcagcacgggcccctgagcaggtgcagcggctcatcttctgcacgggaaaggtgtactatgacctggtgaaggagcggagcagccaggacctggaggagaaagtggccatcacgcgcctggagcagatctctccattccccttcgacctgatcaagcaggaggcagagaagtacccaggtgcggagctggcctggtgtcaggaggagcacaagaacatgggctactatgactacatcagcccacgcttcatgaccatcctgaggcgcgcacggcccatatggtatgttggccgggacccagcggctgcaccagccacaggaaacaggaacactcacctggtgtcactgaagaagtttctggatactgccttcaatctccaggcctttgagggcaagacattttagagctgggcaaaacctgtgtaggtctcgctgtgggtttgctggggaccaagggggtgatgaaaaggggaggggcggagctcctgcccaggagaggggctgtggggccccaggataaaacagacacagtgacagggccaagagccagcactgctggccttggtgtcatgccagaatctaccaggactgagggagccagaggagtcctataggcaggctactgtgctggagcatcccccagctgctcccatcttgctggaatttcttgggcggcttctccacctgtatctcaagacagacacccgggggcctgtgtctgtggccgctcccatcccggcagccctggctgctgctcgccccaccctcgcttatctgtagattcaaagcgatgttctcttctgtgctcttagaagtagggagttcagcagtaacagccaggtgaagcgaacctgctgggtgatttgtttgcgctctgttttatggggcattcctgcgagatgtgtcagcttctgtgtgaaatgcagccacagctcatgtgtaccaaagtagaaaaccaaatcacagagaaataaaaacatgcttcagag

SEQ ID NO: 55905 - DNA, 2862 bp, Artificial Sequence
  derived and/or modified sequence
atgagtcaactgaggctcttgccatcaaggctgggcgtgcaagctgccaggctcctggctgctcatgatgtccccgtgtttgggtggcggagtcggtcaagtggcccaccagccacttttcctagctccaagggaggcggaggtagctcttacatggaggaaatgtactttgcctggctcgagaaccctcagtcagtgcacaaaattcggggacaccacgtcgcccaattggacccattaggcattctcgatgccgacctcgatagctttgtgcccagcgatctgattacaacgattgataagctggccttttatgacctacaagaagcagacttggataaagaatttcagctgccaactacaaccttcatcgggggatccgaaaataccttgagcctgcgtgaaattatcaggcgccttgagaatacgtattgccagcatatcggtctagagttcatgtttatcaacgacgttgagcagtgccagtggatccgccaaaaatttgagacaccaggcgtgatgcagttcagtagcgaagagaagagaaccctcctggcccgtctggtgcgctccatgaggtttgaggattttctcgcccgaaagtggtcgtcggagaagaggtttggactagagggatgcgaggtcatgattcccgctttgaagaccattatcgataagtcctccgaaatgggtatcgaaaatgtgattttggggatgccccaccgcggaagactgaatgtactagccaacgttatcagaaaagaccttgagcagatcttctgtcaatttgatcctaaactcgaagctgcagatgaaggttcgggcgacgtgaagtaccaccttgggatgtatcacgaacggatcaatcgcgtgaccaacagaaatatcactttgtcgctcgttgccaaccccagccaccttgaggccgtggatcccgtagtgcagggaaagaccaaagcggagcagttctacagaggcgatgcccaaggaaagaaggttatgtctatccttgtccacggggatgccgcttttgcagggcagggtgtcgtgtacgaaacattccatctctcggacctgccctcatacacgaccaacggcacagtccatgttgtggtgaacaatcaaatcggattcaccactgatcccaggatggctcggtctagcccgtacccgactgatgtcgccagagttgtgaatgcacctatttttcatgtgaacgccgatgatccagaagctgtgatatacgtgtgcagcgtcgcagcggagtggcgtaacactttcaacaaagacgtagtagtggacctggtgtgctatcgcagacgagggcataacgaaatggacgagcccatgtttactcagcccctgatgtataagcagatacaccgccaagtccccgtattaaagaagtacgcagataaacttatcgctgagggaactgtcacacttcaggagttcgaggaagagatcgctaagtatgaccgcatctgtgaagaggcctacggcaggtccaaagataagaaaattttgcacattaaacattggttagactctccctggccaggcttctttaatgtagacggtgagccaaagagtatgacttgccccgcaacggggatccctgaggatatgttgacgcacattggctctgtagcaagcagtgttcctctggaagattttaaaattcacactggcttgagccggatccttcgaggacgggctgatatgaccaaaaatcgaactgttgactgggcactagccgaatatatggctttcgggagtctattgaaagagggcatccatgtccgcctctccggacaggacgttgaaagaggcacattttcccatcgacaccacgtgctgcatgaccaggaggtcgatcgacgtacctgtgtgcccatgaaccacctgtggccagaccaggcgccatacactgtgtgcaactcatcactgagtgaatacggtgtgctcggatttgagcttgggtatgccatggccagtcctaatgctctggtgttgtgggaagctcagtttggagattttcacaacacagcccagtgcattatcgaccagttcattagtactggacaagccaagtgggtgcgacacaacggtattgtgctgctgctgcctcatggcatggagggaatgggtcctgaacactcttcagcacgtccagagagatttctgcagatgagtaatgatgactcggatgcctatcccgctttcacgaaggactttgaggtcagccagctttatgattgtaattggattgtagtcaattgcagcacacctgctaactacttccatgtgctccggcgacaaatcctgcttccgtttaggaagcctctcattattttcactccgaagtccctcctgaggcaccccgaagcaaagagttcctttgaccagatggtctccggcacatccttccaacgggtaataccagaggatggcgctgcagccagagccccagaacaggtccagagactgatattttgcactggtaaggtttactatgatcttgtcaaggagagatcctcccaggacttggaagagaaggttgcaataacacggctggagcaaatcagtcctttcccattcgatttaatcaagcaggaggctgagaaataccctggcgctgaattggcctggtgtcaggaagagcacaaaaatatgggttattatgactatatttcacccagattcatgaccatcctgaggcgggcaaggcctatctggtatgtcggcagagaccccgcagctgcccctgcaacagggaatcgtaatacacacctggtcagcctgaagaagtttcttgacactgcatttaatcttcaagccttcgagggcaaaactttttag

SEQ ID NO: 55906 - protein, 715 aa, Artificial Sequence
  derived and/or modified sequence
MVQKYQSPVRVYKYPFELIMAAYERRFPTCPLIPMFVGSDTVNEFKSEDGAIHVIERRCKLDVDAPRLLKKIAGVDYVYFVQKNSLNSRERTLHIEAYNETFSNRVIINEHCCYTVHPENEDWTCFEQSASLDIKSFFGFESTVEKIAMKQYTSNIKKGKEIIEYYLRQLEEEGITFVPRWSPPSITTSSETSSSSSKKQAASMAVVIPEAALKEGLSGDALSSPSAPEPVVGTPDDKLDADYIKRYLGDLTPLQESCLIRLRQWLQETHKGKIPKDEHILRFLRARDFNIDKAREIMCQSLTWRKQHQVDYILETWTPPQVLQDYYAGGWHHHDKDGRPLYVLRLGQMDTKGLVRALGEEALLRYVLSINEEGLRRCEENTKVFGRPISSWTCLVDLEGLNMRHLWRPGVKALLRIIEVVEANYPETLGRLLILRAPRVFPVLWTLVSPFIDDNTRRKFLIYAGNDYQGPGGLLDYIDKEIIPDFLSGECMCEVPEGGLVPKSLYRTAEELENEDLKLWTETIYQSASVFKGAPHEILIQIVDASSVITWDFDVCKGDIVFNIYHSKRSPQPPKKDSLGAHSITSPGGNNVQLIDKVWQLGRDYSMVESPLICKEGESVQGSHVTRWPGFYILQWKFHSMPACAASSLPRVDDVLASLQVSSHKCKVMYYTEVIGSEDFRGSMTSLESSHSGFSQLSAATTSSSQSHSSSMISR

SEQ ID NO: 55907 - DNA, 2148 bp, Artificial Sequence
  derived and/or modified sequence
atggtgcagaagtaccagagccccgtgagagtgtacaagtaccccttcgagctgatcatggccgcctacgagagaagattccccacctgccccctgatccccatgttcgtgggcagcgacaccgtgaacgagttcaagagcgaggacggcgccatccacgtgatcgagagaagatgcaagctggacgtggacgcccccagactgctgaagaagatcgccggcgtggactacgtgtacttcgtgcagaagaacagcctgaacagcagagagagaaccctgcacatcgaggcctacaacgagaccttcagcaacagagtgatcatcaacgagcactgctgctacaccgtgcaccccgagaacgaggactggacctgcttcgagcagagcgccagcctggacatcaagagcttcttcggcttcgagagcaccgtggagaagatcgccatgaagcagtacaccagcaacatcaagaagggcaaggagatcatcgagtactacctgagacagctggaggaggagggcatcaccttcgtgcccagatggagcccccccagcatcaccaccagcagcgagaccagcagcagcagcagcaagaagcaggccgccagcatggccgtggtgatccccgaggccgccctgaaggagggcctgagcggcgacgccctgagcagccccagcgcccccgagcccgtggtgggcacccccgacgacaagctggacgccgactacatcaagagatacctgggcgacctgacccccctgcaggagagctgcctgatcagactgagacagtggctgcaggagacccacaagggcaagatccccaaggacgagcacatcctgagattcctgagagccagagacttcaacatcgacaaggccagagagatcatgtgccagagcctgacctggagaaagcagcaccaggtggactacatcctggagacctggacccccccccaggtgctgcaggactactacgccggcggctggcaccaccacgacaaggacggcagacccctgtacgtgctgagactgggccagatggacaccaagggcctggtgagagccctgggcgaggaggccctgctgagatacgtgctgagcatcaacgaggagggcctgagaagatgcgaggagaacaccaaggtgttcggcagacccatcagcagctggacctgcctggtggacctggagggcctgaacatgagacacctgtggagacccggcgtgaaggccctgctgagaatcatcgaggtggtggaggccaactaccccgagaccctgggcagactgctgatcctgagagcccccagagtgttccccgtgctgtggaccctggtgagccccttcatcgacgacaacaccagaagaaagttcctgatctacgccggcaacgactaccagggccccggcggcctgctggactacatcgacaaggagatcatccccgacttcctgagcggcgagtgcatgtgcgaggtgcccgagggcggcctggtgcccaagagcctgtacagaaccgccgaggagctggagaacgaggacctgaagctgtggaccgagaccatctaccagagcgccagcgtgttcaagggcgccccccacgagatcctgatccagatcgtggacgccagcagcgtgatcacctgggacttcgacgtgtgcaagggcgacatcgtgttcaacatctaccacagcaagagaagcccccagccccccaagaaggacagcctgggcgcccacagcatcaccagccccggcggcaacaacgtgcagctgatcgacaaggtgtggcagctgggcagagactacagcatggtggagagccccctgatctgcaaggagggcgagagcgtgcagggcagccacgtgaccagatggcccggcttctacatcctgcagtggaagttccacagcatgcccgcctgcgccgccagcagcctgcccagagtggacgacgtgctggccagcctgcaggtgagcagccacaagtgcaaggtgatgtactacaccgaggtgatcggcagcgaggacttcagaggcagcatgaccagcctggagagcagccacagcggcttcagccagctgagcgccgccaccaccagcagcagccagagccacagcagcagcatgatcagcagatag

SEQ ID NO: 55908 - DNA, 2046 bp, Artificial Sequence
  derived and/or modified sequence
atgttcgtgggcagcgacaccgtgaacgagttcaagagcgaggacggcgccatccacgtgatcgagagaagatgcaagctggacgtggacgcccccagactgctgaagaagatcgccggcgtggactacgtgtacttcgtgcagaagaacagcctgaacagcagagagagaaccctgcacatcgaggcctacaacgagaccttcagcaacagagtgatcatcaacgagcactgctgctacaccgtgcaccccgagaacgaggactggacctgcttcgagcagagcgccagcctggacatcaagagcttcttcggcttcgagagcaccgtggagaagatcgccatgaagcagtacaccagcaacatcaagaagggcaaggagatcatcgagtactacctgagacagctggaggaggagggcatcaccttcgtgcccagatggagcccccccagcatcaccaccagcagcgagaccagcagcagcagcagcaagaagcaggccgccagcatggccgtggtgatccccgaggccgccctgaaggagggcctgagcggcgacgccctgagcagccccagcgcccccgagcccgtggtgggcacccccgacgacaagctggacgccgactacatcaagagatacctgggcgacctgacccccctgcaggagagctgcctgatcagactgagacagtggctgcaggagacccacaagggcaagatccccaaggacgagcacatcctgagattcctgagagccagagacttcaacatcgacaaggccagagagatcatgtgccagagcctgacctggagaaagcagcaccaggtggactacatcctggagacctggacccccccccaggtgctgcaggactactacgccggcggctggcaccaccacgacaaggacggcagacccctgtacgtgctgagactgggccagatggacaccaagggcctggtgagagccctgggcgaggaggccctgctgagatacgtgctgagcatcaacgaggagggcctgagaagatgcgaggagaacaccaaggtgttcggcagacccatcagcagctggacctgcctggtggacctggagggcctgaacatgagacacctgtggagacccggcgtgaaggccctgctgagaatcatcgaggtggtggaggccaactaccccgagaccctgggcagactgctgatcctgagagcccccagagtgttccccgtgctgtggaccctggtgagccccttcatcgacgacaacaccagaagaaagttcctgatctacgccggcaacgactaccagggccccggcggcctgctggactacatcgacaaggagatcatccccgacttcctgagcggcgagtgcatgtgcgaggtgcccgagggcggcctggtgcccaagagcctgtacagaaccgccgaggagctggagaacgaggacctgaagctgtggaccgagaccatctaccagagcgccagcgtgttcaagggcgccccccacgagatcctgatccagatcgtggacgccagcagcgtgatcacctgggacttcgacgtgtgcaagggcgacatcgtgttcaacatctaccacagcaagagaagcccccagccccccaagaaggacagcctgggcgcccacagcatcaccagccccggcggcaacaacgtgcagctgatcgacaaggtgtggcagctgggcagagactacagcatggtggagagccccctgatctgcaaggagggcgagagcgtgcagggcagccacgtgaccagatggcccggcttctacatcctgcagtggaagttccacagcatgcccgcctgcgccgccagcagcctgcccagagtggacgacgtgctggccagcctgcaggtgagcagccacaagtgcaaggtgatgtactacaccgaggtgatcggcagcgaggacttcagaggcagcatgaccagcctggagagcagccacagcggcttcagccagctgagcgccgccaccaccagcagcagccagagccacagcagcagcatgatcagcagatag

SEQ ID NO: 55909 - DNA, 2148 bp, Artificial Sequence
  derived and/or modified sequence
atggtccagaagtaccagagccccgtgcgggtgtataaatatcccttcgaactgataatggcagcctacgaaagacggttccccacctgcccgctcatccctatgtttgtggggagcgacacggtaaatgaatttaagtctgaggatggcgccatacatgtgatcgaacggcggtgcaaactcgacgtggacgcccccagacttctgaagaaaatagctggagtcgactatgtatattttgtgcagaagaatagtctgaacagccgggaacgcaccctgcatatcgaagcttacaacgagactttctcgaatcgtgtcataattaacgaacactgctgctatactgtgcaccccgaaaatgaagactggacctgcttcgagcagagcgctagcttggatatcaaatctttcttcgggttcgaatctactgtagaaaagattgccatgaaacagtatacatccaacatcaaaaaagggaaggagattatcgagtattatctcagacagctggaagaggaagggatcactttcgtgccgcgttggtccccaccatctatcaccacttctagcgagacatcttcatcatctagtaaaaaacaggctgcctcaatggcagtcgtcattccagaagctgccttgaaagaagggctcagtggagatgctctgtccagcccatcagctcctgaacccgttgtgggaacccctgatgacaagctggacgccgactatattaagcggtacctgggagatctcacccccctgcaggagagctgcctgatcaggctccggcagtggctgcaggagacgcataaggggaaaatccccaaagacgagcatatcctgcgtttcttgcgagccagagatttcaacatagacaaggcccgagagattatgtgccagtcactgacgtggcgtaagcaacaccaagttgactatatcctggagacctggactcccccccaggtcctacaggactactacgctggggggtggcatcaccatgataaggacggcaggcctctgtacgtgctgcggctcggccagatggatacgaagggcctggtccgagcattaggagaggaggctctgctgaggtacgtgctgagtatcaatgaagagggacttagaagatgcgaggaaaacactaaggtttttgggaggcctattagtagctggacctgtctcgttgacctcgaagggcttaacatgaggcacctgtggcgtcccggagtgaaggctcttcttcggatcatagaggtggtcgaggctaattaccccgaaacgttgggtcgactgctgattctgcgcgccccccgcgttttccccgtgctgtggacactagtctcacccttcatagacgacaatactcgtcgaaaatttctcatttacgctgggaatgattaccagggcccaggggggctcttggattatattgacaaggagatcattccggattttcttagcggggagtgtatgtgtgaagtgcccgagggtgggctggtacccaagtcactgtatagaactgccgaggagttagagaatgaggacctgaagttgtggactgagaccatctaccagagcgccagtgtatttaaaggggcaccgcacgaaatactgattcagatagttgacgcctcttccgtgatcacatgggactttgatgtgtgcaagggggatattgtcttcaacatttatcatagcaaacgttctccccagcctcctaaaaaggattcactcggcgcgcatagcattacttcacccggggggaacaacgtccagcttattgataaagtgtggcagctgggccgagactactccatggtggagtctcccctcatctgcaaggagggtgagagtgttcaggggtcccacgtcactcgatggcctggcttctatattctgcaatggaagttccatagcatgcccgcctgcgccgcatcatctctgcctcgggtggatgacgtgctagccagtctacaagtctctagccataagtgcaaagtcatgtactacaccgaggtgataggaagcgaggacttccggggttcaatgacttctctggaaagtagtcactccggcttctcccaactctccgctgccacgacctcttccagtcagtctcacagttcatctatgatcagtagatag

SEQ ID NO: 55910 - DNA, 2148 bp, Artificial Sequence
  derived and/or modified sequence
atggtccagaaataccagagccctgtcagagtgtacaaatatcccttcgagctgatcatggcggcctacgaaaggagattccccacttgtcccctgatccccatgttcgttggctccgatacagtgaacgagtttaaatcggaggatggcgccatccacgttattgagcgacgctgtaaattagatgtggacgcccccagactgcttaagaagatcgccggggtggattacgtctatttcgtgcaaaaaaatagcctgaacagtagggagagaacactccatattgaggcatataatgagacgttttctaatcgagtgatcatcaacgagcattgctgctataccgttcaccccgagaatgaggactggacctgttttgaacagtctgcatcgttggacataaagtctttcttcggcttcgagagcacagtggagaaaattgcgatgaaacagtacacgagtaacatcaaaaagggcaaggagattattgaatattatctgaggcagcttgaggaggaaggcatcactttcgtaccaaggtggtctcctccaagtatcaccacgtcctcggaaacctcatccagtagctctaagaaacaggcagctagcatggctgtggtgatccccgaggctgccctcaaggaagggctgtccggtgatgcgctgtcatcccctagtgcaccagagcccgtagtagggacccccgatgataagttggacgctgactatatcaagcgctacctcggagacctcacccctttgcaagagagctgcctgatccggttgcggcagtggctccaggagacacataaggggaaaattcccaaagacgagcacattcttcgattcctaagggcaagagactttaacatcgataaggcgcgagaaatcatgtgtcagtcgctgacatggcgcaagcagcaccaggtagactatattcttgagacttggacccctccacaagtcttgcaagactactacgccgggggctggcatcaccatgacaaggatggacggcctctctatgtgcttagactggggcagatggacacgaaaggattggtgagggctcttggagaagaggccttgctgagatacgtcctctccattaatgaggagggactgcggcgatgcgaagaaaatacaaaggtgttcggacgccctatcagtagctggacctgcttggtagatctcgaggggctgaacatgaggcacctttggcgtcccggcgtgaaagctcttttgcgcatcatcgaagtcgttgaagccaactatcctgaaaccctggggagactgttgatacttcgggctcccagagtttttccggtcctgtggactcttgtgtcacccttcattgacgataatactagacgaaaatttttaatctacgccgggaatgactaccaggggcctggcgggcttctagactacatcgacaaggagattatccctgatttcctcagcggagaatgcatgtgcgaagtgccagagggaggtctggtcccgaagagcctctacaggactgccgaagaattagagaacgaagatcttaagctatggacagaaacaatctaccagtccgcctcagtgtttaagggggcgcctcatgaaatcctcattcagatcgtggatgcctcctcagtcattacttgggacttcgatgtgtgcaaaggcgacattgtgtttaacatctaccattccaaacgatccccccagcccccaaagaaagactcgctaggagcacactctattacctcacccgggggaaataacgtgcagcttatcgataaggtgtggcaacttggacgagactactcaatggtcgaatctcccctaatctgcaaagagggcgaatctgtccagggatcccatgttacacgatggcccggtttttatatcttgcaatggaagttccactctatgcccgcctgcgccgcctctagtcttcctcgggtagacgatgtgctcgccagcctacaggtgtccagccacaagtgcaaagtcatgtattataccgaagttattggatccgaagacttccggggttctatgacatccctggagagctctcactccggattttcccagctgtccgccgccacaacctcttcttcccagtcccactcttcatccatgatatctagatag

SEQ ID NO: 55911 - DNA, 2046 bp, Artificial Sequence
  derived and/or modified sequence
atgttcgtggggtcggacaccgttaatgaattcaagtccgaggacggagcaatacatgtgatcgagcggcgatgtaagctcgatgtggacgccccaagacttctgaagaaaatcgcgggtgttgactatgtgtactttgtacagaaaaacagtctgaacagcagggagaggacacttcacatagaggcctataatgaaaccttcagtaatcgggtgatcatcaacgagcactgttgttacaccgtgcatccggagaatgaagattggacatgcttcgaacagtccgcgtccctggacatcaagagtttcttcggatttgagtcgacagtagagaagattgccatgaagcagtacaccagtaatataaaaaaaggtaaggaaatcatcgaatactacctccgccaactagaagaagagggaattacttttgttcctaggtggtccccaccttcgatcactacttcgagtgagacctccagttcttcctccaagaaacaggccgcaagcatggctgtggtcatacctgaagcagccctcaaagagggcttgtcaggggacgcgctgtcatccccctcagccccagagcccgtggtgggtacacccgacgacaagctggacgccgactacatcaagcgctacttaggcgatctgacgcccctccaggagagctgcctaatcagacttcgacaatggctgcaggagacccataaggggaagattcctaaggacgaacacatccttcgttttttaagggccagagattttaatattgacaaagcacgtgagatcatgtgccagtcactgacatggcggaagcagcaccaggttgattacatcctcgagacctggacaccacctcaggtgctgcaggattactatgcaggcggatggcatcaccatgacaaggatggacgccctctgtatgtcctgaggttgggccagatggatacaaaagggttggtgagggccctcggggaagaggccctgttgagatatgtgctgtccatcaacgaagaagggcttcggcgctgtgaggagaacacgaaggtgttcggacggccgatttcctcatggacatgcctggtcgacctggagggtctcaacatgcgccatttatggagaccaggggttaaagccctgcttcgcataatcgaagtggttgaggcaaactaccctgagactttagggagactgctgatcctacgcgcgccacgtgttttccccgttctttggacgctggttagcccgtttattgacgacaatacgcgaagaaagttcctgatctacgccgggaacgattatcagggcccagggggactcctggactatatagataaggaaattattcctgattttttgtccggcgagtgtatgtgcgaagttcctgaagggggcctggtgcccaaaagcctgtaccggaccgcggaagagctggagaacgaagacctgaagctctggacagagacgatttaccagtccgctagtgtttttaagggcgccccacatgagatacttatccaaatcgtggatgcgagctccgtgatcacttgggatttcgacgtctgtaagggggatattgtcttcaacatataccattccaagaggtctcctcagccacccaaaaaagacagtctcggcgctcatagtattaccagcccgggggggaacaacgtgcagctcatagataaggtttggcagctcggccgagattactctatggttgagagccctctcatctgtaaggaaggggaaagtgtgcaagggtcccacgtgactcgctggcctggcttttatattttacagtggaagttccattcgatgccggcttgtgccgcttcgagccttcctcgcgtggacgacgtgctggcatccctgcaggtctctagccataaatgcaaggtgatgtactacactgaagtgatcggttctgaggacttccgcggcagcatgacttctctagaaagctcacacagcggcttcagccagctcagcgctgccacaacaagctccagtcagagccatagcagttcaatgatttcgagatag

SEQ ID NO: 55912 - DNA, 2148 bp, Artificial Sequence
  derived and/or modified sequence
atggtgcaaaagtatcaatctccagttcgagtatataagtatcctttcgaactcattatggccgcctacgagcggcgcttccctacgtgtcctctcatcccaatgtttgtcgggagcgacaccgtcaatgaattcaagagtgaagacggtgcaatccatgttatcgagcgtagatgcaaacttgacgtcgacgcgccaaggctcttaaagaaaatcgcgggcgttgactacgtctactttgtacaaaaaaatagcttaaattcaagggagcggacactccatattgaggcttacaacgagacgttctctaacagggtcattattaatgagcattgctgttatacggtccacccagagaatgaagattggacctgctttgaacagtcagcttctcttgacatcaaaagcttcttcggatttgaatctacggtggaaaaaattgccatgaaacagtatacaagcaatattaagaagggcaaagaaattatcgaatattatctacgtcaactggaggaggagggtatcacctttgtgccaagatggtcaccgccttcaattaccacttcgtccgagacatcttctagtagttccaaaaaacaggctgcttctatggccgtcgtgatacccgaggccgccctgaaggaaggtttaagcggcgatgccctcagttccccgagtgcaccagagcctgtggttgggactccagacgacaagctggacgccgattatatcaagcggtacttaggggatctgacccccctacaggaaagctgcctgatcagactgcggcaatggctacaggagacccacaagggaaagattcccaaggacgaacacatactacgtttcttgagagcgcgggattttaatatcgacaaggctcgcgaaatcatgtgtcagagtctgacatggcggaaacaacaccaggtcgactatatcctggaaacatggacacctccacaggtgctgcaagattattatgccgggggatggcatcatcacgataaggatgggagacccttgtacgtgctcaggctgggacaaatggatactaaaggtctggtgagggcattgggagaggaggccctgctgcgatacgtgttgtcaattaacgaagaaggactacggcggtgcgaggaaaacaccaaggtcttcggccgacccattagctcttggacgtgtctggtagatttggaggggctaaatatgagacacctctggcgccctggcgtcaaagccttgctcagaatcatcgaggtggtggaggcgaactatccagagactttgggcaggctgttgatactcagagcgcctcgtgtcttcccggtattatggacactcgtgtcccccttcatcgacgacaatactcgcaggaagtttttgatatacgccggcaatgactatcaggggcctgggggtctgctggactacatcgataaagaaatcattcctgattttctgagcggagagtgtatgtgcgaagtccctgaaggcggcctagtgcctaaaagcctctacagaacggctgaggaactggagaatgaggatttgaaactgtggaccgagacaatctaccaatctgcctctgtgttcaagggcgctcctcatgaaatattaatacaaattgtcgatgcctcatcagtgattacctgggatttcgatgtgtgtaaaggggacattgtgttcaatatttaccatagcaagagaagcccccagccaccgaaaaaagattctctgggagctcatagcatcaccagccccggaggcaataacgtgcagttgattgacaaagtgtggcaactcggtcgcgattacagcatggtggagagtccactcatctgcaaggaaggggagtctgtgcaggggagtcatgtgaccaggtggcctggattttatattctgcagtggaagttccattccatgccggcctgcgccgcgagcagccttccccgggtggacgatgtcctcgcctcactgcaggtttctagccacaagtgcaaggttatgtactacactgaggttatcggttcggaggattttaggggaagtatgacttctctggaatcctcccactccgggttctctcagctgtccgccgcaactacatcaagttctcagtcgcatagctcatcaatgatctctcgctag

SEQ ID NO: 55913 - DNA, 2148 bp, Artificial Sequence
  derived and/or modified sequence
atggtgcagaagtaccagagccctgtgcgggtgtacaagtacccctttgagctgatcatggccgcctatgaaagacgcttccccacctgccccctcatccccatgtttgtgggcagtgacacagtgaatgagttcaagtcagaagatggagccatccacgtgattgaaagacgctgcaagctggatgtggatgccccccggctgctgaagaagattgctggggtggactatgtgtactttgtgcagaagaacagcctgaacagccgggagaggaccctgcacatcgaggcctacaatgagaccttcagcaacagagtcatcatcaatgagcactgctgctacacagtgcacccagaaaatgaagactggacctgctttgagcagagcgccagcctggacatcaagagcttcttcggctttgagagcacagtggagaagatcgccatgaagcagtacaccagcaacatcaagaagggcaaggagatcatcgagtactacctgcggcagctggaggaggagggcatcacctttgtgccccgctggagccccccatccatcaccaccagcagcgagaccagcagcagcagcagcaagaagcaggccgcctccatggctgtggtgattcctgaggccgccctgaaggagggcctgtctggagatgccctgagcagccccagcgcccctgagcctgtggtgggcaccccagatgacaagctggatgctgactacatcaagcgctacctgggggacctgacccccctgcaggagagctgcctgatccggctgcggcagtggctgcaggagacccacaagggcaagatccccaaggatgagcacatcctgcgcttcctgcgggcccgggacttcaacatcgacaaggcccgggagatcatgtgccagagcctgacctggaggaagcagcaccaggtggactacatcctggagacctggaccccaccccaggtgctgcaggactactatgctgggggctggcaccaccacgacaaggatggccggcccctgtatgtgctgcggctgggccagatggacaccaagggcctggtgcgggccctgggggaggaggccctgctgcgctacgtgctgagcatcaatgaggagggcctgcggcgctgtgaggagaacaccaaggtgtttggccggcccatcagctcctggacctgcctggtggacctggagggcctgaacatgaggcacctgtggaggcctggggtgaaggccctgctgcgcatcatcgaggtggtggaggccaactacccagagaccctgggccgcctgctgatcctgcgggcccccagggtcttccctgtgctgtggaccctggtgagccccttcattgatgacaacaccaggaggaagttcctgatctatgctggaaatgactaccagggccctgggggcctgctggactacatcgacaaggagatcatcccagacttcctgagcggggagtgcatgtgtgaggtgcctgagggcggcctggtgcccaagagcctgtacagaacagctgaggagctggagaatgaagacctgaagctgtggacagagaccatctaccagagcgcctctgtgttcaagggggcccctcatgagatcctgatccagatcgtggatgccagcagcgtcatcacctgggactttgatgtgtgcaagggggacatcgtgttcaacatctaccacagcaagaggagcccccagccccccaagaaggacagcctgggcgcccacagcatcaccagccctgggggcaacaacgtgcagctgattgacaaggtgtggcagctgggccgggactacagcatggtggagagccccctcatctgcaaggagggggagagcgtgcagggcagccacgtgacccgctggccaggcttctacatcctgcagtggaagttccacagcatgcctgcctgtgccgccagcagcctgccccgggtggatgatgtgctggccagcctgcaggtgagcagccacaagtgcaaggtgatgtactacacagaggtgattggcagcgaggacttccggggctccatgaccagcctggagagcagccacagcggcttcagccagctgtctgctgccaccaccagcagcagccagagccacagcagctccatgatcagcaggtag

SEQ ID NO: 55914 - DNA, 2046 bp, Artificial Sequence
  derived and/or modified sequence
atgtttgtgggcagtgacacagtgaatgagttcaagtcagaagatggagccatccacgtgattgaaagacgctgcaagctggatgtggatgccccccggctgctgaagaagattgctggggtggactatgtgtactttgtgcagaagaacagcctgaacagccgggagaggaccctgcacatcgaggcctacaatgagaccttcagcaacagagtcatcatcaatgagcactgctgctacacagtgcacccagaaaatgaagactggacctgctttgagcagagcgccagcctggacatcaagagcttcttcggctttgagagcacagtggagaagatcgccatgaagcagtacaccagcaacatcaagaagggcaaggagatcatcgagtactacctgcggcagctggaggaggagggcatcacctttgtgccccgctggagccccccatccatcaccaccagcagcgagaccagcagcagcagcagcaagaagcaggccgcctccatggctgtggtgattcctgaggccgccctgaaggagggcctgtctggagatgccctgagcagccccagcgcccctgagcctgtggtgggcaccccagatgacaagctggatgctgactacatcaagcgctacctgggggacctgacccccctgcaggagagctgcctgatccggctgcggcagtggctgcaggagacccacaagggcaagatccccaaggatgagcacatcctgcgcttcctgcgggcccgggacttcaacatcgacaaggcccgggagatcatgtgccagagcctgacctggaggaagcagcaccaggtggactacatcctggagacctggaccccaccccaggtgctgcaggactactatgctgggggctggcaccaccacgacaaggatggccggcccctgtatgtgctgcggctgggccagatggacaccaagggcctggtgcgggccctgggggaggaggccctgctgcgctacgtgctgagcatcaatgaggagggcctgcggcgctgtgaggagaacaccaaggtgtttggccggcccatcagctcctggacctgcctggtggacctggagggcctgaacatgaggcacctgtggaggcctggggtgaaggccctgctgcgcatcatcgaggtggtggaggccaactacccagagaccctgggccgcctgctgatcctgcgggcccccagggtcttccctgtgctgtggaccctggtgagccccttcattgatgacaacaccaggaggaagttcctgatctatgctggaaatgactaccagggccctgggggcctgctggactacatcgacaaggagatcatcccagacttcctgagcggggagtgcatgtgtgaggtgcctgagggcggcctggtgcccaagagcctgtacagaacagctgaggagctggagaatgaagacctgaagctgtggacagagaccatctaccagagcgcctctgtgttcaagggggcccctcatgagatcctgatccagatcgtggatgccagcagcgtcatcacctgggactttgatgtgtgcaagggggacatcgtgttcaacatctaccacagcaagaggagcccccagccccccaagaaggacagcctgggcgcccacagcatcaccagccctgggggcaacaacgtgcagctgattgacaaggtgtggcagctgggccgggactacagcatggtggagagccccctcatctgcaaggagggggagagcgtgcagggcagccacgtgacccgctggccaggcttctacatcctgcagtggaagttccacagcatgcctgcctgtgccgccagcagcctgccccgggtggatgatgtgctggccagcctgcaggtgagcagccacaagtgcaaggtgatgtactacacagaggtgattggcagcgaggacttccggggctccatgaccagcctggagagcagccacagcggcttcagccagctgtctgctgccaccaccagcagcagccagagccacagcagctccatgatcagcaggtag

SEQ ID NO: 55915 - DNA, 2148 bp, Artificial Sequence
  derived and/or modified sequence
atggtgcagaagtaccagagccccgtgcgggtgtacaagtacccctttgaattgatcatggctgcatatgaaagacgttttccaacgtgccctctgattccgatgttcgttggaagtgacacagtgaacgagttcaaaagcgaggacggagccatccacgtgatcgaacgccggtgcaagctggacgtggacgcccccagactgctcaaaaagatcgctggtgtggactacgtgtacttcgtgcagaaaaactcactgaattcccgagaaagaaccctacacatagaagcttacaatgaaacttttagtaatagggtcattattaacgagcactgctgctataccgtgcaccctgagaatgaagactggacttgttttgagcaaagcgccagtctggatatcaagtcttttttcggatttgagtccactgtagaaaaaattgctatgaaacagtatacatccaatattaagaaggggaaagaaatcattgagtactacctacggcaactcgaggaggaaggcatcacattcgtgccccgctggtcacccccatctatcaccacctcgtcagagacctcatccagtagctcaaagaaacaggccgcctccatggctgttgttatccccgaagccgcacttaaagaggggctgtctggcgatgccttaagttctcccagcgctccagaaccagtggttggaacacctgatgacaagctggacgccgattacattaagaggtacctaggcgacctgacccctctgcaagaatcctgtcttatccgccttaggcagtggttacaggaaacccataaaggaaaaattccaaaagacgagcacattctgaggttccttcgcgcacgggactttaatatagataaggcacgcgaaatcatgtgtcagagtctaacctggcgcaaacaacaccaagtggactatattctcgagacctggacgcccccacaggtgctccaggattattatgcaggaggttggcaccaccatgacaaggatggccgccccctgtacgtacttcgccttggccagatggacactaaaggactggtaagagctctcggagaagaagcactgctacggtatgttttatcaattaatgaggagggcctcaggagatgtgaggagaatacaaaggtctttggcaggccaataagctcttggacgtgcttggttgacctcgagggcctcaacatgcgccacctgtggagaccaggggtaaaggcactgttaagaatcatcgaggttgtggaagcgaattatcccgagaccctgggaaggctgcttatactgcgcgcgcctagggtcttccccgtactatggacactggtctcaccctttatcgatgacaacacccgacgaaagttccttatatatgccgggaatgattaccagggacccggcggcttgctcgactatatcgataaagaaattatcccggactttctcagtggcgaatgcatgtgcgaagtgccagagggtggtctggtaccaaaaagtctatatcgtacagccgaagagctcgagaatgaagacctgaagctctggaccgaaactatttatcagtctgcctcagtgttcaaaggggctccacacgagattctgatccagattgtggacgcgagcagcgtgattacctgggatttcgatgtgtgcaagggggatattgtgttcaacatctatcactctaaaagaagtccacagccacccaaaaaggactccctaggtgcccatagcataacttctccaggcggcaataacgttcagctcatcgacaaagtttggcagttgggccgcgactactcaatggtcgaatctccacttatatgcaaggaaggcgagtcagtccagggcagtcacgtcacccgctggccaggcttttatattcttcagtggaaatttcattcaatgcccgcatgcgcagctagctcactcccccgggtggatgacgtgctggctagcctacaggtgtcatctcacaaatgcaaagttatgtactacactgaggtcattggaagtgaggactttcgcggatctatgacaagtcttgagagcagtcactctgggttttctcagctgtccgccgccacgacctcaagttcacagtcccacagctcttccatgatcagccgctag

SEQ ID NO: 55916 - DNA, 2148 bp, Artificial Sequence
  derived and/or modified sequence
atggtgcagaagtaccagagccccgtgcgggtgtacaagtaccccttcgagttaattatggcggcctacgagcgccggtttcccacgtgcccccttatccccatgtttgtcggtagtgatacagtgaatgagtttaagtctgaggacggagcaatccacgttattgagcggagatgcaagctggacgtggatgccccccgcctccttaagaagattgccggagtggactacgtgtatttcgtgcagaaaaactcacttaactctagagagcggacacttcatatagaggcgtacaacgagacgttttctaacagggtgatcattaatgaacactgctgttatacggtacacccagagaacgaggactggacatgtttcgaacaaagcgcatccttggatataaaatcctttttcggctttgagagtacagtggaaaaaatcgccatgaagcagtatacctctaacatcaaaaaaggcaaggagattatcgaatattatctgcgacagcttgaggaagagggcattaccttcgtcccccggtggagtccccccagcatcactaccagttctgagacatcatcctcctcatctaagaaacaagcagcttctatggccgttgtgattccagaggccgcgctcaaggaaggattgtcaggagacgcgctgtcctccccgagcgcaccagaacctgtggttgggacaccagatgataagcttgatgctgactatattaagaggtacctgggcgatctgacaccattgcaggaaagttgtctcatacgactgcgccagtggctccaggagacccataagggcaaaatcccgaaggacgaacacatactgagattcctacgcgcaagggattttaacatcgacaaagctcgggagattatgtgtcagtctctgacatggcggaagcagcaccaggtggactatattcttgagacatggaccccacctcaggtgctccaggattattatgccgggggttggcaccatcacgacaaggatggtcgccctctctacgtgctacgccttggccaaatggataccaaaggcctcgtgcgcgcattgggcgaagaagcgcttcttcggtatgtgttgagtataaacgaggaagggctgaggagatgtgaagaaaacactaaagtttttgggcggcccatttcatcttggacctgtctcgtggatcttgagggactcaacatgagacacttgtggcgtccaggggtcaaagctttgctcagaataattgaggtcgttgaagcaaactatcccgagaccttaggccgccttctcattcttcgggcaccacgggttttccccgtcttatggacactggtctctccctttattgatgataacacaaggcgtaaattcctcatctacgctggaaatgactaccagggcccgggtggattgctggactatatcgataaggagattattccggatttcctgtctggagaatgcatgtgtgaagtgccagaaggagggctggttcccaagagcttatacagaaccgctgaagagctggagaacgaggatctgaaattgtggaccgaaacaatctatcagtcagcctccgtgtttaagggagctccacacgagattctgatccagatagttgatgcttccagcgtcattacttgggattttgacgtgtgcaagggcgatatcgtgtttaacatctatcacagcaagagaagcccgcagcctcccaagaaagattccttaggtgcacactcgataacctcaccaggagggaacaatgtccagttgatagataaagtgtggcagttaggacgcgactacagcatggtagaatcacccctcatctgtaaagagggcgaatcggtgcagggcagtcacgtgacccgatggccgggcttctatattctccaatggaaattccattctatgcccgcctgcgccgcctcctcgctacctagagtggacgacgtgctggcttcactgcaggtcagctcccataagtgcaaggtgatgtactataccgaagtgatcggttctgaagactttaggggaagtatgacaagcttggagtcatcacactcaggtttcagtcagctgtctgctgccacaacttccagctctcagtcccattcgagtagtatgatcagcaggtag

SEQ ID NO: 55917 - DNA, 2046 bp, Artificial Sequence
  derived and/or modified sequence
atgttcgtgggcagcgacaccgtgaacgagttcaagagcgaggacggcgccattcacgtcatagagcgccgctgtaagctggacgtagacgccccaagattgttgaagaaaatcgcaggggtggactacgtttattttgtacagaagaattccttaaactctagagagcggactttgcatatcgaagcctacaatgaaacattttcaaacagagtcatcatcaatgagcattgctgctacaccgtgcaccccgagaatgaagactggacctgttttgagcaatccgcctccctagacatcaagagtttcttcggcttcgagtcaaccgtcgaaaaaatagccatgaagcagtacactagtaacatcaaaaaaggaaaagagattatcgaatattacctgagacagctggaggaagaaggcatcacgttcgtcccgcgttggagcccacctagcatcacgacatctagcgagacatcctcaagttcatccaagaaacaggctgcgtccatggccgtcgtcatccctgaggcagccctgaaggagggcctgtctggagatgcactgtcgtctccctcggcacccgaacccgtggtgggtacacctgacgataagctcgacgctgactacatcaagcggtacctgggtgatctgactccgctgcaagaaagttgcctgatcaggctcagacagtggcttcaagagacgcataaggggaaaatccccaaggacgagcacattctcaggtttcttcgggctagggatttcaatattgacaaggctcgggaaattatgtgtcagtctctgacgtggaggaagcagcaccaggtggactatattctagaaacatggacaccaccccaggtccttcaggactattacgccggcggttggcaccaccacgataaggacggacggccactgtatgtgctccggttagggcaaatggataccaaaggtctcgtccgggcactgggggaggaggcccttcttaggtatgttctgagtataaatgaggagggcctgcggaggtgcgaagaaaacaccaaggttttcggtaggcctatctccagctggacctgtttggtggatctagaaggactaaacatgagacacctctggcggccgggagtcaaagcactgctgagaatcatagaagtggtggaggccaactatccagagactctgggaaggctgttaatcctgcgagccccccgcgtgtttccagttctctggacactggtgagccccttcattgatgacaacactaggcgcaagttcttaatttacgccgggaacgactaccaggggcctggcggcctcctggattacattgacaaggaaattatcccggatttcctttccggcgagtgtatgtgcgaggtgcctgagggtggcctggtgcccaaatctctctatcggactgccgaggagctggagaatgaggatttgaaattgtggaccgagactatctatcagagtgcctctgtcttcaaaggagccccacacgaaattcttattcagatcgttgacgcgtcgagcgtgattacatgggactttgatgtctgcaaaggggatattgtcttcaatatctaccactctaagcgcagcccccagccacctaaaaaagatagcctaggtgcccacagcatcacctcccctgggggcaataatgtccagcttatcgataaagtgtggcagctgggacgtgattacagcatggtcgagagccctctcatctgtaaagaaggtgagagtgtgcagggtagtcacgtgactcgctggccggggttttacatattgcagtggaagtttcacagcatgccagcttgtgcggccagctcactcccccgggtggatgacgtgctcgccagtctccaggtgtcttcccataagtgtaaagtcatgtattataccgaggtcatcgggtctgaggactttcgcgggagcatgactagcctggaatcgtcccattcaggattttcacagctgagtgccgccaccaccagtagtagccaatcgcactcatcaagtatgatttctcgctag

SEQ ID NO: 55918 - DNA, 2148 bp, Artificial Sequence
  derived and/or modified sequence
atggtgcagaagtaccagagccccgtgcgggtgtacaagtacccctttgaacttattatggccgcatacgagcgccgattccccacctgccccctgatccccatgttcgtcgggagtgatacggtgaacgaattcaaatccgaagatggggcaatccatgtcattgaaagacggtgtaaactcgacgtggatgctccacgcctgctcaagaaaattgctggagtggattacgtgtacttcgtgcagaaaaactcactgaacagccgagagcggacactgcatatcgaggcctataatgagactttctcgaatagggtgattatcaacgagcattgctgttacactgtgcatccggagaacgaggactggacctgctttgagcagtcagcatccctcgatatcaagtccttctttgggttcgaaagtacagtagagaaaatcgctatgaagcagtacacctctaacatcaaaaaaggaaaggaaataatcgaatactacctgcgacagttggaggaagagggtatcactttcgtgcctcgctggtcgcccccaagcatcacaaccagttcagagacctccagcagtagcagcaaaaagcaggccgccagtatggcagttgtgattcctgaagccgctctcaaagagggtctcagcggagacgcccttagctcgccttccgcacccgagcccgtcgtggggacgcctgacgataagctggacgccgattatattaagcggtacttaggagatctgaccccgctccaagagtcctgcctgatcagactgcgacagtggctgcaagagactcacaagggcaaaattcctaaagacgaacacattctgcggttcctgagggctagggatttcaatatagacaaggcccgagagattatgtgccagagcttgacctggcggaagcagcaccaggtggactacatcctcgagacatggacccctccacaggtcttacaagattattacgcagggggatggcaccaccatgacaaggatggccgaccactctatgtccttcggctcggccaaatggacacgaagggcctggtgagagctctgggggaggaggcgttgctgaggtatgtcctctctatcaatgaagaggggctgaggcgctgtgaagaaaatactaaggtgttcggtcgcccaatcagtagctggacctgtctagtcgatctagaggggcttaacatgaggcacctatggcgaccgggcgtgaaagcgttactgaggatcatcgaggtcgtggaggctaattatcctgagactctgggaaggctgctcatcttacgtgcccctcgcgtattccccgtcctgtggacactggtgagtccattcatagacgataatacccggcgcaaattcctgatctatgcgggcaacgactaccagggacctggggggctgctcgactacatcgacaaggagattatcccagactttcttagtggcgagtgcatgtgcgaagtgccagagggtggccttgtgcctaagtccctgtatagaaccgctgaggaacttgaaaatgaggacctgaagctatggactgaaaccatctatcagtctgcgagtgtcttcaaaggagcccctcatgaaatccttatccagatcgtggatgcctcatctgtaatcacttgggacttcgacgtttgcaaaggtgatattgttttcaatatctatcattcaaaacggtctccccaacctcccaagaaggatagcctgggcgcccattcgatcacctccccgggcggcaacaatgtgcagctcatagataaggtctggcagttgggccgcgattatagcatggtggagagtcccctcatctgcaaggagggcgagagcgtgcaagggtcccacgtgacacgctggccaggattttatatattacagtggaagttccacagcatgcccgcctgcgcagcctctagtctccctagagtcgacgacgtccttgcctctttgcaagtatcctcccacaagtgcaaagtgatgtactacacggaggttattggatctgaagatttccgagggtccatgacatccctggaaagctctcattcaggcttcagtcagttgtctgctgcaactacaagcagctcccagtcgcacagctcctccatgattagcaggtag

SEQ ID NO: 55919 - DNA, 2148 bp, Artificial Sequence
  derived and/or modified sequence
atggtacaaaagtatcaaagcccagtacgagtgtataaatacccattcgagctcattatggccgcatacgaacgacggttccctacatgtccattgattccaatgtttgttgggagcgacaccgttaacgaattcaaatctgaggacggggctatccacgtcattgaacgcaggtgtaagctcgacgtcgatgcaccccgactacttaaaaaaatcgccggagtggattatgtttacttcgtgcagaaaaactcgctgaatagccgcgagcggacattgcacatcgaggcttataatgaaacattcagcaatagagtgataattaatgaacattgctgttatacggttcaccccgagaacgaagactggacctgctttgagcagtctgcatcactggacattaaaagttttttcggcttcgagtccacggtggaaaagatcgctatgaagcaatatacctctaacattaaaaagggcaaggaaatcatagagtactatctgcgccagttggaagaggagggcatcactttcgtgccacgatggtcaccaccttctattaccacatcatcagaaacaagctcatcatcaagtaagaagcaggcagcttcaatggcagtggtgattcctgaagccgctctcaaggaggggttgagtggggatgccctgagctccccatcagcgccagagcccgtggtaggaacccctgacgataagcttgatgcagattacattaagcgataccttggcgatctgacacctctacaggagagttgcctcattcgccttaggcaatggctccaggagacgcacaagggaaaaattcctaaggatgaacacatcctgaggttcctccgtgccagagatttcaatatcgacaaagccagagaaattatgtgtcagtcactaacatggcgcaagcagcaccaggttgactacattctggagacgtggacccctccgcaggtgcttcaagattattacgccggaggatggcaccaccacgacaaagacggtaggccactgtatgtgctccgtcttggtcaaatggataccaaaggcctggttcgtgcattgggcgaagaggccctcctcaggtacgtacttagtattaacgaagagggtctgcgcagatgtgaggagaataccaaggtatttggtcgacccatatcttcctggacctgcctggtcgatctcgagggcctcaacatgcggcatctctggcgccctggtgtgaaggccttactacgtatcatcgaggtcgtggaagctaattatcctgaaacattggggcgtctactgattctgcgtgcacctcgcgtttttccagtactctggaccctcgtctcacctttcattgacgacaacaccaggaggaaatttctgatatacgcaggcaatgattatcaggggccaggagggctgctagactatatcgacaaagagatcatccccgactttcttagcggtgagtgcatgtgcgaggtgccagaggggggtttggtgcccaagtctctctaccgtaccgcagaagagcttgagaatgaagaccttaaactttggacagaaacaatctaccagagtgcctctgttttcaaaggggcaccgcacgaaattctaatccagatcgtggacgcgtcgtccgtgataacctgggattttgacgtctgcaaaggagacattgtgttcaatatatatcattccaagagatctcctcaaccccctaaaaaggatagtttgggggctcattctatcactagtcccggaggcaacaacgtacaactgatagacaaagtgtggcagctggggagagattattcaatggtggagtctcctttgatctgtaaggaaggggaatcagtccagggttctcatgtgacccgatggcccggtttttatatactgcaatggaaattccattctatgcccgcttgcgccgctagcagccttcctcgggtggacgatgtgctcgcatccttacaagtgtcttctcataagtgcaaagttatgtattacacagaggtgattggcagcgaggacttccggggaagcatgactagcttggaaagttcacatagtggctttagtcagctttctgcggctaccacctcctcaagtcagtcccacagctccagcatgatcagtaggtag

SEQ ID NO: 55920 - DNA, 2148 bp, Artificial Sequence
  derived and/or modified sequence
atggtgcagaagtaccagagccccgttagggtttacaagtatccttttgagctcatcatggcggcttacgaaagacgttttcccacctgcccattgatcccaatgttcgtggggagcgacactgtaaacgagttcaagtcagaggacggagccatccatgttatcgagcggagatgcaagttggatgtagacgcgccacgactgctaaagaaaatcgccggagtggactatgtgtatttcgtgcagaaaaactctctgaatagccgggagcgaactctgcacatcgaggcgtacaacgaaacctttagcaatagggtgatcatcaacgaacattgttgttatacagtgcatccagaaaacgaggactggacatgcttcgaacagtcagccagtttggatataaaatcgtttttcggcttcgaatctacggtggaaaagattgctatgaagcagtacaccagcaacatcaagaagggaaaagagattatagaatattatttgaggcagctggaagaagaagggattacattcgtgcccagatggagtccaccatccattacaacctccagcgaaacatcttcaagctctagtaagaagcaagcagccagcatggcagtggtgatccctgaagcagctctcaaggagggactgtccggtgacgccctgagctctccctcggctcctgagccggtggtcggaactccggatgacaaactcgacgccgactacattaagaggtacctgggtgacctcactcccctgcaagagagctgtctgatcaggctgcgccagtggctgcaggagacacataagggcaagattccaaaagacgagcatatattacggtttttgcgtgctagagacttcaatatagataaagctcgagagatcatgtgtcagagcctaacatggcgcaagcagcaccaagttgactatatcctggaaacttggacgccccctcaagtcctgcaggattactacgccggaggatggcaccaccacgataaggacgggagaccactctacgtccttcgcctcggacagatggacactaaggggttggtgcgcgcactgggcgaagaagctctgctgcggtatgtgctgtccataaatgaagaggggttgaggaggtgcgaagagaacactaaagtgtttggtagacctatatcatcctggacttgcttggttgacctcgaaggtctcaatatgcgtcacctatggcggccaggagtgaaagctctcctcagaattattgaagtggtggaagctaactaccctgaaactctgggcaggctgcttattctgcgcgctcccagggtttttcctgtgctgtggacgctcgtgagcccttttatcgatgacaacacgcggaggaagtttctgatatacgccggaaacgactatcagggccctggtggactccttgactacatcgacaaggaaatcatccccgacttcctgtcgggagaatgtatgtgcgaggtccccgagggcggattggtcccgaaatcactctaccggacagctgaagaacttgaaaatgaagatctgaaactgtggaccgagacaatttaccaatcagcctctgtgttcaagggagctccccatgagattctgatccagatcgtcgacgcctcctcagtgattacctgggactttgatgtctgtaagggcgacatcgtttttaacatctatcacagtaagcggagtccacaaccccctaaaaaagattctctgggcgcacactccatcacatcccctggcggaaacaatgtgcagctgattgataaggtctggcaacttggtcgagactactctatggtggagtctcctctcatttgtaaagagggcgagtcagtgcagggctcccacgttacgcgatggcccggtttctacatcttgcagtggaaattccactctatgccggcttgtgctgctagctctctacctagggtcgacgatgtgctcgcaagcttgcaggtgagcagtcacaagtgtaaggttatgtactacaccgaagtgattgggagtgaggactttaggggatccatgactagcctcgagagtagtcacagcggcttttcccagctgtctgctgcaaccacgagctcttctcagtcacattcttcctcaatgataagtcgatag

SEQ ID NO: 55921 - DNA, 2046 bp, Artificial Sequence
  derived and/or modified sequence
atgtttgtagggagtgacacggtgaacgaattcaagtccgaagacggagcgattcatgtgatcgagcgcaggtgcaaactagatgttgatgcgccacgacttcttaagaagattgctggtgtcgactatgtttactttgtccagaagaacagcctcaatagtcgggagcgcacgttgcatatcgaagcatacaatgagactttctccaaccgtgtgattatcaacgaacactgttgttacacagtacaccctgagaacgaagattggacatgctttgaacagtcagctagcctggacattaagtcttttttcggctttgagtctactgtggaaaagatcgcaatgaagcagtacaccagtaatatcaaaaagggcaaggagatcatagagtattatctgcggcagttggaggaggaaggcatcacatttgtgcctcgttggtctcctccttccataaccacttctagtgagacgagctcgagctcctctaaaaagcaggcagcctccatggctgtcgttatcccggaagccgctctgaaggaaggtctgtcaggcgacgccctttctagcccttctgcccctgaaccggttgttgggacccctgacgataagctcgatgcggactatattaagaggtacctaggagatctgacacccctgcaggaatcatgcctgatccgcctccggcaatggctgcaggaaacacacaaaggcaaaatccccaaagacgagcacatcctgaggtttcttagggcccgtgattttaatatagataaagcgagagagataatgtgtcagagtctgacctggaggaaacagcaccaagtggactacattctggagacttggactcctccccaggtactgcaagattactacgctggagggtggcaccaccatgataaggacggacgtcccctttacgtgttgagactgggccagatggacacaaaaggactagtaagggccttaggtgaggaggcactgctccggtacgttctgagcattaatgaggaaggacttcgccgatgtgaagaaaacacaaaagtattcggcaggccaatttcttcatggacttgccttgtggacctggaaggccttaacatgcgccacctgtggagacctggagttaaagcattgcttcgcatcatcgaggtagtcgaagctaattacccagagacgttagggagattgctgatcctacgggctccacgcgtttttccagtgctgtggactctggtgagcccatttatcgacgacaacacccgcaggaaattcctgatttatgccggtaacgactaccagggacccggtggtcttctcgactacatagacaaggagataattcctgattttctgtcgggagagtgtatgtgcgaggttcccgagggcggactagtcccaaagtccttataccgtacggccgaggaactggagaacgaggatctgaagttgtggaccgagaccatttatcagtctgcgtcagtgttcaaaggagctccacacgaaatacttatacaaatagtcgacgcgtcaagcgtcataacatgggactttgatgtgtgcaagggggatattgtgttcaacatctaccatagcaagcggtcgccacaacctcccaaaaaagacagccttggagcgcactctatcacttcgccgggtggcaataacgtccagctgattgacaaggtctggcagctgggacgggactattcgatggtggaatcacctttgatatgcaaggagggggagagcgttcaggggtctcacgtcaccagatggcccggtttttatatcttgcagtggaaattccactctatgccggcttgcgctgcttccagtcttccccgtgtggatgacgttctcgctagcttacaggttagctcacacaagtgtaaagtaatgtattataccgaagtgataggatctgaagattttcgaggtagtatgacctcgctggaaagctctcattccggcttctctcaactgtcagccgcaaccacaagttcctctcagtctcactcttcatctatgatttctcgctag

SEQ ID NO: 55922 - DNA, 2148 bp, Artificial Sequence
  derived and/or modified sequence
atggtgcaaaagtatcagtcgcccgtgagggtctataaatacccattcgagctgataatggcagcatatgagagaaggttccccacctgccctctgatcccaatgttcgtgggaagtgacaccgtcaatgaatttaaaagcgaggatggagcaattcatgtcatcgaaaggcgttgcaagttggatgtggacgcgccaagactgctgaagaagattgccggtgtggactacgtgtactttgtacagaaaaattcactcaactcacgggagagaacactccacattgaagcgtataacgaaacttttagtaaccgcgtgataattaacgaacactgttgttatacggtgcaccctgagaatgaggactggacatgctttgagcagagcgccagcttggacataaaatcattttttgggtttgagtccacagtcgaaaaaatcgcaatgaaacagtacacctccaatatcaaaaaaggaaaagagatcatagagtactatctgagacagctggaggaagaagggattacgttcgtcccaaggtggtctcccccatccatcaccactagttccgagacatcttcgagctccagcaagaagcaggctgcttccatggccgtggtcatcccggaggccgctctgaaagagggcctcagcggcgacgccctttctagtccttccgcgcctgaacccgtagtcggcacccctgatgataaactcgatgcagattacatcaaaaggtacctgggcgatctaacacccctccaggagagttgcctgatccggcttcggcagtggctgcaagagacacacaagggtaagattcctaaagacgaacatatccttcggttcctgagagcacgcgacttcaatatcgacaaggcacgggagattatgtgccagtcactgacatggcggaaacagcaccaggtggattacatccttgaaacgtggactcccccacaggtgttacaggattactacgcaggaggctggcaccaccacgataaagatggccgaccgctgtacgtcctccgcttagggcagatggatacaaaggggctggtccgggctctgggcgaggaagcacttctgaggtacgtattatctatcaatgaggagggtctgcgacgctgcgaggagaatacgaaggtctttgggaggcccatatcttcttggacttgtctcgtcgatctggaggggttaaatatgcgccacctttggcggccaggtgtcaaggccttgcttaggatcatcgaagtggtcgaggccaattacccagaaacactggggagactgctgattttgagagctccgagagtgttcccagttctatggactctggtctccccctttattgatgataacacccggaggaagtttttaatctatgcaggaaatgactatcaaggcccaggaggcctgctcgactacatagacaaagaaatcattcccgatttcctgagtggagagtgcatgtgcgaagtgcccgagggcggtctggtcccgaagagtctgtaccgaaccgccgaagagctcgaaaacgaggatctgaagctatggaccgaaacgatctaccaaagcgcctccgttttcaagggagcgccacacgagattctgatacagatcgtggatgcctcgagcgtcatcacctgggactttgacgtctgcaagggtgacatagtgttcaatatttaccatagtaagcggagccctcaaccccctaaaaaggattccctgggcgcacacagcatcactagcccgggaggcaataacgtgcagctcatcgacaaggtgtggcaacttgggagagactactctatggttgagagccctctcatatgtaaggaaggcgagtcggtccaggggagtcatgtgacacgatggcctggcttttatattttgcagtggaaattccattcaatgcccgcatgtgcagccagtagcctgccgcgtgtagacgacgtgctcgcatccctgcaagtgagttcccacaagtgtaaagtaatgtactatacagaggtgataggatctgaagattttcgaggctccatgacatccctggaatccagtcattcgggattttcacagctctctgcagcgaccactagtagtagccaatctcacagcagcagtatgataagtaggtag

SEQ ID NO: 55923 - DNA, 5437 bp, Artificial Sequence
  derived and/or modified sequence
caagtgccgtcgccgcgccccttccccctcccgcctccccggccccctccccggaaccggcggtcgagctacggtcgcggagcagtggaaccgagactgccccgcggagccgccggtatgagcgcccctcgccaccccgtgtcccaggcccggcctttctgacaagagctagacttcgggctccttgaggatattcagttttgtatgtttgaatatcctctcaccatgttcagcataaagtaccattcttaatgattatcctcaacaagacaggtgtgagagggttgctgttgtattgcaatcatggtgcagaaataccagtccccagtgagggtgtacaaatacccctttgaattaattatggctgcctatgaaaggaggttccctacatgtcctttgattccgatgttcgtgggcagtgacactgtgaatgaattcaagagcgaagatggggctattcatgtcattgaaaggcgctgcaagctggatgtagatgcacccagactgctgaagaagattgcaggagttgattatgtttattttgtccagaaaaactcactgaattctcgggaacgtactttgcacattgaggcttataatgaaacgttttccaatcgggtcatcattaatgagcattgctgctacaccgttcaccctgaaaatgaagattggacctgttttgaacagtctgcaagtttagatattaaatctttctttggttttgaaagtacagtggaaaaaattgcaatgaaacaatataccagcaacattaaaaaaggaaaggaaatcatcgaatactaccttcgccaattagaagaagaaggcataacctttgtgccccgttggagtccgccttccatcacgacctcttcagagacatcttcatcatcctccaagaaacaagcagcgtccatggccgtcgtcatcccagaagctgccctcaaggaggggctgagtggtgatgccctcagcagccccagcgcacctgagcccgtggtgggcacccctgacgacaaactagatgccgactacatcaagagatacctgggcgatttgactccgctgcaggagagctgcctcattagacttcgccagtggctccaggagacccacaagggcaaaattccaaaagatgagcatattcttcggttcctccgtgcacgggattttaatattgacaaagccagagagatcatgtgtcagtctttgacgtggagaaagcagcatcaggtagactacattcttgaaacctggacccctcctcaggtccttcaggattactacgcgggaggctggcatcatcacgacaaagatgggcggcccctctacgtgctcaggctggggcagatggacaccaaaggcttggtgagagcgctcggggaggaagccctgctgagatacgttctctccataaatgaagaagggctaaggcgatgcgaagagaatacaaaagtctttggtcggcctatcagctcatggacctgcctggtggacttggaagggctgaacatgcgccacttgtggagacctggtgtgaaagcgctgctgcggatcatcgaggtggtggaggccaactaccctgagacactgggccgccttctcatcctgcgggcgcccagggtatttcctgtgctctggacgctggttagtccgttcattgatgacaacaccagaaggaagttcctcatttatgcaggaaatgactaccagggtcctggaggcctgctggattacatcgacaaagagattattccagatttcctgagtggggagtgcatgtgcgaagtgccagagggtggactggtccccaaatctctgtaccggactgcagaggagctggagaacgaagacctgaagctctggactgagaccatctaccagtctgcaagcgtcttcaaaggagccccacatgagattctcattcagattgtggatgcctcgtcagtcatcacttgggatttcgacgtgtgcaaaggggacattgtgtttaacatctatcactccaagaggtcgccacaaccacccaaaaaggactccctgggagcccacagcatcacctctccgggtgggaacaatgtgcagctcatagacaaagtctggcagctgggccgcgactacagcatggtggagtcgcctctgatctgcaaagaaggagaaagcgtgcagggttcccatgtgaccaggtggccgggcttctacatcctgcagtggaaattccacagcatgcctgcgtgcgccgccagcagccttccccgggtggacgacgtgcttgcgtccctgcaggtctcttcgcacaagtgtaaagtgatgtactacaccgaggtgatcggctcggaggatttcagaggttccatgacgagcctggagtccagccacagcggcttctcccagctgagtgccgccaccacctcctccagccagtcccactccagctccatgatctccaggtagtgccgcgctgcctgcacctagtgtgcagaggggacggccgcccctcctcggacagccagctgcacccgcccacccagcggcgacattgtacagactcctctcacctctagatagcaaatagctctcagatggtaaacgtagtcgtttgatcccaaaactaccttggcaggtagttttaactctgatcctaacttaactcaatagccatagattttgtatacgttgtgcacaaaatccaaccagagcgcaagggctctcttgaaagaaaagtagtttctgtaccaattaaaggattgacgtggtctcagatattgatgcaaaaaatttttccaacgaactccgcattgtccattagtgaatgaattcctgtgacatcctccagagatggcccctcctcacctgggacggaagctgccagctcgcttcccccaagctgcctcatggcccgcacgccgcctcacggcccccatgcttcccgccagtcaagatggtctgtggacttagggccagcccttgaggtccttatcctctgaggattcagaggttgcctgcggagtaccttgtcccagggccagacacacccacaccacccactgtcctgcagtggggccgggggctcaggaggggctctcagggactcctggtgactccaggaaaatgctgccatcgttaaacattactttctctttcctccttttcaaatctttttgatactttttagagcaggatttttctgtatgtgaacttgggtgggggggttcttcccgtttccttccgtgcgtcgcccctctcacctgcagtcagctcccagcccagtgtaggccatctcctctgtgccctctggtggctcattgtcctcagagcccagacagttccagccactaggaggccgtcttggaaccagcaagtcgcatttgccacttgacactgtccatggggttttattagtagctaagcagcagctctcgcatccacttcagggtggcgtgtggcatgtaggagtcctgcttctttgtacatgggaattgtggactcatgcgtgtgtgtgtgtgcatgtgctgtgtgtgtgcatgtgtgcatgacggtgggggtgctggggggacggggtgagtggaaacttagtttgagtaatgaaggaatcttcacagaagcaaatcagaatatgggatttgtttgccttttacattttgtttaattcctgattttaaagcctgctctatctggtacaggcccttattttttcagctttttatgggaaaagcaggttatttgagaatctgtccagaagttgcataggggatggcctccacgataaggacatgcaacacgtgtttctgtgtgcagcagaggccgtgtttttcatgccaaaccccacgcggctgtcaactgtgtgcgtggtaggcatggagatcctggttgtgccgtctcagctccgctctgaaggcactgtgtgggtgctgcgtgactggagagctgtgtggaggccatgtgtgccccgtgcagggatcaggagggcgggggagggaccgagcagccctcttgcccggtcgggtcagccctagtggctgcctgcacactgtagacgtcccagggcctgtgctgtgatcacctgcctttggaccacatttgtgtttgctcttagagatcgagctcctcagtggtacctgaagcctttgcttccggaaagcgcggtagggttcgtaggtagggctagtaggtagggttagtaggtagggctagtaggtagggctagtaggtagggttcgtaggtagggttcgtaggtagggctggtaggtagggttagtaggtagggctagtaggtagggttagtaggtagggttcgtaggtagggttcgtaggtagggttcgtaggtagggctagtaggtagggttagtaggtagggttcgtaggtagggctagtaggtagggttagtaggtagggctagtaggtagggctagtaggtagggttagtaggtagggctagtaggtagggttcgtaggtagggttagtaggtagggctagtaggtagggttcgtaggtagggttcgtaggtagggctagtaggtagggttagtaggtagggctagtaggtagggctagtaggtagggttcgtaggtagggttcgtaggtagggttcgtaggtagggttcgtaggtagggttagtaggtagggttcgtaggtagggctagtaggtagggctagtaggtagggctagtaggtagggttagtaggtagggctagtaggtagggctagtaggtagggctagtaggtagggctagtaggtagggttcgtaggtagggttcgtaggtagggttcgtaggtagggttagtagcgcgtctgtgctgcttccacctggtgcttcctgttcccaaatcacaagggcctgaaggtggtccctgctttctctttctctttctctgtgtctcagatggcgattttgctgacagctgccaagaaaatgcttcactcaacagtcctcatgtgcccagagatgtttatagaactgtttgaattgcagccatcccctgccccctcccaggctgaagatctgttctttttaagttgattcgggagtggcattcttttatacccaaagactgtagtgcatcttgaagagctcaaagcacatgaccgcacaaatgcttacagggtttcctcccgagtaatccaatctcactccccttgtaagggaattctggggcagctatggtttgagtatgcagtttgcatcgtgtttctacctttagtaccttgccactcttttaaaacgctgctgtcatttcccatttcttagtactaatgattctttgattctccctctattatgtcttaattcactttccttcctaaatttgttatttgcatatcaaattctgtaaatgttttgtaaacatattacctcacttggtaatacaatactgatagtctttaaaagatttttttattgttatcaataataaatgtgaactatttaaag

SEQ ID NO: 55924 - DNA, 5493 bp, Artificial Sequence
  derived and/or modified sequence
gtcacccgtaacaaccacaagtgccgtcgccgcgccccttccccctcccgcctccccggccccctccccggaaccggcggtcgagctacggtcgcggagcagtggaaccgagactgccccgcggagccgccgctagacttcgggctccttgaggatattcagttttgtatgtttgaatatcctctcaccatgttcagcataaagtaccattcttaatgattatcctcaacaagacaggtgtgagagggttgctgttgtattgcaatcatggtgcagaaataccagtccccagtgagggtgtacaaatacccctttgaattaattatggctgcctatgaaaggaggttccctacatgtcctttgattccgatgttcgtgggcagtgacactgtgaatgaattcaagagcgaagatggggctattcatgtcattgaaaggcgctgcaagctggatgtagatgcacccagactgctgaagaagattgcaggagttgattatgtttattttgtccagaaaaactcactgaattctcgggaacgtactttgcacattgaggcttataatgaaacgttttccaatcgggtcatcattaatgagcattgctgctacaccgttcaccctgaaaatgaagattggacctgttttgaacagtctgcaagtttagatattaaatctttctttggttttgaaagtacagtggaaaaaattgcaatgaaacaatataccagcaacattaaaaaaggaaaggaaatcatcgaatactaccttcgccaattagaagaagaaggcataacctttgtgccccgttggagtccgccttccatcacgacctcttcagagacatcttcatcatcctccaagaaacaagcagcgtccatggccgtcgtcatcccagaagctgccctcaaggaggggctgagtggtgatgccctcagcagccccagcgcacctgagcccgtggtgggcacccctgacgacaaactagatgccgactacatcaagagatacctgggcgatttgactccgctgcaggagagctgcctcattagacttcgccagtggctccaggagacccacaagggcaaaattccaaaagatgagcatattcttcggttcctccgtgcacgggattttaatattgacaaagccagagagatcatgtgtcagtctttgacgtggagaaagcagcatcaggtagactacattcttgaaacctggacccctcctcaggtccttcaggattactacgcgggaggctggcatcatcacgacaaagatgggcggcccctctacgtgctcaggctggggcagatggacaccaaaggcttggtgagagcgctcggggaggaagccctgctgagatacgttctctccataaatgaagaagggctaaggcgatgcgaagagaatacaaaagtctttggtcggcctatcagctcatggacctgcctggtggacttggaagggctgaacatgcgccacttgtggagacctggtgtgaaagcgctgctgcggatcatcgaggtggtggaggccaactaccctgagacactgggccgccttctcatcctgcgggcgcccagggtatttcctgtgctctggacgctggttagtccgttcattgatgacaacaccagaaggaagttcctcatttatgcaggaaatgactaccagggtcctggaggcctgctggattacatcgacaaagagattattccagatttcctgagtggggagtgcatgtgcgaagtgccagagggtggactggtccccaaatctctgtaccggactgcagaggagctggagaacgaagacctgaagctctggactgagaccatctaccagtctgcaagcgtcttcaaaggagccccacatgagattctcattcagattgtggatgcctcgtcagtcatcacttgggatttcgacgtgtgcaaaggggacattgtgtttaacatctatcactccaagaggtcgccacaaccacccaaaaaggactccctgggagcccacagcatcacctctccgggtgggaacaatgtgcagctcatagacaaagtctggcagctgggccgcgactacagcatggtggagtcgcctctgatctgcaaagaaggagaaagcgtgcagggttcccatgtgaccaggtggccgggcttctacatcctgcagtggaaattccacagcatgcctgcgtgcgccgccagcagccttccccgggtggacgacgtgcttgcgtccctgcaggtctcttcgcacaagtgtaaagtgatgtactacaccgaggtgatcggctcggaggatttcagaggttccatgacgagcctggagtccagccacagcggcttctcccagctgagtgccgccaccacctcctccagccagtcccactccagctccatgatctccaggtagtgccgcgctgcctgcacctagtgtgcagaggggacggccgcccctcctcggacagccagctgcacccgcccacccagcggcgacattgtacagactcctctcacctctagatagcaaatagctctcagatggtaaacgtagtcgtttgatcccaaaactaccttggcaggtagttttaactctgatcctaacttaactcaatagccatagattttgtatacgttgtgcacaaaatccaaccagagcgcaagggctctcttgaaagaaaagtagtttctgtaccaattaaaggattgacgtggtctcagatattgatgcaaaaaatttttccaacgaactccgcattgtccattagtgaatgaattcctgtgacatcctccagagatggcccctcctcacctgggacggaagctgccagctcgcttcccccaagctgcctcatggcccgcacgccgcctcacggcccccatgcttcccgccagtcaagatggtctgtggacttagggccagcccttgaggtccttatcctctgaggattcagaggttgcctgcggagtaccttgtcccagggccagacacacccacaccacccactgtcctgcagtggggccgggggctcaggaggggctctcagggactcctggtgactccaggaaaatgctgccatcgttaaacattactttctctttcctccttttcaaatctttttgatactttttagagcaggatttttctgtatgtgaacttgggtgggggggttcttcccgtttccttccgtgcgtcgcccctctcacctgcagtcagctcccagcccagtgtaggccatctcctctgtgccctctggtggctcattgtcctcagagcccagacagttccagccactaggaggccgtcttggaaccagcaagtcgcatttgccacttgacactgtccatggggttttattagtagctaagcagcagctctcgcatccacttcagggtggcgtgtggcatgtaggagtcctgcttctttgtacatgggaattgtggactcatgcgtgtgtgtgtgtgcatgtgctgtgtgtgtgcatgtgtgcatgacggtgggggtgctggggggacggggtgagtggaaacttagtttgagtaatgaaggaatcttcacagaagcaaatcagaatatgggatttgtttgccttttacattttgtttaattcctgattttaaagcctgctctatctggtacaggcccttattttttcagctttttatgggaaaagcaggttatttgagaatctgtccagaagttgcataggggatggcctccacgataaggacatgcaacacgtgtttctgtgtgcagcagaggccgtgtttttcatgccaaaccccacgcggctgtcaactgtgtgcgtggtaggcatggagatcctggttgtgccgtctcagctccgctctgaaggcactgtgtgggtgctgcgtgactggagagctgtgtggaggccatgtgtgccccgtgcagggatcaggagggcgggggagggaccgagcagccctcttgcccggtcgggtcagccctagtggctgcctgcacactgtagacgtcccagggcctgtgctgtgatcacctgcctttggaccacatttgtgtttgctcttagagatcgagctcctcagtggtacctgaagcctttgcttccggaaagcgcggtagggttcgtaggtagggctagtaggtagggttagtaggtagggctagtaggtagggctagtaggtagggttcgtaggtagggttcgtaggtagggctggtaggtagggttagtaggtagggctagtaggtagggttagtaggtagggttcgtaggtagggttcgtaggtagggttcgtaggtagggctagtaggtagggttagtaggtagggttcgtaggtagggttcgtaggtagggttaggtagggttcgtaggtagggttagtaggtagggctagtaggtagggttcgtaggtagggttcgtaggtagggctagtaggtagggttagtaggtagggctagtaggtagggctagtaggtagggttagtaggtagggctagtaggtagggttcgtaggtagggttagtaggtagggctagtaggtagggttcgtaggtagggttcgtaggtagggctagtaggtagggttagtaggtagggctagtaggtagggctagtaggtagggttcgtaggtagggttcgtaggtagggttcgtaggtagggttcgtaggtagggttagtaggtagggttcgtaggtagggctagtaggtagggctagtaggtagggctagtaggtagggttagtaggtagggctagtaggtagggctagtaggtagggctagtaggtagggctagtaggtagggttcgtaggtagggttcgtaggtagggttcgtaggtagggttagtagcgcgtctgtgctgcttccacctggtgcttcctgttcccaaatcacaagggcctgaaggtggtccctgctttctctttctctttctctgtgtctcagatggcgattttgctgacagctgccaagaaaatgcttcactcaacagtcctcatgtgcccagagatgtttatagaactgtttgaattgcagccatcccctgccccctcccaggctgaagatctgttctttttaagttgattcgggagtggcattcttttatacccaaagactgtagtgcatcttgaagagctcaaagcacatgaccgcacaaatgcttacagggtttcctcccgagtaatccaatctcactccccttgtaagggaattctggggcagctatggtttgagtatgcagtttgcatcgtgtttctacctttagtaccttgccactcttttaaaacgctgctgtcatttcccatttcttagtactaatgattctttgattctccctctattatgtcttaattcactttccttcctaaatttgttatttgcatatcaaattctgtaaatgttttgtaaacatattacctcacttggtaatacaatactgatagtctttaaaagatttttttattgttatcaataataaatgtgaactatttaaagaaaa

SEQ ID NO: 55925 - DNA, 5334 bp, Artificial Sequence
  derived and/or modified sequence
agtgcatttggtggcagagtgacaggcttggaagagaatgtggagggagtaagggaggcgcttgctaactgcccctgacgctgacagagctctggagaggtcagtgcagcttctgagttagctgctccttagcctggataccttaaatgccatctggttgggcatgccaaggcctatgaaaggaggttccctacatgtcctttgattccgatgttcgtgggcagtgacactgtgaatgaattcaagagcgaagatggggctattcatgtcattgaaaggcgctgcaagctggatgtagatgcacccagactgctgaagaagattgcaggagttgattatgtttattttgtccagaaaaactcactgaattctcgggaacgtactttgcacattgaggcttataatgaaacgttttccaatcgggtcatcattaatgagcattgctgctacaccgttcaccctgaaaatgaagattggacctgttttgaacagtctgcaagtttagatattaaatctttctttggttttgaaagtacagtggaaaaaattgcaatgaaacaatataccagcaacattaaaaaaggaaaggaaatcatcgaatactaccttcgccaattagaagaagaaggcataacctttgtgccccgttggagtccgccttccatcacgacctcttcagagacatcttcatcatcctccaagaaacaagcagcgtccatggccgtcgtcatcccagaagctgccctcaaggaggggctgagtggtgatgccctcagcagccccagcgcacctgagcccgtggtgggcacccctgacgacaaactagatgccgactacatcaagagatacctgggcgatttgactccgctgcaggagagctgcctcattagacttcgccagtggctccaggagacccacaagggcaaaattccaaaagatgagcatattcttcggttcctccgtgcacgggattttaatattgacaaagccagagagatcatgtgtcagtctttgacgtggagaaagcagcatcaggtagactacattcttgaaacctggacccctcctcaggtccttcaggattactacgcgggaggctggcatcatcacgacaaagatgggcggcccctctacgtgctcaggctggggcagatggacaccaaaggcttggtgagagcgctcggggaggaagccctgctgagatacgttctctccataaatgaagaagggctaaggcgatgcgaagagaatacaaaagtctttggtcggcctatcagctcatggacctgcctggtggacttggaagggctgaacatgcgccacttgtggagacctggtgtgaaagcgctgctgcggatcatcgaggtggtggaggccaactaccctgagacactgggccgccttctcatcctgcgggcgcccagggtatttcctgtgctctggacgctggttagtccgttcattgatgacaacaccagaaggaagttcctcatttatgcaggaaatgactaccagggtcctggaggcctgctggattacatcgacaaagagattattccagatttcctgagtggggagtgcatgtgcgaagtgccagagggtggactggtccccaaatctctgtaccggactgcagaggagctggagaacgaagacctgaagctctggactgagaccatctaccagtctgcaagcgtcttcaaaggagccccacatgagattctcattcagattgtggatgcctcgtcagtcatcacttgggatttcgacgtgtgcaaaggggacattgtgtttaacatctatcactccaagaggtcgccacaaccacccaaaaaggactccctgggagcccacagcatcacctctccgggtgggaacaatgtgcagctcatagacaaagtctggcagctgggccgcgactacagcatggtggagtcgcctctgatctgcaaagaaggagaaagcgtgcagggttcccatgtgaccaggtggccgggcttctacatcctgcagtggaaattccacagcatgcctgcgtgcgccgccagcagccttccccgggtggacgacgtgcttgcgtccctgcaggtctcttcgcacaagtgtaaagtgatgtactacaccgaggtgatcggctcggaggatttcagaggttccatgacgagcctggagtccagccacagcggcttctcccagctgagtgccgccaccacctcctccagccagtcccactccagctccatgatctccaggtagtgccgcgctgcctgcacctagtgtgcagaggggacggccgcccctcctcggacagccagctgcacccgcccacccagcggcgacattgtacagactcctctcacctctagatagcaaatagctctcagatggtaaacgtagtcgtttgatcccaaaactaccttggcaggtagttttaactctgatcctaacttaactcaatagccatagattttgtatacgttgtgcacaaaatccaaccagagcgcaagggctctcttgaaagaaaagtagtttctgtaccaattaaaggattgacgtggtctcagatattgatgcaaaaaatttttccaacgaactccgcattgtccattagtgaatgaattcctgtgacatcctccagagatggcccctcctcacctgggacggaagctgccagctcgcttcccccaagctgcctcatggcccgcacgccgcctcacggcccccatgcttcccgccagtcaagatggtctgtggacttagggccagcccttgaggtccttatcctctgaggattcagaggttgcctgcggagtaccttgtcccagggccagacacacccacaccacccactgtcctgcagtggggccgggggctcaggaggggctctcagggactcctggtgactccaggaaaatgctgccatcgttaaacattactttctctttcctccttttcaaatctttttgatactttttagagcaggatttttctgtatgtgaacttgggtgggggggttcttcccgtttccttccgtgcgtcgcccctctcacctgcagtcagctcccagcccagtgtaggccatctcctctgtgccctctggtggctcattgtcctcagagcccagacagttccagccactaggaggccgtcttggaaccagcaagtcgcatttgccacttgacactgtccatggggttttattagtagctaagcagcagctctcgcatccacttcagggtggcgtgtggcatgtaggagtcctgcttctttgtacatgggaattgtggactcatgcgtgtgtgtgtgtgcatgtgctgtgtgtgtgcatgtgtgcatgacggtgggggtgctggggggacggggtgagtggaaacttagtttgagtaatgaaggaatcttcacagaagcaaatcagaatatgggatttgtttgccttttacattttgtttaattcctgattttaaagcctgctctatctggtacaggcccttattttttcagctttttatgggaaaagcaggttatttgagaatctgtccagaagttgcataggggatggcctccacgataaggacatgcaacacgtgtttctgtgtgcagcagaggccgtgtttttcatgccaaaccccacgcggctgtcaactgtgtgcgtggtaggcatggagatcctggttgtgccgtctcagctccgctctgaaggcactgtgtgggtgctgcgtgactggagagctgtgtggaggccatgtgtgccccgtgcagggatcaggagggcgggggagggaccgagcagccctcttgcccggtcgggtcagccctagtggctgcctgcacactgtagacgtcccagggcctgtgctgtgatcacctgcctttggaccacatttgtgtttgctcttagagatcgagctcctcagtggtacctgaagcctttgcttccggaaagcgcggtagggttcgtaggtagggctagtaggtagggttagtaggtagggctagtaggtagggctagtaggtagggttcgtaggtagggttcgtaggtagggctggtaggtagggttagtaggtagggctagtaggtagggttagtaggtagggttcgtaggtagggttcgtaggtagggttcgtaggtagggctagtaggtagggttagtaggtagggttcgtaggtagggttcgtaggtagggttaggtagggttcgtaggtagggttagtaggtagggctagtaggtagggttcgtaggtagggttcgtaggtagggctagtaggtagggttagtaggtagggctagtaggtagggctagtaggtagggttagtaggtagggctagtaggtagggttcgtaggtagggttagtaggtagggctagtaggtagggttcgtaggtagggttcgtaggtagggctagtaggtagggttagtaggtagggctagtaggtagggctagtaggtagggttcgtaggtagggttcgtaggtagggttcgtaggtagggttcgtaggtagggttagtaggtagggttcgtaggtagggctagtaggtagggctagtaggtagggctagtaggtagggttagtaggtagggctagtaggtagggctagtaggtagggctagtaggtagggctagtaggtagggttcgtaggtagggttcgtaggtagggttcgtaggtagggttagtagcgcgtctgtgctgcttccacctggtgcttcctgttcccaaatcacaagggcctgaaggtggtccctgctttctctttctctttctctgtgtctcagatggcgattttgctgacagctgccaagaaaatgcttcactcaacagtcctcatgtgcccagagatgtttatagaactgtttgaattgcagccatcccctgccccctcccaggctgaagatctgttctttttaagttgattcgggagtggcattcttttatacccaaagactgtagtgcatcttgaagagctcaaagcacatgaccgcacaaatgcttacagggtttcctcccgagtaatccaatctcactccccttgtaagggaattctggggcagctatggtttgagtatgcagtttgcatcgtgtttctacctttagtaccttgccactcttttaaaacgctgctgtcatttcccatttcttagtactaatgattctttgattctccctctattatgtcttaattcactttccttcctaaatttgttatttgcatatcaaattctgtaaatgttttgtaaacatattacctcacttggtaatacaatactgatagtctttaaaagatttttttattgttatcaataataaatgtgaactatttaaagaaaa

SEQ ID NO: 55926 - DNA, 5546 bp, Artificial Sequence
  derived and/or modified sequence
gtcacccgtaacaaccacaagtgccgtcgccgcgccccttccccctcccgcctccccggccccctccccggaaccggcggtcgagctacggtcgcggagcagtggaaccgagactgccccgcggagccgccggtatgagcgcccctcgccaccccgtgtcccaggcccggcctttctgacaagagctagacttcgggctccttgaggatattcagttttgtatgtttgaatatcctctcaccatgttcagcataaagtaccattcttaatgattatcctcaacaagacaggtgtgagagggttgctgttgtattgcaatcatggtgcagaaataccagtccccagtgagggtgtacaaatacccctttgaattaattatggctgcctatgaaaggaggttccctacatgtcctttgattccgatgttcgtgggcagtgacactgtgaatgaattcaagagcgaagatggggctattcatgtcattgaaaggcgctgcaagctggatgtagatgcacccagactgctgaagaagattgcaggagttgattatgtttattttgtccagaaaaactcactgaattctcgggaacgtactttgcacattgaggcttataatgaaacgttttccaatcgggtcatcattaatgagcattgctgctacaccgttcaccctgaaaatgaagattggacctgttttgaacagtctgcaagtttagatattaaatctttctttggttttgaaagtacagtggaaaaaattgcaatgaaacaatataccagcaacattaaaaaaggaaaggaaatcatcgaatactaccttcgccaattagaagaagaaggcataacctttgtgccccgttggagtccgccttccatcacgacctcttcagagacatcttcatcatcctccaagaaacaagcagcgtccatggccgtcgtcatcccagaagctgccctcaaggaggggctgagtggtgatgccctcagcagccccagcgcacctgagcccgtggtgggcacccctgacgacaaactagatgccgactacatcaagagatacctgggcgatttgactccgctgcaggagagctgcctcattagacttcgccagtggctccaggagacccacaagggcaaaattccaaaagatgagcatattcttcggttcctccgtgcacgggattttaatattgacaaagccagagagatcatgtgtcagtctttgacgtggagaaagcagcatcaggtagactacattcttgaaacctggacccctcctcaggtccttcaggattactacgcgggaggctggcatcatcacgacaaagatgggcggcccctctacgtgctcaggctggggcagatggacaccaaaggcttggtgagagcgctcggggaggaagccctgctgagatacgttctctccataaatgaagaagggctaaggcgatgcgaagagaatacaaaagtctttggtcggcctatcagctcatggacctgcctggtggacttggaagggctgaacatgcgccacttgtggagacctggtgtgaaagcgctgctgcggatcatcgaggtggtggaggccaactaccctgagacactgggccgccttctcatcctgcgggcgcccagggtatttcctgtgctctggacgctggttagtccgttcattgatgacaacaccagaaggaagttcctcatttatgcaggaaatgactaccagggtcctggaggcctgctggattacatcgacaaagagattattccagatttcctgagtggggagtgcatgtgcgaagtgccagagggtggactggtccccaaatctctgtaccggactgcagaggagctggagaacgaagacctgaagctctggactgagaccatctaccagtctgcaagcgtcttcaaaggagccccacatgagattctcattcagattgtggatgcctcgtcagtcatcacttgggatttcgacgtgtgcaaaggggacattgtgtttaacatctatcactccaagaggtcgccacaaccacccaaaaaggactccctgggagcccacagcatcacctctccgggtgggaacaatgtgcagctcatagacaaagtctggcagctgggccgcgactacagcatggtggagtcgcctctgatctgcaaagaaggagaaagcgtgcagggttcccatgtgaccaggtggccgggcttctacatcctgcagtggaaattccacagcatgcctgcgtgcgccgccagcagccttccccgggtggacgacgtgcttgcgtccctgcaggtctcttcgcacaagtgtaaagtgatgtactacaccgaggtgatcggctcggaggatttcagaggttccatgacgagcctggagtccagccacagcggcttctcccagctgagtgccgccaccacctcctccagccagtcccactccagctccatgatctccaggtagtgccgcgctgcctgcacctagtgtgcagaggggacggccgcccctcctcggacagccagctgcacccgcccacccagcggcgacattgtacagactcctctcacctctagatagcaaatagctctcagatggtaaacgtagtcgtttgatcccaaaactaccttggcaggtagttttaactctgatcctaacttaactcaatagccatagattttgtatacgttgtgcacaaaatccaaccagagcgcaagggctctcttgaaagaaaagtagtttctgtaccaattaaaggattgacgtggtctcagatattgatgcaaaaaatttttccaacgaactccgcattgtccattagtgaatgaattcctgtgacatcctccagagatggcccctcctcacctgggacggaagctgccagctcgcttcccccaagctgcctcatggcccgcacgccgcctcacggcccccatgcttcccgccagtcaagatggtctgtggacttagggccagcccttgaggtccttatcctctgaggattcagaggttgcctgcggagtaccttgtcccagggccagacacacccacaccacccactgtcctgcagtggggccgggggctcaggaggggctctcagggactcctggtgactccaggaaaatgctgccatcgttaaacattactttctctttcctccttttcaaatctttttgatactttttagagcaggatttttctgtatgtgaacttgggtgggggggttcttcccgtttccttccgtgcgtcgcccctctcacctgcagtcagctcccagcccagtgtaggccatctcctctgtgccctctggtggctcattgtcctcagagcccagacagttccagccactaggaggccgtcttggaaccagcaagtcgcatttgccacttgacactgtccatggggttttattagtagctaagcagcagctctcgcatccacttcagggtggcgtgtggcatgtaggagtcctgcttctttgtacatgggaattgtggactcatgcgtgtgtgtgtgtgcatgtgctgtgtgtgtgcatgtgtgcatgacggtgggggtgctggggggacggggtgagtggaaacttagtttgagtaatgaaggaatcttcacagaagcaaatcagaatatgggatttgtttgccttttacattttgtttaattcctgattttaaagcctgctctatctggtacaggcccttattttttcagctttttatgggaaaagcaggttatttgagaatctgtccagaagttgcataggggatggcctccacgataaggacatgcaacacgtgtttctgtgtgcagcagaggccgtgtttttcatgccaaaccccacgcggctgtcaactgtgtgcgtggtaggcatggagatcctggttgtgccgtctcagctccgctctgaaggcactgtgtgggtgctgcgtgactggagagctgtgtggaggccatgtgtgccccgtgcagggatcaggagggcgggggagggaccgagcagccctcttgcccggtcgggtcagccctagtggctgcctgcacactgtagacgtcccagggcctgtgctgtgatcacctgcctttggaccacatttgtgtttgctcttagagatcgagctcctcagtggtacctgaagcctttgcttccggaaagcgcggtagggttcgtaggtagggctagtaggtagggttagtaggtagggctagtaggtagggctagtaggtagggttcgtaggtagggttcgtaggtagggctggtaggtagggttagtaggtagggctagtaggtagggttagtaggtagggttcgtaggtagggttcgtaggtagggttcgtaggtagggctagtaggtagggttagtaggtagggttcgtaggtagggttcgtaggtagggttaggtagggttcgtaggtagggttagtaggtagggctagtaggtagggttcgtaggtagggttcgtaggtagggctagtaggtagggttagtaggtagggctagtaggtagggctagtaggtagggttagtaggtagggctagtaggtagggttcgtaggtagggttagtaggtagggctagtaggtagggttcgtaggtagggttcgtaggtagggctagtaggtagggttagtaggtagggctagtaggtagggctagtaggtagggttcgtaggtagggttcgtaggtagggttcgtaggtagggttcgtaggtagggttagtaggtagggttcgtaggtagggctagtaggtagggctagtaggtagggctagtaggtagggttagtaggtagggctagtaggtagggctagtaggtagggctagtaggtagggctagtaggtagggttcgtaggtagggttcgtaggtagggttcgtaggtagggttagtagcgcgtctgtgctgcttccacctggtgcttcctgttcccaaatcacaagggcctgaaggtggtccctgctttctctttctctttctctgtgtctcagatggcgattttgctgacagctgccaagaaaatgcttcactcaacagtcctcatgtgcccagagatgtttatagaactgtttgaattgcagccatcccctgccccctcccaggctgaagatctgttctttttaagttgattcgggagtggcattcttttatacccaaagactgtagtgcatcttgaagagctcaaagcacatgaccgcacaaatgcttacagggtttcctcccgagtaatccaatctcactccccttgtaagggaattctggggcagctatggtttgagtatgcagtttgcatcgtgtttctacctttagtaccttgccactcttttaaaacgctgctgtcatttcccatttcttagtactaatgattctttgattctccctctattatgtcttaattcactttccttcctaaatttgttatttgcatatcaaattctgtaaatgttttgtaaacatattacctcacttggtaatacaatactgatagtctttaaaagatttttttattgttatcaataataaatgtgaactatttaaagaaaa

SEQ ID NO: 55927 - protein, 681 aa, Artificial Sequence
  derived and/or modified sequence
MFVGSDTVNEFKSEDGAIHVIERRCKLDVDAPRLLKKIAGVDYVYFVQKNSLNSRERTLHIEAYNETFSNRVIINEHCCYTVHPENEDWTCFEQSASLDIKSFFGFESTVEKIAMKQYTSNIKKGKEIIEYYLRQLEEEGITFVPRWSPPSITTSSETSSSSSKKQAASMAVVIPEAALKEGLSGDALSSPSAPEPVVGTPDDKLDADYIKRYLGDLTPLQESCLIRLRQWLQETHKGKIPKDEHILRFLRARDFNIDKAREIMCQSLTWRKQHQVDYILETWTPPQVLQDYYAGGWHHHDKDGRPLYVLRLGQMDTKGLVRALGEEALLRYVLSINEEGLRRCEENTKVFGRPISSWTCLVDLEGLNMRHLWRPGVKALLRIIEVVEANYPETLGRLLILRAPRVFPVLWTLVSPFIDDNTRRKFLIYAGNDYQGPGGLLDYIDKEIIPDFLSGECMCEVPEGGLVPKSLYRTAEELENEDLKLWTETIYQSASVFKGAPHEILIQIVDASSVITWDFDVCKGDIVFNIYHSKRSPQPPKKDSLGAHSITSPGGNNVQLIDKVWQLGRDYSMVESPLICKEGESVQGSHVTRWPGFYILQWKFHSMPACAASSLPRVDDVLASLQVSSHKCKVMYYTEVIGSEDFRGSMTSLESSHSGFSQLSAATTSSSQSHSSSMISR

SEQ ID NO: 55928 - protein, 258 aa, Artificial Sequence
  derived and/or modified sequence
MAVLAPLIALVYSVPRLSRWLAQPYYLLSALLSAAFLLVRKLPPLCHGLPTQREDGNPCDFDWREVEILMFLSAIVMMKNRRSMFLMTCKPPLYMGPEYIKYFNDKTIDEELERDKRVTWIVEFFANWSNDCQSFAPIYADLSLKYNCTGLNFGKVDVGRYTDVSTRYKVSTSPLTKQLPTLILFQGGKEAMRRPQIDKKGRAVSWTFSEENVIREFNLNELYQRAKKLSKAGDNIPEEQPVASTPTTVSDGENKKDK

SEQ ID NO: 55929 - DNA, 777 bp, Artificial Sequence
  derived and/or modified sequence
atggccgtgctggcccccctgatcgccctggtgtacagcgtgcccagactgagcagatggctggcccagccctactacctgctgagcgccctgctgagcgccgccttcctgctggtgagaaagctgccccccctgtgccacggcctgcccacccagagagaggacggcaacccctgcgacttcgactggagagaggtggagatcctgatgttcctgagcgccatcgtgatgatgaagaacagaagaagcatgttcctgatgacctgcaagccccccctgtacatgggccccgagtacatcaagtacttcaacgacaagaccatcgacgaggagctggagagagacaagagagtgacctggatcgtggagttcttcgccaactggagcaacgactgccagagcttcgcccccatctacgccgacctgagcctgaagtacaactgcaccggcctgaacttcggcaaggtggacgtgggcagatacaccgacgtgagcaccagatacaaggtgagcaccagccccctgaccaagcagctgcccaccctgatcctgttccagggcggcaaggaggccatgagaagaccccagatcgacaagaagggcagagccgtgagctggaccttcagcgaggagaacgtgatcagagagttcaacctgaacgagctgtaccagagagccaagaagctgagcaaggccggcgacaacatccccgaggagcagcccgtggccagcacccccaccaccgtgagcgacggcgagaacaagaaggacaagtag

SEQ ID NO: 55930 - DNA, 777 bp, Artificial Sequence
  derived and/or modified sequence
atggcagtcctggcacccctcatcgcccttgtgtacagtgttcctcggctgtctcggtggctggcccagccttactatctgctgagcgctctgctgtccgcggcattcctgctcgtgaggaaacttcctccactgtgccacgggctgccgacacagagggaggatggcaatccttgcgactttgactggcgcgaggtcgaaattttgatgtttctatcggcaatcgttatgatgaagaataggcgctcaatgttcttgatgacttgcaaacctcccctgtatatggggcctgagtatatcaaatattttaacgataaaaccatcgacgaggaattagagagggacaagagggtcacttggattgtcgagttctttgctaattggtccaacgactgtcagagtttcgcacccatttacgcagacctgtcactcaagtacaattgtaccggactgaactttggcaaggttgacgtgggaagatacacagatgtcagcactagatacaaggtaagcacctctccccttacaaagcaactgcctacccttatactgttccaggggggaaaggaggctatgcggcgccctcagatagataaaaaaggccgcgcggtgagctggacttttagcgaggagaacgtgattcgtgagtttaacctcaacgaactttaccagagggccaagaagctgtctaaggcgggtgataatattccagaagaacagccagtcgcaagcacccccaccactgtctccgacggcgaaaacaaaaaagacaaatag

SEQ ID NO: 55931 - DNA, 777 bp, Artificial Sequence
  derived and/or modified sequence
atggctgtgctggcccccctcatcgccctggtgtacagcgtgccccggctgagccgctggctggcccagccctactacctgctgagcgccctgctgtctgctgccttcctgctggtgaggaagctgccccccctgtgccacggcctgcccacccagcgggaggatggcaacccctgtgactttgactggagggaggtggagatcctgatgttcctgagcgccatcgtgatgatgaagaacagaagatccatgttcctgatgacctgcaagccacccctgtacatgggccctgagtacatcaagtacttcaatgacaagaccattgatgaggagctggagcgggacaagagggtgacctggatcgtggagttctttgccaactggagcaatgactgccagagctttgcccccatctatgctgacctgagcctgaagtacaactgcaccggcctgaactttgggaaggtggatgtgggccgctacacagatgtgtccacccgctacaaggtgtccaccagccccctgaccaagcagctgcccaccctcatcctcttccagggcggcaaggaggccatgagaagaccccagattgacaagaagggccgggctgtgtcctggaccttctctgaagaaaatgtcatccgggagttcaacctgaatgagctgtaccagagggccaagaagctgagcaaggccggggacaacatccctgaggagcagcctgtggccagcacccccaccaccgtgtctgatggagagaacaagaaggacaagtag

SEQ ID NO: 55932 - DNA, 777 bp, Artificial Sequence
  derived and/or modified sequence
atggccgtgctggcccccctgatcgccctggtgtacagcgtgcccaggcttagccggtggctagcacagccctactatctattgtccgcgttactgagtgcggcatttcttttggtgagaaagttacctcctctgtgtcacggtctgccgacccaacgggaggatggaaacccctgcgatttcgactggcgggaggttgagatccttatgtttctgtcagcaattgtgatgatgaagaatagacggagcatgtttctgatgacctgcaagcctcctctctacatgggccctgaatatatcaaatacttcaatgacaagacaattgatgaggagttagagcgagacaagcgcgtcacgtggatagtggaattttttgccaactggtccaatgattgtcaaagctttgccccgatctatgccgatctctctctaaagtacaactgtactggcctcaacttcgggaaggtagatgttggacggtatacagatgtgagcacacgatataaggtgtccacgtcccctctgactaaacagctgccgacattaattttatttcagggagggaaagaagccatgagaaggccacagatcgacaagaagggaagggcagtttcctggaccttctccgaagaaaacgtcattagggaatttaacctaaatgaactatatcagcgcgcgaagaagttaagtaaggccggagacaacattcccgaagaacagcccgttgctagtacccccactaccgtgtcagatggcgaaaataaaaaggataaatag

SEQ ID NO: 55933 - DNA, 777 bp, Artificial Sequence
  derived and/or modified sequence
atggctgtgctagcaccccttatcgctctcgtgtacagcgtcccaagactgagccgctggctggcccaaccatattatctgctcagcgccctactgtccgccgctttcctgctcgtccggaaactacctccgctgtgtcacgggttacctacccagcgcgaagatggcaatccttgtgattttgattggcgagaagtcgagatactcatgttcctaagcgccatcgttatgatgaaaaacagacgcagcatgttcctgatgacttgtaaaccaccgctctatatggggccagagtatatcaagtatttcaacgacaaaaccatcgatgaagagctggagagagataaacgtgtaacttggatcgttgaatttttcgcaaactggtcaaacgattgtcagtcatttgctccaatctacgctgacctctcacttaagtataattgcactgggctgaatttcggaaaggtcgacgtgggcaggtacactgacgtgtcaacacggtacaaggtttcgacaagccctttgacaaagcagctgccaacactgatcctttttcaggggggaaaggaggccatgcgaaggcctcagatcgacaaaaaagggagggctgtgtcatggaccttctcggaggaaaacgtcattagggagtttaacctaaacgaactttatcagcgagcaaagaaactgagcaaggccggagataacataccagaggaacagccggtggccagcactcccaccacggtcagcgatggagagaacaaaaaggacaagtag

SEQ ID NO: 55934 - DNA, 1521 bp, Artificial Sequence
  derived and/or modified sequence
cgttacggccgaaaagatggcggtcttggcacctctaattgctctcgtgtattcggtgccgcgactttcacgatggctcgcccaaccttactaccttctgtcggccctgctctctgctgccttcctactcgtgaggaaactgccgccgctctgccacggtctgcccacccaacgcgaagacggtaacccgtgtgactttgactggagagaagtggagatcctgatgtttctcagtgccattgtgatgatgaagaaccgcagatccatgttcctgatgacgtgcaaaccccccctatatatgggccctgagtatatcaagtacttcaatgataaaaccattgatgaggaactagaacgggacaagagggtcacttggattgtggagttctttgccaattggtctaatgactgccaatcatttgcccctatctatgctgacctctcccttaaatacaactgtacagggctaaattttgggaaggtggatgttggacgctatactgatgttagtacgcggtacaaagtgagcacatcacccctcaccaagcaactccctaccctgatcctgttccaaggtggcaaggaggcaatgcggcggccacagattgacaagaaaggacgggctgtctcatggaccttctctgaggagaatgtgatccgagaatttaacttaaatgagctataccagcgggccaagaaactatcaaaggctggagacaatatccctgaggagcagcctgtggcttcaacccccaccacagtgtcagatggggaaaacaagaaggataaataagatcctcactttggcagtgcttcctctcctgtcaattccaggctctttccataaccacaagcctgaggctgcagccttttatttatgttttccctttggctgtgactgggtggggcagcatgcagcttctgattttaaagaggcatctagggaattgtcaggcaccctacaggaaggcctgccatgctgtggccaactgtttcactggagcaagaaagagatctcataggacggagggggaaatggtttccctccaagcttgggtcagtgtgttaactgcttatcagctattcagacatctccatggtttctccatgaaactctgtggtttcatcattccttcttagttgacctgcacagcttggttagacctagatttaaccctaaggtaagatgctggggtatagaacgctaagaattttcccccaaggactcttgcttccttaagcccttctggcttcgtttatggtcttcattaaaagtataagcctaactttgtcgctagtcctaaggagaaacctttaaccacaaagtttttatcattgaagacaatattgaacaaccccctattttgtggggattgagaaggggtgaatagaggcttgagactttcctttgtgtggtaggacttggaggagaaatcccctggactttcactaaccctctgacatactccccacacccagttgatggctttccgtaataaaaagattgggatttccttttga

SEQ ID NO: 55935 - protein, 282 aa, Artificial Sequence
  derived and/or modified sequence
MNSRGELVGVNNKRLGVCGWILFSLSFLLVIITFPISIWMCLKIIKEYERAVVFRLGRIQADKAKGPGLILVLPCIDVFVKVDLRTVTCNIPPQEILTRDSVTTQVDGVVYYRIYSAVSAVANVNDVHQATFLLAQTTLRNVLGTQTLSQILAGREEIAHSIQTLLDDATELWGIRVARVEIKDVRIPVQLQRSMAAEAEATREARAKVLAAEGEMNASKSLKSASMVLAESPIALQLRYLQTLSTVATEKNSTIVFPLPMNILEGIGGVSYDNHKKLPNKA

SEQ ID NO: 55936 - DNA, 849 bp, Artificial Sequence
  derived and/or modified sequence
atgaacagcagaggcgagctggtgggcgtgaacaacaagagactgggcgtgtgcggctggatcctgttcagcctgagcttcctgctggtgatcatcaccttccccatcagcatctggatgtgcctgaagatcatcaaggagtacgagagagccgtggtgttcagactgggcagaatccaggccgacaaggccaagggccccggcctgatcctggtgctgccctgcatcgacgtgttcgtgaaggtggacctgagaaccgtgacctgcaacatccccccccaggagatcctgaccagagacagcgtgaccacccaggtggacggcgtggtgtactacagaatctacagcgccgtgagcgccgtggccaacgtgaacgacgtgcaccaggccaccttcctgctggcccagaccaccctgagaaacgtgctgggcacccagaccctgagccagatcctggccggcagagaggagatcgcccacagcatccagaccctgctggacgacgccaccgagctgtggggcatcagagtggccagagtggagatcaaggacgtgagaatccccgtgcagctgcagagaagcatggccgccgaggccgaggccaccagagaggccagagccaaggtgctggccgccgagggcgagatgaacgccagcaagagcctgaagagcgccagcatggtgctggccgagagccccatcgccctgcagctgagatacctgcagaccctgagcaccgtggccaccgagaagaacagcaccatcgtgttccccctgcccatgaacatcctggagggcatcggcggcgtgagctacgacaaccacaagaagctgcccaacaaggcctag

SEQ ID NO: 55937 - DNA, 849 bp, Artificial Sequence
  derived and/or modified sequence
atgaactcccgaggtgagttggtgggagtgaacaataaacggctcggagtgtgtggatggatcctgttctcgttgtctttcctgctggtaattataacctttcctattagtatttggatgtgtctgaaaatcatcaaggaatacgagagagccgtagtgttcagactgggccgcattcaagccgataaagctaagggacctggtctgatccttgtccttccatgtatcgatgtctttgtaaaagtagacctgcgcaccgtaacttgtaacatcccgcctcaggaaatcctcaccagggattccgtgaccacccaggtcgacggggtggtttattatcggatttactccgccgtttccgctgtggcaaatgttaatgacgtccaccaggctacattcctcctggcccagacgacgcttcggaacgtcttgggaacacagacactctcccagatcctggcaggtcgagaggagatcgcacactcgattcagacccttctggatgacgccactgagctctggggcatccgagtggcgagagtggagatcaaagacgttagaatcccggtacagcttcagcgatcaatggccgcagaggccgaagcgacaagggaggcacgagcgaaggtcctggcggccgaaggcgagatgaatgctagcaagtctctgaagtcagccagtatggtgctggcagaatcgccaatcgcacttcagctgcggtacctgcagactctgtctacagtcgccaccgaaaagaatagcacaatcgtgtttccgcttcccatgaatattctcgaggggattggcggagtttcctacgataaccacaagaaactgcctaacaaggcctag

SEQ ID NO: 55938 - DNA, 849 bp, Artificial Sequence
  derived and/or modified sequence
atgaacagcagaggagagctggtgggcgtgaacaacaagaggctgggcgtgtgtggctggatcctcttcagcctgtccttcctgctggtgatcatcaccttccccatcagcatctggatgtgcctgaagatcatcaaggagtatgaaagagctgtggtgttccggctgggccgcatccaggccgacaaggccaagggccctggcctcatcctggtgctgccctgcattgatgtgtttgtgaaggtggacctgaggacagtgacctgcaacatccccccccaggagatcctgacccgggacagcgtgaccacccaggtggatggagtggtgtactaccgcatctacagcgctgtgtctgctgtggccaacgtgaatgatgtgcaccaggccaccttcctgctggcccagaccaccctgagaaatgtgctgggcacccagaccctgagccagatcctggccggccgggaggagatcgcccacagcatccagaccctgctggatgatgccacagagctgtggggcatccgggtggcccgggtggagatcaaggatgtgcgcatccctgtgcagctgcagaggtccatggctgctgaggccgaggccacccgggaggcccgggccaaggtgctggccgctgagggggagatgaatgccagcaagagcctgaagagcgcctccatggtgctggccgagagccccatcgccctgcagctgcgctacctgcagaccctgagcacagtggccacagagaagaacagcaccatcgtgttccccctgcccatgaacatcctggagggcattggaggagtgtcctatgacaaccacaagaagctgcccaacaaggcctag

SEQ ID NO: 55939 - DNA, 849 bp, Artificial Sequence
  derived and/or modified sequence
atgaacagccggggcgagctggtgggcgtgaacaacaagcggctgggagtgtgcgggtggatcctcttttctttgtcattcttactcgtcattatcaccttccccatcagtatttggatgtgcttaaagataatcaaggagtacgaacgcgccgtagtttttcgtctgggacgaattcaggccgataaagccaagggccccggacttatcctcgtgcttccctgtatcgatgtgtttgttaaagtggatctcagaacagtgacctgtaatatcccccctcaggagattctgacacgggatagcgtgacgacacaggtcgatggtgttgtgtattacagaatctatagcgctgtgagcgcagtggcaaatgttaacgacgtacatcaggccacctttcttctggctcagacaacgttgagaaacgtcctgggaacccagacactgtctcagatcctggccggaagagaagaaatcgcacatagcatacagactctgctggatgacgccacggaactttggggaatcagagtggcacgggtggagattaaggacgttcgaatccccgtccagcttcagaggtccatggcagccgaggcagaggccacacgggaagctagagctaaggtgcttgcagcggaaggagagatgaatgcgtctaaaagcttgaagagcgcttccatggtgctggctgagtctccgattgctttacagttacgttatctgcagacgctatccacagtggcaaccgaaaaaaacagtacgatagtgttccccctgccaatgaacatcctcgagggcattggaggggtgagctacgacaatcacaagaagctgcctaataaggcctag

SEQ ID NO: 55940 - DNA, 849 bp, Artificial Sequence
  derived and/or modified sequence
atgaacagccggggtgagctggtcggggtaaataacaaacgactcggggtgtgtgggtggattctgttctccctcagtttcctgcttgttatcattacatttcccattagcatatggatgtgtctgaaaattatcaaggaatacgaaagagccgtggttttccgcttgggaagaatacaggcggacaaggcaaagggccctggtctgatactggtgctcccctgcatcgatgtgtttgttaaggtggatctgcggactgtaacttgcaatattccccctcaggaaatccttacccgcgattctgtgacgacccaggtagacggagtagtgtactaccggatatattcagcagtgagtgccgtcgctaacgtgaatgacgttcaccaggctactttcttgctcgcacaaacaactctccggaatgttctgggaacacagactttgtcccaaatccttgctggcagagaagaaatcgcccacagtatccagacactcctcgacgacgccacagagttgtggggaatccgggtcgcccgtgtggagataaaggacgtacgcattccagtgcagctgcagcgttcgatggccgctgaggcagaggctacaagggaggctcgcgcaaaggttcttgccgcagagggcgaaatgaacgcttcgaaatccctgaagtccgcttccatggttctggccgaaagtccaatagcactgcaactgcgctaccttcagaccctttccacagtggcaacagagaagaactctaccattgtgtttcctttgcctatgaacattcttgaaggaattggaggagtcagctatgataatcacaagaagttaccaaataaggcctag

SEQ ID NO: 55941 - protein, 322 aa, Artificial Sequence
  derived and/or modified sequence
MALPPGPAALRHTLLLLPALLSSGWGELEPQIDGQTWAERALRENERHAFTCRVAGGPGTPRLAWYLDGQLQEASTSRLLSVGGEAFSGGTSTFTVTAHRAQHELNCSLQDPRSGRSANASVILNVQFKPEIAQVGAKYQEAQGPGLLVVLFALVRANPPANVTWIDQDGPVTVNTSDFLVLDAQNYPWLTNHTVQLQLRSLAHNLSVVATNDVGVTSASLPAPGPSRHPSLISSDSNNLKLNNVRLPRENMSLPSNLQLNDLTPDSRAVKPADRQMAQNNSRPELLDPEPGGLLTSQGFIRLPVLGYIYRVSSVSSDEIWL

SEQ ID NO: 55942 - protein, 269 aa, Artificial Sequence
  derived and/or modified sequence
MALPPGPAALRHTLLLLPALLSSGWGELEPQIDGQTWAERALRENERHAFTCRVAGGPGTPRLAWYLDGQLQEASTSRLLSVGGEAFSGGTSTFTVTAHRAQHELNCSLQDPRSGRSANASVILNVQWLLATRVEVPLLGIVVAAGLALGTLVGFSTLVACLVCRKEKKTKGPSRHPSLISSDSNNLKLNNVRLPRENMSLPSNLQLNDLTPDSRAVKPADRQMAQNNSRPELLDPEPGGLLTSQGFIRLPVLGYIYRVSSVSSDEIWL

SEQ ID NO: 55943 - DNA, 969 bp, Artificial Sequence
  derived and/or modified sequence
atggccctgccccccggccccgccgccctgagacacaccctgctgctgctgcccgccctgctgagcagcggctggggcgagctggagccccagatcgacggccagacctgggccgagagagccctgagagagaacgagagacacgccttcacctgcagagtggccggcggccccggcacccccagactggcctggtacctggacggccagctgcaggaggccagcaccagcagactgctgagcgtgggcggcgaggccttcagcggcggcaccagcaccttcaccgtgaccgcccacagagcccagcacgagctgaactgcagcctgcaggaccccagaagcggcagaagcgccaacgccagcgtgatcctgaacgtgcagttcaagcccgagatcgcccaggtgggcgccaagtaccaggaggcccagggccccggcctgctggtggtgctgttcgccctggtgagagccaacccccccgccaacgtgacctggatcgaccaggacggccccgtgaccgtgaacaccagcgacttcctggtgctggacgcccagaactacccctggctgaccaaccacaccgtgcagctgcagctgagaagcctggcccacaacctgagcgtggtggccaccaacgacgtgggcgtgaccagcgccagcctgcccgcccccggccccagcagacaccccagcctgatcagcagcgacagcaacaacctgaagctgaacaacgtgagactgcccagagagaacatgagcctgcccagcaacctgcagctgaacgacctgacccccgacagcagagccgtgaagcccgccgacagacagatggcccagaacaacagcagacccgagctgctggaccccgagcccggcggcctgctgaccagccagggcttcatcagactgcccgtgctgggctacatctacagagtgagcagcgtgagcagcgacgagatctggctgtag

SEQ ID NO: 55944 - DNA, 969 bp, Artificial Sequence
  derived and/or modified sequence
atggccttacctccgggccctgccgccttacgccatactctgctcctcctaccagcgctgctatccagtggctggggggaactggagccacaaatagatggccaaacatgggcagagcgtgctctgagagagaatgagagacacgccttcacctgtcgggtcgccggtggccccggtactcccaggttagcttggtatctggatggccaactgcaggaagcaagtacttcacgcttactcagcgtggggggagaggccttctctggtggtacttcaacctttaccgtcactgcacacagggcgcagcatgagttgaattgttcactgcaggacccccggtcagggaggagcgctaacgcctctgtgatcctgaacgtccaatttaagccggaaatcgctcaagtgggcgccaaataccaggaggcccagggccctggtctcctagtagtactgttcgcgctcgtgagagccaacccacccgccaatgtcacctggatcgatcaggatggacccgtcacggtgaacacaagtgattttctggtgctcgacgctcagaactatccctggctcaccaatcatacagttcaattgcagcttaggagtctagcgcacaacttgtctgtcgtggcaaccaatgacgttggggtgacttcggctagcttacctgcacctggaccaagcaggcacccaagtctgatcagctctgactctaataacttaaaacttaacaatgttaggttacccagagagaacatgtccttaccttccaatttgcaattaaatgatctaacccctgactccagagcagtcaagcctgccgaccggcagatggcacagaataacagccgccctgagctgttagatcccgagccaggcggcctactcacctcacaaggatttattcgccttcccgttcttggatatatttaccgggtgtcgtcagtgtcgagcgacgagatttggttgtag

SEQ ID NO: 55945 - DNA, 969 bp, Artificial Sequence
  derived and/or modified sequence
atggccctaccaccgggaccagccgctctgcgccatacactgctgcttttgccggctctcttgtcctcaggctggggcgaactggaaccccagatcgatgggcagacctgggccgaacgggccttacgcgagaacgaaagacacgccttcacatgcagagtggccggtggcccaggaacgcctaggttggcatggtaccttgacggccagttgcaggaggcttccacgagccgcctgcttagtgtgggtggggaggccttttcgggggggacctccacttttacagtgaccgcacaccgagcccagcacgagctgaattgtagtctgcaggatcctcgatcggggcgatccgccaacgcctccgttattctgaacgtgcagttcaaacctgagatcgcacaagtgggcgcaaagtatcaggaagcccagggtcccggtctgctggtggtgctgtttgcattagttcgggctaatccaccagcaaacgtgacctggatcgaccaggatgggcccgtcacggtcaatacaagcgacttccttgtcctcgatgcccagaactacccttggttgacaaaccacacagttcaattacagcttagatcccttgcacataacctctccgtggtggccacaaacgacgtgggggtgaccagcgcttctttgccggcacccggcccatcacgtcatccaagcctgatcagtagcgactccaataacctcaaactcaacaacgtgagactgccacgcgaaaatatgtctctgcccagcaacctgcagctaaatgatttgacaccggattctagagctgttaaaccagcggaccggcaaatggctcaaaacaactctcgtcctgagttgctggatcctgagcccgggggcttgctgacttcacagggatttatccggcttcctgtgttagggtatatctacagggtctcttccgtgtcttctgatgagatatggctgtag

SEQ ID NO: 55946 - DNA, 969 bp, Artificial Sequence
  derived and/or modified sequence
atggccctgcccccaggccctgctgccctgcggcacaccctgctgctgctgcctgccctgctgagcagcggctggggcgagctggagccccagattgatggccagacctgggccgagcgggccctgcgggagaatgaaagacatgccttcacctgccgggtggccggcggccctggcaccccccggctggcctggtacctggatggccagctgcaggaggccagcaccagccggctgctgtctgtgggcggggaggccttcagcggcggcaccagcaccttcaccgtgacagcccaccgggcccagcacgagctgaactgcagcctgcaggaccccaggagcggccgcagcgccaatgccagcgtcatcctgaatgtgcagttcaagccagagatcgcccaggtgggcgccaagtaccaggaggcccagggccctggcctgctggtggtgctgtttgccctggtgcgggccaaccccccagccaacgtgacctggattgaccaggacggccctgtgacagtgaacaccagtgacttcctggtgctggatgcccagaactacccctggctgaccaaccacacagtgcagctgcagctgcggagcctggcccacaacctgtctgtggtggccaccaatgatgtgggcgtgaccagcgccagcctgcctgcccctggccccagccgccaccccagcctcatcagcagtgacagcaacaacctgaagctgaacaacgtgcggctgccccgggagaacatgagcctgcccagcaacctgcagctgaatgacctgaccccagacagcagagctgtgaagccagctgaccggcagatggcccagaacaacagcaggcctgagctgctggaccctgagcccggcggcctgctgaccagccagggcttcatccggctgcctgtgctgggctacatctacagagtgtcctctgtgtccagtgatgagatctggctgtag

SEQ ID NO: 55947 - DNA, 969 bp, Artificial Sequence
  derived and/or modified sequence
atggccctgccccccggccccgccgccctgcggcacaccctgctgctgctgccagccctgctgagctcaggctggggcgagcttgagccccagattgatggccagacctgggctgagagagccctccgagagaatgagcggcatgcattcacttgtagggtggccggcgggccaggaaccccccggctggcatggtaccttgatggccagctccaggaagccagcacttctcggctgttgagtgtgggtggagaggcctttagcgggggcaccagtacgtttacggttactgcacatagagctcagcatgagctgaattgctcattgcaggaccccaggtctggccggtccgccaatgcatccgtgatcctgaacgtccagttcaagcccgagatcgcgcaggtaggggctaagtatcaggaagcccaaggtccaggcctcctcgtcgtgttgtttgctttggtccgcgctaatccgccagccaatgtcacttggattgaccaagatgggccggtcacggtgaatacttcagactttctggttctcgacgcccagaactatccgtggcttacgaatcataccgtacagctgcaactgaggagcctagcacataatttaagtgttgtggcgaccaacgacgtcggtgtcacatccgcaagcctgccagcgccaggcccgtctcggcacccgtcccttatttccagtgacagcaacaatctgaagctaaataacgtgagactcccccgcgagaatatgtctctaccatctaatctgcaattgaatgatctcacccctgactctcgggctgtgaaaccagccgaccggcaaatggcacaaaacaacagccggccggaattgctagatcccgaacccggaggactgctgactagtcaggggttcatcaggcttcctgtcctgggctacatttaccgcgtgagctcagtctcctctgatgagatctggctctag

SEQ ID NO: 55948 - DNA, 969 bp, Artificial Sequence
  derived and/or modified sequence
atggccctgccccccggccccgccgccctgcggcacaccctgctgctgttaccggcgctactgtcttcaggctggggtgagttggagcctcaaatcgacggacagacttgggccgagagagccctgagggagaatgagcggcacgctttcacctgccgggtagcaggcggccctggcactcccagacttgcatggtacttggatggccagttgcaggaagcctctactagtcgcctgcttagcgtcggcggggaagcgttttccggaggcacaagcacgtttaccgtgaccgcccatagagctcagcatgaactgaactgctccttgcaagatcccaggagtggccgctccgctaacgcttctgtgattctcaacgtgcagttcaaacctgagatagctcaggtgggtgctaagtaccaggaggctcaggggcccggactgctggtcgttctcttcgcactggttcgggctaacccacctgccaacgtaacgtggattgaccaggacggcccagtaaccgtcaacaccagcgactttctagtgttggatgcccagaattacccatggctgacaaatcataccgtacagttacagttaaggtccctcgcccataatctgagcgtggtcgccactaatgacgttggggtgacgtcagcttctctccccgccccagggccttctaggcacccctcattaatatcatccgactccaataacctaaagctgaacaacgtcagattgccgagggaaaatatgtcattgccttctaatctgcagctgaacgatctcacaccagattcacgggcggtaaaaccggcagatcgacagatggcgcagaataactccaggcctgagctactggaccccgagccaggcggactcctaactagtcagggctttataagactccccgtcttgggatacatctaccgcgtctcgtcagtatccagcgatgagatctggctttag

SEQ ID NO: 55949 - DNA, 969 bp, Artificial Sequence
  derived and/or modified sequence
atggcactacccccaggacccgctgcattgagacataccctgctgctgctgccagcattgctttcttctggttggggcgaactggagccccagattgatggacaaacatgggcggagcgggctctgagggaaaacgaacgacatgcgtttacctgcagggtagccggtgggccaggaacccccagactggcctggtatctagacggccagttgcaagaagcttccacgtcccgccttttgagtgtcggcggagaggcgttctccgggggaacctccacctttacagtgacagcacaccgagcccagcacgaattaaactgctctctgcaggatcccagatcgggccgatctgctaacgcctctgttattctcaatgtgcaatttaaacctgaaattgcacaggtcggggctaaataccaggaggcccaaggaccgggtctgctggtggtattgttcgcactcgtgcgggcaaaccccccagctaatgtgacttggattgaccaggacgggcctgtaaccgtgaatacaagcgattttctggtgctggacgctcagaactacccctggctaacgaaccatacagtgcaattacagcttcgttcccttgcccataatctgtcagtggtcgcaacaaacgacgtcggcgttacctccgcatccctcccagcccctggaccaagtaggcatccaagcctgatttcatctgattcaaacaacttgaaactcaacaatgtgcgattgcctagagagaatatgtcactgcctagtaacctacaactgaatgatctgaccccggattctagggccgttaaaccggctgaccgccaaatggcccagaataacagtcgcccagaactgctggacccagagcctgggggattactgacgagccaaggattcatcaggttaccagtcctgggttacatataccgggtcagcagcgtctcaagcgacgaaatctggctgtag

SEQ ID NO: 55950 - DNA, 969 bp, Artificial Sequence
  derived and/or modified sequence
atggcattgcctcccggtcccgctgcccttaggcacacgttactcctgttgccagccctgctgtctagtggttggggtgagctcgagccacagatagatggtcaaacctgggctgagcgcgcactcagggaaaatgaaaggcacgcatttacctgccgagtcgctggaggacctggaacccccagacttgcatggtacctggacggacagctccaggaggccagtacgtccagattgttgtccgttgggggtgaggcgttttctggtggaacttcaacctttactgttactgcccacagggcacagcacgagcttaactgttctctgcaggatccacggagcgggcgaagtgccaatgcctcagtgattcttaacgtgcagttcaaacccgaaatcgctcaggtgggggctaaataccaggaggcacaggggccaggcttgctggtggtgctgtttgctctagtgcgtgcaaatcctccggctaacgtcacctggatagatcaggacggccctgttacggtgaacacatccgattttctcgtcctggatgcccagaactacccatggttgaccaatcacaccgtgcagctgcaattacgatctcttgcacacaatctgtccgtggtcgctaccaacgacgtcggtgtgaccagcgcaagtctgcccgcacctggacccagccgacatccttccctgattagctcggatagcaataatctgaaactcaacaacgtcagactgccacgcgagaacatgtcactgccaagcaacctgcaactgaacgacctcaccccggacagcagagccgtcaagcccgcagatcgccaaatggcccagaacaattcgcgtccggagctgctggaccccgaaccaggcggactgctcacatcccaaggattcatacgcctaccagtgttggggtacatttacagagtttcgtccgtgagcagcgacgagatttggctctag

SEQ ID NO: 55951 - DNA, 2395 bp, Artificial Sequence
  derived and/or modified sequence
cggccgcccacctgccgggtaagggcccctcgggcccgtggtcgggcatcgattggccccgcctggcgcagcccccgcccctgcagcggactgcggtgctcatcagacctgagcagttgctccggcggcgctcggggagggagccagcagcctagggcctaggcccgggccaccatggcgctgcctccaggcccagccgccctccggcacacactgctgctcctgccagcccttctgagctcaggttggggggagttggagccacaaatagatggtcagacctgggctgagcgggcacttcgggagaatgaacgccacgccttcacctgccgggtggcaggggggcctggcacccccagattggcctggtatctggatggacagctgcaggaggccagcacctcaagactgctgagcgtgggaggggaggccttctctggaggcaccagcaccttcactgtcactgcccatcgggcccagcatgagctcaactgctctctgcaggaccccagaagtggccgatcagccaacgcctctgtcatccttaatgtgcaattcaagccagagattgcccaagtcggcgccaagtaccaggaagctcagggcccaggcctcctggttgtcctgtttgccctggtgcgtgccaacccgccggccaatgtcacctggatcgaccaggatgggccagtgactgtcaacacctctgacttcctggtgctggatgcgcagaactacccctggctcaccaaccacacggtgcagctgcagctccgcagcctggcacacaacctctcggtggtggccaccaatgacgtgggtgtcaccagtgcgtcgcttccagccccaggcccctcccggcacccatctctgatatcaagtgactccaacaacctaaaactcaacaacgtgcgcctgccacgggagaacatgtccctcccgtccaaccttcagctcaatgacctcactccagattccagagcagtgaaaccagcagaccggcagatggctcagaacaacagccggccagagcttctggacccggagcccggcggcctcctcaccagccaaggtttcatccgcctcccagtgctgggctatatctatcgagtgtccagcgtgagcagtgatgagatctggctctgagccgagggcgagacaggagtattctcttggcctctggacaccctcccgttcctccaaggcatcctctacctagctaggtcaccaacgtgaagaagttatgccactgccacttttgcttgccctcctggctggggtgccctccatgtcatgcacgtgatgcatttcactgggctgtaacccgcaggggcacaggtatctttggcaaggctaccagttggacgtaagcccctcatgctgactcagggtgggccctgcatgtgatgactgggcccttccagagggagctctttggccaggggtgttcagatgtcatccagcatccaagtgtggcatggcctgctgtataccccaccccagtactccacagcaccttgtacagtaggcatgggggcgtgcctgtgtgggggacagggagggccctgcatggattttcctccttcctatgctatgtagccttgttccctcaggtaaaatttaggaccctgctagctgtgcagaacccaattgccctttgcacagaaaccaacccctgacccagcggtaccggccaagcacaaacgtcctttttgctgcacacgtctctgcccttcacttcttctcttctgtccccacctcctcttgggaattctaggttacacgttggaccttctctactacttcactgggcactagacttttctattggcctgtgccatcgcccagtattagcacaagttagggaggaagaggcaggcgatgagtctagtagcacccaggacggcttgtagctatgcatcattttcctacggcgttagcactttaagcacatcccctaggggagggggtgagtgaggggcccagagccctctttgtggcttccccacgtttggccttctgggattcactgtgagtgtcctgagctctcggggttgatggtttttctctcagcatgtctcctccaccacgggaccccagccctgaccaacccatggttgcctcatcagcaggaaggtgcccttcctggaggatggtcgccacaggcacataattcaacagtgtggaagctttaggggaacatggagaaagaaggagaccacataccccaaagtgacctaagaacactttaaaaagcaacatgtaaatgattggaaattaatatagtacagaatatatttttcccttgttgagatcttcttttgtaatgtttttcatgttactgcctagggcggtgctgagcacacagcaagtttaataaacttgactgaattcattt

SEQ ID NO: 55952 - DNA, 2442 bp, Artificial Sequence
  derived and/or modified sequence
gggggtactcggcgcgggctggggaccagccggggggtggtgagccgcggccgcccacctgccgggtaagggcccctcgggcccgtggtcgggcatcgattggccccgcctggcgcagcccccgcccctgcagcggactgcggtgctcatcagacctgagcagttgctccggcggcgctcggggagggagccagcctagggcctaggcccgggccaccatggcgctgcctccaggcccagccgccctccggcacacactgctgctcctgccagcccttctgagctcaggttggggggagttggagccacaaatagatggtcagacctgggctgagcgggcacttcgggagaatgaacgccacgccttcacctgccgggtggcaggggggcctggcacccccagattggcctggtatctggatggacagctgcaggaggccagcacctcaagactgctgagcgtgggaggggaggccttctctggaggcaccagcaccttcactgtcactgcccatcgggcccagcatgagctcaactgctctctgcaggaccccagaagtggccgatcagccaacgcctctgtcatccttaatgtgcaattcaagccagagattgcccaagtcggcgccaagtaccaggaagctcagggcccaggcctcctggttgtcctgtttgccctggtgcgtgccaacccgccggccaatgtcacctggatcgaccaggatgggccagtgactgtcaacacctctgacttcctggtgctggatgcgcagaactacccctggctcaccaaccacacggtgcagctgcagctccgcagcctggcacacaacctctcggtggtggccaccaatgacgtgggtgtcaccagtgcgtcgcttccagccccaggcccctcccggcacccatctctgatatcaagtgactccaacaacctaaaactcaacaacgtgcgcctgccacgggagaacatgtccctcccgtccaaccttcagctcaatgacctcactccagattccagagcagtgaaaccagcagaccggcagatggctcagaacaacagccggccagagcttctggacccggagcccggcggcctcctcaccagccaaggtttcatccgcctcccagtgctgggctatatctatcgagtgtccagcgtgagcagtgatgagatctggctctgagccgagggcgagacaggagtattctcttggcctctggacaccctcccgttcctccaaggcatcctctacctagctaggtcaccaacgtgaagaagttatgccactgccacttttgcttgccctcctggctggggtgccctccatgtcatgcacgtgatgcatttcactgggctgtaacccgcaggggcacaggtatctttggcaaggctaccagttggacgtaagcccctcatgctgactcagggtgggccctgcatgtgatgactgggcccttccagagggagctctttggccaggggtgttcagatgtcatccagcatccaagtgtggcatggcctgctgtataccccaccccagtactccacagcaccttgtacagtaggcatgggggcgtgcctgtgtgggggacagggagggccctgcatggattttcctccttcctatgctatgtagccttgttccctcaggtaaaatttaggaccctgctagctgtgcagaacccaattgccctttgcacagaaaccaacccctgacccagcggtaccggccaagcacaaacgtcctttttgctgcacacgtctctgcccttcacttcttctcttctgtccccacctcctcttgggaattctaggttacacgttggaccttctctactacttcactgggcactagacttttctattggcctgtgccatcgcccagtattagcacaagttagggaggaagaggcaggcgatgagtctagtagcacccaggacggcttgtagctatgcatcattttcctacggcgttagcactttaagcacatcccctaggggagggggtgagtgaggggcccagagccctctttgtggcttccccacgtttggccttctgggattcactgtgagtgtcctgagctctcggggttgatggtttttctctcagcatgtctcctccaccacgggaccccagccctgaccaacccatggttgcctcatcagcaggaaggtgcccttcctggaggatggtcgccacaggcacataattcaacagtgtggaagctttaggggaacatggagaaagaaggagaccacataccccaaagtgacctaagaacactttaaaaagcaacatgtaaatgattggaaattaatatagtacagaatatatttttcccttgttgagatcttcttttgtaatgtttttcatgttactgcctagggcggtgctgagcacacagcaagtttaataaacttgactgaattcatttaca

SEQ ID NO: 55953 - DNA, 969 bp, Artificial Sequence
  derived and/or modified sequence
atggcgctgccaccagggcccgcagccttgaggcacactctgctattactgcctgcactcctctcgtcaggttggggggagctggaaccgcaaatagacgggcagacctgggccgagcgggctctgcgggagaatgagcgacatgcattcacatgccgcgttgctggtggccccggcacgcccaggttggcctggtatttagacgggcagctgcaggaggcatcaaccagtcggctattgtcagtgggtggcgaagcttttagcggtgggaccagcacattcacggttactgctcatagggcacaacatgagctgaattgcagtctgcaggaccctaggtcaggccgctccgctaatgcatctgtgattctgaacgtgcagtttaaacccgaaatcgctcaggtgggggccaagtatcaggaagcacaaggacccgggctgctggtggtgctgttcgcactggtaagagccaatcctccggctaatgttacctggatagaccaggacggcccagtcacggttaataccagtgactttttggtactggacgctcagaattatccatggctcacaaaccacactgttcagctccaactgcggtccctcgctcacaacctgtccgtcgtggccaccaatgacgtgggagtgacttccgcctctcttcccgcgcccggtcccagtcgtcacccatctctgattagttcagacagcaacaatcttaagttgaacaacgtccgtctcccccgtgaaaacatgtcactgccgagtaaccttcagttgaatgatctcacaccggatagtagggcagttaagccagccgacagacagatggcccagaataactctaggccggagttgctggatcccgaacccggcgggctgctgacttctcagggattcattcggctccctgttctgggttatatttatcgggtttcctcagtgtcttccgacgaaatctggctctag

SEQ ID NO: 55954 - DNA, 969 bp, Artificial Sequence
  derived and/or modified sequence
atggccttgccccctggtccggccgccttacgccatactttactgctgctgccggccctgctcagctccgggtggggggagctggagccacagattgatggccagacctgggccgagcgggctcttcgcgagaatgagcgccatgcatttacttgcagggtggccggcggacccggcacaccccgtctggcgtggtatctggacggtcagctgcaggaggcttccacttcccgactgctgtcagttgggggcgaggcctttagtggcgggacgagcacattcacagtgaccgctcaccgggcgcagcatgaactcaactgctccttgcaggacccccgctcgggaagatccgctaatgcatcggtcatcctcaatgttcaatttaagccagaaatcgcacaggttggagcaaaataccaggaagcccagggccctggactgctcgtggtgctgttcgcacttgtccgagccaatcctcctgccaacgtgacatggatcgaccaggatggacctgtgacagtgaacacgtctgactttctggttctagacgctcagaattacccatggctcactaatcacacagtgcagctgcagctcaggagtctcgcccacaacttatccgtggttgcaaccaatgatgtgggagttacgtccgcttccctgccggcaccgggacctagtcgccacccgagcctcatcagcagtgactccaataatttgaagctcaataacgttcgtctccctcgcgagaatatgtcactcccctcaaatctccagctgaacgatttgacacctgattcgcgcgccgtaaagccagccgacagacaaatggcccaaaataattcgcggccggagcttctggaccccgagcccggaggactgctgacctcccagggatttatcagattgcccgtcctggggtatatctaccgggtgagcagcgtgtcgtctgacgaaatctggttgtag

SEQ ID NO: 55955 - DNA, 969 bp, Artificial Sequence
  derived and/or modified sequence
atggccctgccccccggccccgccgccctgcggcacaccctgctgttgcttcccgcactcctctccagcggatggggggagctggaacctcaaattgacggccaaacctgggccgagcgtgccctccgagagaacgagcgacacgcctttacatgtcgcgtcgctggaggccccgggacccctcgactcgcctggtacctagatggtcagttacaggaggcctccacttccaggctcctttcagtgggcggtgaggccttttccggcggaacaagcaccttcacagtgaccgctcaccgagcccagcacgagctcaactgctctctccaagacccccgctccggcagatccgcaaacgcaagtgtgattttaaacgtgcagtttaaaccagaaattgctcaggtgggggcaaagtaccaagaagcgcagggtccgggcttacttgtagtgctgttcgcccttgtaagggccaaccctccagccaatgtcacttggatcgatcaggatggtcccgtgactgtaaataccagcgacttcctggtgctggatgcccaaaattatccatggctgacaaaccacacagtgcaactgcagctgaggtctttggcccataatttgtccgtcgtcgcaaccaatgatgttggagtgacatccgcaagcctccccgccccgggaccctccagacacccaagcctgattagtagtgactccaacaatctcaaacttaataacgttcggctgcctcgtgagaatatgagtttgccgtccaatttgcagctgaacgacctgactccagatagccgcgccgtcaagcctgccgaccgccagatggcgcaaaataattctagacccgagctgctggaccctgagccaggaggcttacttacgagccaaggcttcattaggctccctgtcctgggctatatttatcgagtgagctctgtctcgagtgacgaaatttggctgtag

SEQ ID NO: 55956 - DNA, 969 bp, Artificial Sequence
  derived and/or modified sequence
atggccctgccccccggccccgccgccctgcggcacaccctgctgctattgcctgccctgttgtccagcgggtggggagagctggaaccccagatagatggacagacttgggccgaacgagccctgcgcgaaaacgagcggcatgcatttacttgccgagtagcaggagggccgggaactcctcggttggcatggtacctggatggccaattgcaggaggcgtctacaagccggttactgagtgtgggcggagaagcgttctctggcgggacgtccacatttaccgttaccgctcaccgggcccagcacgaactgaattgcagtctccaggatccacggtcaggcagaagtgccaatgctagcgtaattttaaatgtgcagttcaaaccagaaatcgcccaagtgggtgccaagtaccaggaagcccaggggcctggactcctagtagttctgtttgccttagtgcgcgcgaatccgccagctaacgtgacttggatcgaccaagacggtccagtgaccgtgaacacttccgattttcttgtgctggacgcgcaaaactatccttggttgactaaccatacggttcaactccagttaagaagtctcgcacataatttaagcgtagtcgccaccaatgatgtgggtgttacaagcgcatccctgccagctcccggaccctcccgccacccgagccttatcagctctgacagtaataatctcaagctcaataacgtgagattgcccagggagaatatgtctctgccttctaacctacagctgaatgacctgacccccgattctagagctgtgaagccagccgaccggcagatggcccaaaacaactctcgacccgagcttttggaccccgaacccgggggcttgctcacaagtcaggggttcatcaggttgcccgtgctgggatacatttatagggtgtcaagtgtgagctctgacgagatctggctgtag

SEQ ID NO: 55957 - DNA, 969 bp, Artificial Sequence
  derived and/or modified sequence
atggcactaccacccggtcccgcagctttgcggcacacactgctcttgctgcccgctttgcttagctctggatggggcgagttagagccccagatcgacggccagacgtgggcggaacgggctctgagagagaacgaacggcacgcatttacgtgtcgtgtcgcaggtggaccagggacacctcggctggcgtggtacctcgacggacagcttcaggaagcctctacgagtcggctattgtcagtcggaggtgaagccttttcaggtggcacaagcacatttaccgtgaccgcgcacagggcccagcatgaactgaactgtagtctgcaggaccctaggagcggccgttcagccaatgccagcgttatcttgaatgtgcagttcaaaccagagattgcccaggtcggagcaaagtaccaggaagcacagggcccagggctcctggtggtcctctttgcattggtgagggccaacccgccagccaatgttacatggattgaccaggacgggcctgtcaccgtgaacacttctgattttctggttctggacgcacagaactatccttggctgaccaatcacactgtgcagctgcagctcaggtccttagcccacaacctgagcgtggtggccacaaacgatgtgggcgttaccagtgcatccttgccagccccagggcctagtagacatccttctcttatttccagtgacagcaacaatctgaaattgaataatgtgaggttgccgagggagaacatgtcactgccatcaaatctccagctgaatgatttgaccccagatagcagggccgttaagccagctgaccgccagatggctcagaacaactcccgaccagagctgttggatcccgagcccggaggccttttaactagccagggctttattcgcctgccagttctggggtatatctatcgggtctcatccgtcagctcagacgagatttggctctag

SEQ ID NO: 55958 - DNA, 969 bp, Artificial Sequence
  derived and/or modified sequence
atggctctgccccctggcccagccgctctcaggcataccttgctgctcctgccagccttattgtcttccggatggggagagttagagccccaaatcgacggtcagacatgggccgaacgggcactgagagagaacgagcggcatgccttcacatgccgagtggcaggcggacccggtaccccaagactggcttggtacctggatggccaacttcaggaagcctctacatcacgcttgctgagtgtgggcggagaggcgttttccggcggaacttcgacttttaccgtgacagcccaccgcgctcagcatgagttgaactgttccctgcaggatccccgttccggacggtccgctaatgcctccgtgatcttaaatgtgcagttcaaaccagagatcgcccaggtgggggctaaatatcaagaggctcagggcccaggcctgttggtcgttctcttcgcactggtcagggctaatccacccgcaaatgttacttggatagaccaggacggccctgttactgttaacacttccgacttccttgtcctggacgcgcaaaattacccatggcttacaaaccacacagtacagcttcagctacggagtttggcacacaatctgagcgtagtggcgacaaatgacgtgggtgtgaccagcgctagtctgccggctcctgggcctagcagacatcccagtctcatctcctcagacagcaataatctgaagcttaataacgtgcgattgcccagagagaatatgagtctgccctccaacctgcagctgaatgacttaacccctgacagcagagccgtgaaacctgccgataggcaaatggcgcaaaataactctcgccctgaacttctggatccggagccaggcggtcttctgacgtcccaaggctttattaggttgccagtgctgggttatatttatcgggtcagcagcgtgagtagtgacgaaatctggctatag

SEQ ID NO: 55959 - protein, 218 aa, Artificial Sequence
  derived and/or modified sequence
MALPPGPAALRHTLLLLPALLSSVKPEIAQVGAKYQEAQGPGLLVVLFALVRANPPANVTWIDQDGPVTVNTSDFLVLDAQNYPWLTNHTVQLQLRSLAHNLSVVATNDVGVTSASLPAPGPSRHPSLISSDSNNLKLNNVRLPRENMSLPSNLQLNDLTPDSRAVKPADRQMAQNNSRPELLDPEPGGLLTSQGFIRLPVLGYIYRVSSVSSDEIWL

SEQ ID NO: 55960 - DNA, 657 bp, Artificial Sequence
  derived and/or modified sequence
atggccctgccccccggccccgccgccctgagacacaccctgctgctgctgcccgccctgctgagcagcgtgaagcccgagatcgcccaggtgggcgccaagtaccaggaggcccagggccccggcctgctggtggtgctgttcgccctggtgagagccaacccccccgccaacgtgacctggatcgaccaggacggccccgtgaccgtgaacaccagcgacttcctggtgctggacgcccagaactacccctggctgaccaaccacaccgtgcagctgcagctgagaagcctggcccacaacctgagcgtggtggccaccaacgacgtgggcgtgaccagcgccagcctgcccgcccccggccccagcagacaccccagcctgatcagcagcgacagcaacaacctgaagctgaacaacgtgagactgcccagagagaacatgagcctgcccagcaacctgcagctgaacgacctgacccccgacagcagagccgtgaagcccgccgacagacagatggcccagaacaacagcagacccgagctgctggaccccgagcccggcggcctgctgaccagccagggcttcatcagactgcccgtgctgggctacatctacagagtgagcagcgtgagcagcgacgagatctggctgtag

SEQ ID NO: 55961 - DNA, 657 bp, Artificial Sequence
  derived and/or modified sequence
atggccttgcctccggggccggccgcactgcgtcatacacttttattgctgcctgcgttgctgtccagcgttaaacctgagatcgcacaggtgggcgccaagtatcaagaagctcagggcccaggcctgcttgtggtgctcttcgctctagtccgagcaaaccccccggccaacgtgacatggattgatcaggacgggccagttaccgtaaacacttctgattttttggttcttgatgctcagaactatccttggctcaccaatcatacagttcagttgcaactgcggtctcttgcacataacctgagcgtggtggccacaaacgacgtgggcgtcacctctgctagcctgcccgccccgggcccatcacgtcatccatccctcatcagttctgattcaaacaatctgaagctgaataacgtgagacttccccgcgaaaatatgagcctaccgtctaatttacagctcaatgatcttacccctgattctagagcggtgaagccggctgacagacaaatggctcaaaacaactcacgcccagaattgctagatcccgagccggggggtttgttgactagtcagggatttattaggctgcctgtcttggggtatatatatcgcgtgagttctgtcagcagcgatgagatctggctgtag

SEQ ID NO: 55962 - DNA, 657 bp, Artificial Sequence
  derived and/or modified sequence
atggccctgcccccaggccctgctgccctgcggcacaccctgctgctgctgcctgccctgctgagctctgtgaagccagagatcgcccaggtgggcgccaagtaccaggaggcccagggccctggcctgctggtggtgctgtttgccctggtgcgggccaaccccccagccaacgtgacctggattgaccaggacggccctgtgacagtgaacaccagtgacttcctggtgctggatgcccagaactacccctggctgaccaaccacacagtgcagctgcagctgcggagcctggcccacaacctgtctgtggtggccaccaatgatgtgggcgtgaccagcgccagcctgcctgcccctggccccagccgccaccccagcctcatcagcagtgacagcaacaacctgaagctgaacaacgtgcggctgccccgggagaacatgagcctgcccagcaacctgcagctgaatgacctgaccccagacagcagagctgtgaagccagctgaccggcagatggcccagaacaacagcaggcctgagctgctggaccctgagcccggcggcctgctgaccagccagggcttcatccggctgcctgtgctgggctacatctacagagtgtcctctgtgtccagtgatgagatctggctgtag

SEQ ID NO: 55963 - DNA, 657 bp, Artificial Sequence
  derived and/or modified sequence
atggccctgccccccggccccgccgccctgcggcacaccctgctgttgctcccagccctgctgtccagcgtcaaacccgaaattgcgcaggtgggcgcgaagtatcaggaggcacagggccctggcctgctagttgtgctctttgcattggtgagagctaacccacctgctaacgtgacatggatcgatcaggacggccctgtgacagtgaataccagcgacttcctggtcctggacgctcaaaattatccctggctcaccaatcatacggtccagcttcaactcaggtcgctggcccataacctgagcgttgtcgctactaacgatgtcggcgtgacttctgcttctctccccgcccccggtccgtctagacaccccagtcttatatcatctgactccaacaacctaaaactcaacaacgtgcggttgccgcgggaaaatatgtcactcccttcgaatctgcagctaaatgacctgacaccagactctagggccgtgaagcctgcagaccgtcagatggcacagaacaattccagaccagagttactcgatcctgaacccggcgggcttcttactagccaggggtttataagactgcctgtgctaggctacatctatcgcgtgagtagcgtctcctcggacgagatttggttgtag

SEQ ID NO: 55964 - DNA, 657 bp, Artificial Sequence
  derived and/or modified sequence
atggctcttccccctggcccagctgcgctcagacacactttactcctgcttccagccctactgagtagtgtgaaacctgagattgctcaagtgggggctaagtaccaggaggctcagggtccaggcttgcttgtagtgctgtttgctttagtgagggcaaatcctcctgcaaacgtcacttggatcgatcaggatggaccagtgacggtcaatactagtgattttttggtattagacgcgcagaattatccttggttaacaaatcacactgtgcagctgcagctgcgcagtctggcccacaacctgagtgttgtggcaactaacgatgtcggcgtgacaagcgcctccctgccagccccagggccatctcgtcaccccagtctgatttcttcggattccaataacctgaagttgaataacgtgagactcccccgagagaatatgtccctgccttccaacctccaactgaacgacttgacccctgacagccgcgctgtaaaacctgccgatcgccagatggcgcagaacaatagccgtcctgaattattggatcctgagcccggaggacttctaacgagccaggggtttatccgcctgccggttcttggctatatttatagggtttcgagtgttagcagcgacgaaatctggttgtag

SEQ ID NO: 55965 - DNA, 1965 bp, Artificial Sequence
  derived and/or modified sequence
agttgctccggcggcgctcggggagggagccagcagcctagggcctaggcccgggccaccatggcgctgcctccaggcccagccgccctccggcacacactgctgctcctgccagcccttctgagctcagtcaagccagagattgcccaagtcggcgccaagtaccaggaagctcagggcccaggcctcctggttgtcctgtttgccctggtgcgtgccaacccgccggccaatgtcacctggatcgaccaggatgggccagtgactgtcaacacctctgacttcctggtgctggatgcgcagaactacccctggctcaccaaccacacggtgcagctgcagctccgcagcctggcacacaacctctcggtggtggccaccaatgacgtgggtgtcaccagtgcgtcgcttccagccccaggcccctcccggcacccatctctgatatcaagtgactccaacaacctaaaactcaacaacgtgcgcctgccacgggagaacatgtccctcccgtccaaccttcagctcaatgacctcactccagattccagagcagtgaaaccagcagaccggcagatggctcagaacaacagccggccagagcttctggacccggagcccggcggcctcctcaccagccaaggtttcatccgcctcccagtgctgggctatatctatcgagtgtccagcgtgagcagtgatgagatctggctctgagccgagggcgagacaggagtattctcttggcctctggacaccctcccgttcctccaaggcatcctctacctagctaggtcaccaacgtgaagaagttatgccactgccacttttgcttgccctcctggctggggtgccctccatgtcatgcacgtgatgcatttcactgggctgtaacccgcaggggcacaggtatctttggcaaggctaccagttggacgtaagcccctcatgctgactcagggtgggccctgcatgtgatgactgggcccttccagagggagctctttggccaggggtgttcagatgtcatccagcatccaagtgtggcatggcctgctgtataccccaccccagtactccacagcaccttgtacagtaggcatgggggcgtgcctgtgtgggggacagggagggccctgcatggattttcctccttcctatgctatgtagccttgttccctcaggtaaaatttaggaccctgctagctgtgcagaacccaattgccctttgcacagaaaccaacccctgacccagcggtaccggccaagcacaaacgtcctttttgctgcacacgtctctgcccttcacttcttctcttctgtccccacctcctcttgggaattctaggttacacgttggaccttctctactacttcactgggcactagacttttctattggcctgtgccatcgcccagtattagcacaagttagggaggaagaggcaggcgatgagtctagtagcacccaggacggcttgtagctatgcatcattttcctacggcgttagcactttaagcacatcccctaggggagggggtgagtgaggggcccagagccctctttgtggcttccccacgtttggccttctgggattcactgtgagtgtcctgagctctcggggttgatggtttttctctcagcatgtctcctccaccacgggaccccagccctgaccaacccatggttgcctcatcagcaggaaggtgcccttcctggaggatggtcgccacaggcacataattcaacagtgtggaagctttaggggaacatggagaaagaaggagaccacataccccaaagtgacctaagaacactttaaaaagcaacatgtaaatgattggaaattaatatagtacagaatatatttttcccttgttgagatcttcttttgtaatgtttttcatgttactgcctagggcggtgctgagcacacagcaagtttaataaacttgactgaattc

SEQ ID NO: 55966 - protein, 351 aa, Artificial Sequence
  derived and/or modified sequence
MALPPGPAALRHTLLLLPALLSSGWGELEPQIDGQTWAERALRENERHAFTCRVAGGPGTPRLAWYLDGQLQEASTSRLLSVGGEAFSGGTSTFTVTAHRAQHELNCSLQDPRSGRSANASVILNVQFKPEIAQVGAKYQEAQGPGLLVVLFALVRANPPANVTWIDQDGPVTVNTSDFLVLDAQNYPWLTNHTVQLQLRSLAHNLSVVATNDVGVTSASLPAPGLLATRVEVPLLGIVVAAGLALGTLVGFSTLVACLVCRKEKKTKGPSRHPSLISSDSNNLKLNNVRLPRENMSLPSNLQLNDLTPDSRAVKPADRQMAQNNSRPELLDPEPGGLLTSQGRRNQDKDA

SEQ ID NO: 55967 - DNA, 1056 bp, Artificial Sequence
  derived and/or modified sequence
atggccctgccccccggccccgccgccctgagacacaccctgctgctgctgcccgccctgctgagcagcggctggggcgagctggagccccagatcgacggccagacctgggccgagagagccctgagagagaacgagagacacgccttcacctgcagagtggccggcggccccggcacccccagactggcctggtacctggacggccagctgcaggaggccagcaccagcagactgctgagcgtgggcggcgaggccttcagcggcggcaccagcaccttcaccgtgaccgcccacagagcccagcacgagctgaactgcagcctgcaggaccccagaagcggcagaagcgccaacgccagcgtgatcctgaacgtgcagttcaagcccgagatcgcccaggtgggcgccaagtaccaggaggcccagggccccggcctgctggtggtgctgttcgccctggtgagagccaacccccccgccaacgtgacctggatcgaccaggacggccccgtgaccgtgaacaccagcgacttcctggtgctggacgcccagaactacccctggctgaccaaccacaccgtgcagctgcagctgagaagcctggcccacaacctgagcgtggtggccaccaacgacgtgggcgtgaccagcgccagcctgcccgcccccggcctgctggccaccagagtggaggtgcccctgctgggcatcgtggtggccgccggcctggccctgggcaccctggtgggcttcagcaccctggtggcctgcctggtgtgcagaaaggagaagaagaccaagggccccagcagacaccccagcctgatcagcagcgacagcaacaacctgaagctgaacaacgtgagactgcccagagagaacatgagcctgcccagcaacctgcagctgaacgacctgacccccgacagcagagccgtgaagcccgccgacagacagatggcccagaacaacagcagacccgagctgctggaccccgagcccggcggcctgctgaccagccagggcagaagaaaccaggacaaggacgcctag

SEQ ID NO: 55968 - DNA, 1056 bp, Artificial Sequence
  derived and/or modified sequence
atggccctgcccccagggcccgccgccttgagacacactcttctgctgcttcctgccctcctttcttctgggtggggggagctcgagcctcagattgatggccagacctgggcggagagagctctccgggaaaacgaaaggcacgcctttacatgccgggtggccggcggacctggaaccccccgcctcgcatggtatctggatggccagctccaggaagcctccacttccaggctgctttcagtcggcggagaagcattctcaggtggcacctctactttcacggttacagctcaccgagctcaacacgaactcaattgtagtctccaggatccgcgaagcgggcgcagtgctaacgccagtgtgatattgaacgttcagtttaagcctgaaatagcacaggtcggcgcgaaatatcaagaagcccaaggaccagggctgctggttgtcctgtttgctctggtgagggccaatccaccagccaacgtcacatggatagatcaggacggcccagtgaccgtgaacacaagcgatttcttggtcctggacgcccagaactacccatggttgacaaaccacacagtgcaactgcagctccggtccctggcgcataatctgtccgtggtggccactaacgatgtaggagttacttctgccagtctcccggctccaggccttctcgccacgagggtagaggttcccttgctaggaatagtagtggccgccggtcttgcgctgggcacgctcgtcgggttctctactctcgtcgcctgccttgtctgtcgcaaggaaaagaaaacaaaaggcccttccagacacccatccttgatctcctccgattcgaacaacctgaagcttaacaatgtgcgacttccaagagagaatatgagtttacccagcaacttacagctgaatgacctcacccccgactcccgcgccgtaaaaccagctgaccgacagatggctcaaaacaactcacgcccggaactgctggaccctgagccaggtggactgctgacctcgcaaggtcgcaggaaccaggacaaggatgcctag

SEQ ID NO: 55969 - DNA, 1056 bp, Artificial Sequence
  derived and/or modified sequence
atggccctgcccccaggccctgctgccctgcggcacaccctgctgctgctgcctgccctgctgagcagcggctggggcgagctggagccccagattgatggccagacctgggccgagcgggccctgcgggagaatgaaagacatgccttcacctgccgggtggccggcggccctggcaccccccggctggcctggtacctggatggccagctgcaggaggccagcaccagccggctgctgtctgtgggcggggaggccttcagcggcggcaccagcaccttcaccgtgacagcccaccgggcccagcacgagctgaactgcagcctgcaggaccccaggagcggccgcagcgccaatgccagcgtcatcctgaatgtgcagttcaagccagagatcgcccaggtgggcgccaagtaccaggaggcccagggccctggcctgctggtggtgctgtttgccctggtgcgggccaaccccccagccaacgtgacctggattgaccaggacggccctgtgacagtgaacaccagtgacttcctggtgctggatgcccagaactacccctggctgaccaaccacacagtgcagctgcagctgcggagcctggcccacaacctgtctgtggtggccaccaatgatgtgggcgtgaccagcgccagcctgcctgcccctggcctgctggccaccagggtggaggtgcccctgctgggcatcgtggtggccgccggcctggccctgggcaccctggtgggcttcagcaccctggtggcctgcctggtgtgcaggaaggagaagaagaccaagggccccagccgccaccccagcctcatcagcagtgacagcaacaacctgaagctgaacaacgtgcggctgccccgggagaacatgagcctgcccagcaacctgcagctgaatgacctgaccccagacagcagagctgtgaagccagctgaccggcagatggcccagaacaacagcaggcctgagctgctggaccctgagcccggcggcctgctgaccagccagggcagaagaaaccaggacaaggatgcctag

SEQ ID NO: 55970 - DNA, 1056 bp, Artificial Sequence
  derived and/or modified sequence
atggccctgccccccggccccgccgccctgcggcacaccctgctgctgctgccagccttgttgagcagcggttggggagaactcgagccacagattgacggacagacctgggcggagagggccttaagggagaatgagcgccacgctttcacatgtagggtagccggtgggcccgggacacctaggctggcctggtaccttgacgggcagctccaggaagcgagtacctcacggctgctctcagtgggaggcgaagcctttagcgggggaaccagtaccttcacggtgaccgcccaccgcgcccagcacgagctcaattgctcacttcaggatccccgctctggtcgctccgcaaatgcctccgtcatccttaatgtacagtttaagccagagatcgcccaagtgggggccaagtaccaggaagcccagggtcctgggctgctagtggtgctgtttgctcttgttcgtgcaaacccgccagcgaacgtcacttggattgatcaggacggcccagtcacagtgaatacttccgactttttagtgctggacgcccagaactacccctggcttacaaatcataccgtccaactccaattaagatccctggcccacaacctgtctgtcgttgcaactaacgacgttggagtgaccagcgcaagcctgcctgcaccaggcctgttggcgacccgagtcgaagttcccctgctaggtattgtcgtggcagctgggctcgcgcttgggactctggtggggttcagtactcttgttgcatgcctagtgtgtcggaaggagaagaaaacaaaaggaccatcccgccacccttctttgatctccagcgactcaaacaatctgaaactcaacaacgtgcggcttccacgggaaaatatgagcctgcccagcaacctgcagttaaatgatctcactccagatagtcgggcagttaagcccgccgacaggcaaatggcccagaacaactctcgacctgagctccttgaccccgaaccgggaggactccttacatcccagggaagacgtaatcaagacaaggatgcatag

SEQ ID NO: 55971 - DNA, 1056 bp, Artificial Sequence
  derived and/or modified sequence
atggccttgcctccaggaccagccgctcttcggcatactttgttactgcttcccgcactgttatcttccgggtggggagagttggagccacagatagatggccagacctgggctgaaagggcacttcgcgaaaacgagaggcacgccttcacctgcagagttgccggtggcccaggtacgcctaggctggcttggtatctcgacggacaacttcaggaggcgagtacttctagactgttgagtgttgggggtgaggctttctcaggaggcacctccacatttaccgtaacggcgcacagggctcagcacgaactgaactgtagcctgcaggacccgaggagcggcaggagtgctaacgcttcggttattctaaacgtgcagttcaaaccggaaatcgctcaggttggtgcgaagtaccaggaagcgcagggaccgggtttactggtagtgctgtttgccttggtcagggccaatccacccgctaatgtaacatggatagatcaggacggccctgtgacagtaaatacctccgactttctcgtgttggacgcccagaattatccttggttgactaatcatacggtgcagttacagttgcgaagcctggcacacaaccttagcgtagtggctactaacgacgtgggcgtaacatccgcatccctgccagctcccggactgttagcgacccgggtagaagtacccctccttggcatcgtagttgcagccggtctggccctgggcacactagttgggttttctacattggtggcctgtctggtttgccgcaaagagaagaagacaaaaggacctagtcgtcatcccagcctgatatcatcagactcaaataacctgaagctaaacaacgtgcgtctgcccagggaaaacatgtctctgccgagtaatctgcaacttaacgacctaacacccgatagccgagccgttaaacctgccgatcgccagatggcccagaacaattcccgacctgaactgctcgaccccgagccaggcggactgctgacgagccagggtcgtagaaaccaggataaggatgcctag

SEQ ID NO: 55972 - DNA, 1456 bp, Artificial Sequence
  derived and/or modified sequence
agcagttgctccggcggcgctcggggagggagccagcagcctagggcctaggcccgggccaccatggcgctgcctccaggcccagccgccctccggcacacactgctgctcctgccagcccttctgagctcaggttggggggagttggagccacaaatagatggtcagacctgggctgagcgggcacttcgggagaatgaacgccacgccttcacctgccgggtggcaggggggcctggcacccccagattggcctggtatctggatggacagctgcaggaggccagcacctcaagactgctgagcgtgggaggggaggccttctctggaggcaccagcaccttcactgtcactgcccatcgggcccagcatgagctcaactgctctctgcaggaccccagaagtggccgatcagccaacgcctctgtcatccttaatgtgcaattcaagccagagattgcccaagtcggcgccaagtaccaggaagctcagggcccaggcctcctggttgtcctgtttgccctggtgcgtgccaacccgccggccaatgtcacctggatcgaccaggatgggccagtgactgtcaacacctctgacttcctggtgctggatgcgcagaactacccctggctcaccaaccacacggtgcagctgcagctccgcagcctggcacacaacctctcggtggtggccaccaatgacgtgggtgtcaccagtgcgtcgcttccagccccagggcttctggctacccgggtggaagtgccactgctgggcattgttgtggctgctgggcttgcactgggcaccctcgtggggttcagcaccttggtggcctgcctggtctgcagaaaagagaagaaaaccaaaggcccctcccggcacccatctctgatatcaagtgactccaacaacctaaaactcaacaacgtgcgcctgccacgggagaacatgtccctcccgtccaaccttcagctcaatgacctcactccagattccagagcagtgaaaccagcagaccggcagatggctcagaacaacagccggccagagcttctggacccggagcccggcggcctcctcaccagccaaggaagaagaaatcaggacaaagacgcataacagagggaagaccatgggaagacacagaagatggccaagaagagacccctcagaagaaatcaatcttggtggggcgtggtggcttcacgcctgtaataccagcactgtgggaggttgaggtgggcagatcgcctgagcctaggagttcgagaccagcctgggcaacatggtgaaattccatctctacaaaaaaattagccgggtgtggtgttgagtatctgtagtcccagctacttgggaggctggggtgggaggactgcttgagtccagcaggttgaggctgcagtgagctgagattgagctactgcactccagcctgggcatagagtaataccct

SEQ ID NO: 55973 - protein, 306 aa, Artificial Sequence
  derived and/or modified sequence
MALPPGPAALRHTLLLLPALLSSGWGELEPQIDGQTWAERALRENERHAFTCRVAGGPGTPRLAWYLDGQLQEASTSRLLSVGGEAFSGGTSTFTVTAHRAQHELNCSLQDPRSGRSANASVILNVQFKPEIAQVGAKYQEAQGPGLLVVLFALVRANPPANVTWIDQDGPVTVNTSDFLVLDAQNYPWLTNHTVQLQLRSLAHNLSVVATNDVGVTSASLPAPGPSRHPSLISSDSNNLKLNNVRLPRENMSLPSNLQLNDLTPDSRVKPADRQMAQNNSRPELLDPEPGGLLTSQGRRNQDKDA

SEQ ID NO: 55974 - DNA, 921 bp, Artificial Sequence
  derived and/or modified sequence
atggccctgccccccggccccgccgccctgagacacaccctgctgctgctgcccgccctgctgagcagcggctggggcgagctggagccccagatcgacggccagacctgggccgagagagccctgagagagaacgagagacacgccttcacctgcagagtggccggcggccccggcacccccagactggcctggtacctggacggccagctgcaggaggccagcaccagcagactgctgagcgtgggcggcgaggccttcagcggcggcaccagcaccttcaccgtgaccgcccacagagcccagcacgagctgaactgcagcctgcaggaccccagaagcggcagaagcgccaacgccagcgtgatcctgaacgtgcagttcaagcccgagatcgcccaggtgggcgccaagtaccaggaggcccagggccccggcctgctggtggtgctgttcgccctggtgagagccaacccccccgccaacgtgacctggatcgaccaggacggccccgtgaccgtgaacaccagcgacttcctggtgctggacgcccagaactacccctggctgaccaaccacaccgtgcagctgcagctgagaagcctggcccacaacctgagcgtggtggccaccaacgacgtgggcgtgaccagcgccagcctgcccgcccccggccccagcagacaccccagcctgatcagcagcgacagcaacaacctgaagctgaacaacgtgagactgcccagagagaacatgagcctgcccagcaacctgcagctgaacgacctgacccccgacagcagagtgaagcccgccgacagacagatggcccagaacaacagcagacccgagctgctggaccccgagcccggcggcctgctgaccagccagggcagaagaaaccaggacaaggacgcctag

SEQ ID NO: 55975 - DNA, 810 bp, Artificial Sequence
  derived and/or modified sequence
atggccctgccccccggccccgccgccctgagacacaccctgctgctgctgcccgccctgctgagcagcggctggggcgagctggagccccagatcgacggccagacctgggccgagagagccctgagagagaacgagagacacgccttcacctgcagagtggccggcggccccggcacccccagactggcctggtacctggacggccagctgcaggaggccagcaccagcagactgctgagcgtgggcggcgaggccttcagcggcggcaccagcaccttcaccgtgaccgcccacagagcccagcacgagctgaactgcagcctgcaggaccccagaagcggcagaagcgccaacgccagcgtgatcctgaacgtgcagtggctgctggccaccagagtggaggtgcccctgctgggcatcgtggtggccgccggcctggccctgggcaccctggtgggcttcagcaccctggtggcctgcctggtgtgcagaaaggagaagaagaccaagggccccagcagacaccccagcctgatcagcagcgacagcaacaacctgaagctgaacaacgtgagactgcccagagagaacatgagcctgcccagcaacctgcagctgaacgacctgacccccgacagcagagccgtgaagcccgccgacagacagatggcccagaacaacagcagacccgagctgctggaccccgagcccggcggcctgctgaccagccagggcttcatcagactgcccgtgctgggctacatctacagagtgagcagcgtgagcagcgacgagatctggctgtag

SEQ ID NO: 55976 - DNA, 921 bp, Artificial Sequence
  derived and/or modified sequence
atggcccttcccccaggccccgccgctctgcgtcataccctgctgctgctccctgctctgttgtcaagcggatggggggagttggaaccccagatcgatggccagacctgggccgaacgcgccctgagggaaaatgagaggcacgcttttacctgccgggtggcaggcggccccggcaccccaaggttagcctggtacctcgacggccagctccaggaggcttctactagtcgactcttgtctgtcggtggagaggcgttctccggtggcacatctacttttacagttactgctcacagagcccagcacgagcttaactgcagtctgcaagaccctcgctctgggcggtctgctaatgcctcagttatactgaatgtgcagtttaagccggaaattgcgcaggtgggagcaaagtatcaagaggcacagggccccggtctcctcgtcgtgctgtttgctttggttcgagcgaacccccctgctaacgtgacttggatcgaccaagacggcccagtgacagttaatacgagcgactttctcgtcctggatgcacagaactatccgtggctgacaaaccacaccgtgcagcttcaactgaggagcctggcccataatctgagcgtggtggccacaaatgacgtgggggtgacttctgcatcacttcccgcgcctggtcctagtaggcatccgagcctgatcagctcagactcaaacaatctaaagctgaataatgtcaggttacctagagaaaacatgtctttgcctagcaatctgcagctgaacgatcttacaccggacagtcgtgtgaaacccgcagaccgacagatggcgcaaaacaattcgagaccagagttactggaccctgagccgggcgggctgttaacgtcccagggcaggcgtaatcaagataaagacgcttag

SEQ ID NO: 55977 - DNA, 810 bp, Artificial Sequence
  derived and/or modified sequence
atggctctgccacccggcccagctgccctgagacacacactgctgctcctgccagccctgctgtcaagcgggtggggggaactagaaccacaaattgacgggcagacatgggccgagagggcgcttagagagaatgagagacatgcctttacctgtcgagtagctgggggtcccggaactccgaggctggcctggtaccttgatggccagctgcaagaggcttcgacatcccgcttgttgtcagtgggcggggaggctttcagcggagggaccagcacattcacagtcacagcccaccgtgcgcaacatgagctcaattgttctctgcaggatccacgatccgggaggtctgccaacgcctcagttatcctcaacgtccagtggcttttggccacccgtgtggaagtgccactgctgggtatagtcgtcgcagccggcctggccttgggaaccctggtgggattcagtacgctcgtggcatgtctcgtttgccgcaaagaaaagaagactaaaggtcccagtcgtcatccctcacttataagctccgactcaaacaatctcaaactcaacaatgtccgcttacccagagaaaacatgtcccttccgagcaatttacaactcaacgacttgacccctgacagccgcgccgtgaaacccgcggacagacagatggcacagaacaactctcgacccgagttgttagacccagagccaggaggattacttacatctcaggggttcattcgattgcccgttcttggctacatttacagggtgtcgagcgtctcttcagacgagatttggctctag

SEQ ID NO: 55978 - DNA, 921 bp, Artificial Sequence
  derived and/or modified sequence
atggccctgcccccaggccctgctgccctgcggcacaccctgctgctgctgcctgccctgctgagcagcggctggggcgagctggagccccagattgatggccagacctgggccgagcgggccctgcgggagaatgaaagacatgccttcacctgccgggtggccggcggccctggcaccccccggctggcctggtacctggatggccagctgcaggaggccagcaccagccggctgctgtctgtgggcggggaggccttcagcggcggcaccagcaccttcaccgtgacagcccaccgggcccagcacgagctgaactgcagcctgcaggaccccaggagcggccgcagcgccaatgccagcgtcatcctgaatgtgcagttcaagccagagatcgcccaggtgggcgccaagtaccaggaggcccagggccctggcctgctggtggtgctgtttgccctggtgcgggccaaccccccagccaacgtgacctggattgaccaggacggccctgtgacagtgaacaccagtgacttcctggtgctggatgcccagaactacccctggctgaccaaccacacagtgcagctgcagctgcggagcctggcccacaacctgtctgtggtggccaccaatgatgtgggcgtgaccagcgccagcctgcctgcccctggccccagccgccaccccagcctcatcagcagtgacagcaacaacctgaagctgaacaacgtgcggctgccccgggagaacatgagcctgcccagcaacctgcagctgaatgacctgaccccagacagccgggtgaagccagctgaccggcagatggcccagaacaacagcaggcctgagctgctggaccctgagcccggcggcctgctgaccagccagggcagaagaaaccaggacaaggatgcctag

SEQ ID NO: 55979 - DNA, 810 bp, Artificial Sequence
  derived and/or modified sequence
atggccctgcccccaggccctgctgccctgcggcacaccctgctgctgctgcctgccctgctgagcagcggctggggcgagctggagccccagattgatggccagacctgggccgagcgggccctgcgggagaatgaaagacatgccttcacctgccgggtggccggcggccctggcaccccccggctggcctggtacctggatggccagctgcaggaggccagcaccagccggctgctgtctgtgggcggggaggccttcagcggcggcaccagcaccttcaccgtgacagcccaccgggcccagcacgagctgaactgcagcctgcaggaccccaggagcggccgcagcgccaatgccagcgtcatcctgaatgtgcagtggctgctggccaccagggtggaggtgcccctgctgggcatcgtggtggccgccggcctggccctgggcaccctggtgggcttcagcaccctggtggcctgcctggtgtgcaggaaggagaagaagaccaagggccccagccgccaccccagcctcatcagcagtgacagcaacaacctgaagctgaacaacgtgcggctgccccgggagaacatgagcctgcccagcaacctgcagctgaatgacctgaccccagacagcagagctgtgaagccagctgaccggcagatggcccagaacaacagcaggcctgagctgctggaccctgagcccggcggcctgctgaccagccagggcttcatccggctgcctgtgctgggctacatctacagagtgtcctctgtgtccagtgatgagatctggctgtag

SEQ ID NO: 55980 - DNA, 921 bp, Artificial Sequence
  derived and/or modified sequence
atggccctgccccccggccccgccgccctgcggcacaccctgctgctgctgcccgcactgctttcctctgggtggggagaattggaaccccagatagatggacagacgtgggccgagcgagctctgcgtgagaatgagagacatgctttcacctgtcgcgtggcagggggccctgggacgccacgcctcgcgtggtacctcgacgggcagctccaggaagcctctacctcaaggctgctgtcagtcgggggtgaagccttcagtgggggtaccagcaccttcactgttaccgcgcatcgtgcacagcatgagctgaactgtagccttcaggacccacgctcggggaggagcgcaaacgcatccgttatccttaacgtccagttcaaacccgagatagcacaagttggcgcaaagtatcaggaagcacaggggccaggactgctggtggtcctctttgctcttgtgagggcaaacccccccgccaacgtgacctggattgatcaggatggtcctgtgacagtaaacacttcagacttcctagttctggacgcgcagaattacccctggctgacaaaccataccgtgcaattacagctcaggtctctggctcataatctcagcgtcgtggccacgaacgacgtgggcgttacttcggccagcttgcctgctcctggaccgagcagacatccaagcctgatttcttcagactccaacaacctcaaactcaataacgtacgcctgccaagagaaaacatgtccttgccaagcaacctacagctcaacgacctcacaccagactcacgcgtgaagcccgctgaccgccaaatggcgcagaataattcacgcccagaattgctggatccagaaccaggcgggttgctcacttcccagggccgcaggaatcaggacaaggacgcttag

SEQ ID NO: 55981 - DNA, 810 bp, Artificial Sequence
  derived and/or modified sequence
atggccctgccccccggccccgccgccctgcggcacaccctgctgttactacctgcactgttgagtagtgggtggggggaattggaaccacagattgatggacagacttgggccgaacgcgcactgagagagaacgagagacacgcttttacgtgccgcgtcgcagggggaccaggaacaccgcggttagcctggtatctggatggccagctgcaagaagcgtcgacgtctcgactgctaagtgtgggaggcgaagcctttagcgggggaacaagcacatttactgttactgcacaccgcgctcagcatgagctgaattgctctttgcaggatccacgctcagggcggtcagccaacgcttctgttattctcaacgttcagtggctgctagcgacaagagtggaggtccccctgctgggtatcgtggttgctgcgggactggccctggggaccttagtgggcttctcaaccctagttgcctgcttggtgtgtcgcaaggagaagaagaccaaaggaccgagccggcacccctctctcatctcttccgattcaaataatctgaagctcaacaatgtgaggctgccaagggagaacatgtctctgccctctaacctgcaactcaacgacttaacaccggacagtcgagcagttaagccagccgatcgacagatggcacaaaataatagcagaccagagttgttagatccagagcctggggggttgctcaccagccagggtttcattaggctccccgtgctcggctacatctatcgggtgtcttctgtcagctctgacgagatctggctgtag

SEQ ID NO: 55982 - DNA, 921 bp, Artificial Sequence
  derived and/or modified sequence
atggcattaccacccggtccggctgcactgagacacacactgttactgctgcctgccctcctgagcagtggatggggggagctggagccccagatcgatgggcagacatgggctgagagagctctgcgcgagaatgagcgacacgccttcacgtgcagggtggcaggcggtcctggtacaccacgactagcctggtatctcgatggccagttgcaggaggcttctacaagcagactgctctcagtgggtggggaagcttttagcggcggaactagcactttcaccgtgacggcgcacagggctcagcatgaactgaattgtagcctgcaggatcctcgaagtggacgctctgctaatgcttccgtcatacttaacgtgcagttcaaacccgagatcgcacaggtgggtgccaaataccaggaggcacagggtcccggactcttggtggtgctgttcgccttagtgagagctaaccccccagccaacgtgacctggatcgaccaggacggtccagtcacagttaatacgtctgattttctcgtcctggacgctcagaattacccatggctgactaaccacaccgtgcagttgcagctgagatcgctggcccataacttatccgtggtggccactaacgacgtgggcgtgacctccgcctcactcccggctcccggaccaagtcgacatccctccctgattagcagcgactctaacaacctgaagttgaataacgtgcgtttacctcgagagaacatgtcactgcccagcaacttacagctgaacgacctgacccccgactctagagttaagccagccgaccggcaaatggctcagaacaactcccgaccggagctgctggatccagaaccaggcggactcttgactagccaggggagaaggaatcaagataaagacgcgtag

SEQ ID NO: 55983 - DNA, 810 bp, Artificial Sequence
  derived and/or modified sequence
atggcactgccgcctggcccagccgctctcaggcatacgcttctcctgctgcccgcactgttgagcagtggatggggggagctagagccacagatcgatgggcagacatgggctgagagggcactccgtgaaaacgagcggcacgcatttacgtgtagggtcgctggaggcccaggtacgccaaggcttgcgtggtacctcgatggccaactccaagaagcctcgacctctaggctgttgagcgttggaggtgaagcctttagcggcggaacctccacatttaccgtgaccgcccatcgcgctcagcacgagttgaactgttctctgcaagatccaagatccggcaggtctgccaacgcctctgtaatcttaaacgtgcaatggttactggctacccgagtggaggtccccctgctggggatcgtggtggcagcaggactcgcccttggtacccttgttgggttctcaacactagtagcttgtcttgtctgtcggaaagagaaaaaaacaaagggcccaagtcggcatcccagcctcataagcagtgactcaaacaacttaaaactgaacaatgtgcggctcccccgtgagaatatgtcactcccatctaacctgcagttgaatgatcttacgccagattcacgggcagttaagccggctgataggcagatggcgcagaacaactctcggccagagttactcgatcccgaacccggaggcctgctgacttcacaggggttcattcgtctgcccgtgctggggtacatttatcgggtgtcttcagttagcagcgacgagatctggttgtag

SEQ ID NO: 55984 - DNA, 2228 bp, Artificial Sequence
  derived and/or modified sequence
cggccgcccacctgccgggtaagggcccctcgggcccgtggtcgggcatcgattggccccgcctggcgcagcccccgcccctgcagcggactgcggtgctcatcagacctgagcagttgctccggcggcgctcggggagggagccagcagcctagggcctaggcccgggccaccatggcgctgcctccaggcccagccgccctccggcacacactgctgctcctgccagcccttctgagctcaggttggggggagttggagccacaaatagatggtcagacctgggctgagcgggcacttcgggagaatgaacgccacgccttcacctgccgggtggcaggggggcctggcacccccagattggcctggtatctggatggacagctgcaggaggccagcacctcaagactgctgagcgtgggaggggaggccttctctggaggcaccagcaccttcactgtcactgcccatcgggcccagcatgagctcaactgctctctgcaggaccccagaagtggccgatcagccaacgcctctgtcatccttaatgtgcaattcaagccagagattgcccaagtcggcgccaagtaccaggaagctcagggcccaggcctcctggttgtcctgtttgccctggtgcgtgccaacccgccggccaatgtcacctggatcgaccaggatgggccagtgactgtcaacacctctgacttcctggtgctggatgcgcagaactacccctggctcaccaaccacacggtgcagctgcagctccgcagcctggcacacaacctctcggtggtggccaccaatgacgtgggtgtcaccagtgcgtcgcttccagccccaggcccctcccggcacccatctctgatatcaagtgactccaacaacctaaaactcaacaacgtgcgcctgccacgggagaacatgtccctcccgtccaaccttcagctcaatgacctcactccagattccagagtgaaaccagcagaccggcagatggctcagaacaacagccggccagagcttctggacccggagcccggcggcctcctcaccagccaaggaagaagaaatcaggacaaagacgcataacagagggaagaccatgggaagacacagaagatggccaagaagagacccctcagaagaaatcaatcttggtggggcgtggtggcttcacgcctgtaataccagcactgtgggaggttgaggtgggcagatcgcctgagcctaggagttcgagaccagcctgggcaacatggtgaaattccatctctacaaaaaaattagccgggtgtggtgttgagtatctgtagtcccagctacttgggaggctggggtgggaggactgcttgagtccagcaggttgaggctgcagtgagctgagattgagctactgcactccagcctgggcatagagtaataccctgtaaaaaaaaaggaaggaagggagggagggaatcaaccatgccaacaaattgatcttggactactactggactactagcctccagaactatgaaataatacatttctgatgtctaagccactcagtctatggtactttgttatggcagcctagcaaaataatacaacatgctattttttcccccgatcagtatggaattggtcatatgttttataggtaaaatacactgccatactcttttcctgtgggaatctgtgaaaaagaaactgataccaagttatgggcaagtattaacagttatatatgcattacttggtgttataatgcctaatgattccaggacaccatatgaacagagaaaatgggcatgacatctaactcaggtaacaggctctggatctaaacaagtcacagtgtgaagtttttaaactactggtttcttaaaacttttctctttttacaaaaaacagagtacatatagttctgcaacttgctgcaatttgcttttttcatttaacaacatatcactgatatttcttcatattagagcaaaataaggccaaataatattccattgcatagtatttcactgaatggatgtactgcaacctagctattcaatcccctaatcagacaccttcccctcaactacagcttcaaaatgctctgaggaaagagactgtttccaaattctgtgtgtttacaatcaattcttcatatacaaaaaaaatctgtctttgtagagcttacattttagtagggaagaacaaaataagtaaataaagtctatggtatg

SEQ ID NO: 55985 - DNA, 935 bp, Artificial Sequence
  derived and/or modified sequence
agacctgagcagttgctccggcggcgctcggggagggagccagcagcctagggcctaggcccgggccaccatggcgctgcctccaggcccagccgccctccggcacacactgctgctcctgccagcccttctgagctcaggttggggggagttggagccacaaatagatggtcagacctgggctgagcgggcacttcgggagaatgaacgccacgccttcacctgccgggtggcaggggggcctggcacccccagattggcctggtatctggatggacagctgcaggaggccagcacctcaagactgctgagcgtgggaggggaggccttctctggaggcaccagcaccttcactgtcactgcccatcgggcccagcatgagctcaactgctctctgcaggaccccagaagtggccgatcagccaacgcctctgtcatccttaatgtgcaatggcttctggctacccgggtggaagtgccactgctgggcattgttgtggctgctgggcttgcactgggcaccctcgtggggttcagcaccttggtggcctgcctggtctgcagaaaagagaagaaaaccaaaggcccctcccggcacccatctctgatatcaagtgactccaacaacctaaaactcaacaacgtgcgcctgccacgggagaacatgtccctcccgtccaaccttcagctcaatgacctcactccagattccagagcagtgaaaccagcagaccggcagatggctcagaacaacagccggccagagcttctggacccggagcccggcggcctcctcaccagccaaggtttcatccgcctcccagtgctgggctatatctatcgagtgtccagcgtgagcagtgatgagatctggctctgagccgagggcgagacaggagtattctcttggcctctggacaccctcccgttcctcc

SEQ ID NO: 55986 - protein, 355 aa, Artificial Sequence
  derived and/or modified sequence
MGVCGYLFLPWKCLVVVSLRLLFLVPTGVPVRSGDATFPKAMDNVTVRQGESATLRCTIDNRVTRVAWLNRSTILYAGNDKWCLDPRVVLLSNTQTQYSIEIQNVDVYDEGPYTCSVQTDNHPKTSRVHLIVQVSPKIVEISSDISINEGNNISLTCIATGRPEPTVTWRHISPKAVGFVSEDEYLEIQGITREQSGDYECSASNDVAAPVVRRVKVTVNYPPYISEAKGTGVPVGQKGTLQCEASAVPSAEFQWYKDDKRLIEGKKGVKVENRPFLSKLIFFNVSEHDYGNYTCVASNKLGHTNASIMLFEVKTTALTPWKGPGAVSEVSNGTSRRAGCVWLLPLLVLHLLLKF

SEQ ID NO: 55987 - DNA, 1068 bp, Artificial Sequence
  derived and/or modified sequence
atgggggtgtgtgggtaccttttcctgccttggaaatgcttggtggtggttagcctacgcttgttatttttggtgcctacaggggttcccgtacggtcaggggacgcaacttttccaaaagcaatggataacgtgacagttcggcagggcgagtctgctacactgagatgcacaattgataaccgcgtgacccgcgtcgcctggctaaataggtcgactatactctatgctgggaatgacaagtggtgccttgatccccgcgtggtccttttaagtaacacacagacccagtacagcatcgaaatccagaatgtggatgtgtatgatgaagggccttacacttgtagcgttcagacggacaaccatcctaaaacctcacgcgtgcatctgattgtccaggtcagccctaagatcgtcgaaatcagcagtgacatatcaatcaatgagggaaacaatattagcctgacttgtattgcgactggtcgtcctgaacctaccgtcacttggcgccatattagccctaaggctgttggcttcgtaagcgaggatgagtatctggaaatccagggtataactagggagcagagcggggactatgagtgttcagcaagtaacgacgtggccgccccagtggtacgaagggtcaaagttacagtgaactacccaccatatatatcagaagcaaagggtactggcgtgccagtgggacaaaagggaactctccagtgcgaagcgagtgccgtcccatccgccgagttccaatggtacaaggacgataaacggttaattgagggtaagaaaggagtgaaggttgagaaccgcccgttcctgagtaagttgatctttttcaatgtatcagaacacgactatggcaactacacctgtgtggcttctaacaaactgggccatacaaacgcatctattatgctgttcgaagtgaagaccaccgcactgaccccatggaagggacccggtgcagtcagcgaagtcagtaatggcacaagtagacgggccggttgtgtctggctccttcccctgctggtgctgcatctcttgctgaaattctag

SEQ ID NO: 55988 - DNA, 1068 bp, Artificial Sequence
  derived and/or modified sequence
atgggcgtgtgtggctacctgttcctgccctggaagtgcctggtggtggtgtccctgcggctgctcttcctggtgcccactggagtgcctgtgcgctctggagatgccaccttccccaaggccatggacaacgtgacagtgcggcagggcgagagcgccaccctgcgctgcaccatcgacaacagagtgaccagggtggcctggctgaacagaagcaccatcctgtatgctggaaatgacaagtggtgcctggacccccgggtggtgctgctgagcaacacccagacccagtacagcattgagatccagaatgtggatgtgtatgatgagggcccctacacctgcagcgtgcagacagacaaccaccccaagaccagccgggtgcacctgattgtgcaggtgagccccaagatcgtggagatcagcagtgacatcagcatcaatgaaggcaacaacatcagcctgacctgcatcgccaccggccggcctgagcccaccgtgacctggaggcacatcagccccaaggctgtgggctttgtgtctgaagatgagtacctggagatccagggcatcacccgggagcagagcggggactatgagtgcagcgccagcaatgatgtggccgcccctgtggtgagaagagtgaaggtgacagtgaactacccaccctacatcagcgaggccaagggcactggagtgcctgtgggccagaagggcaccctgcagtgtgaggccagcgctgtgcccagcgctgagttccagtggtacaaggatgacaagaggctgattgagggcaagaagggcgtgaaggtggagaaccggcccttcctgagcaagctgatcttcttcaacgtgtctgaacatgactatggcaactacacctgtgtggccagcaacaagctgggccacaccaatgccagcatcatgctgtttgaggtgaagaccacagccctgaccccctggaagggccctggagctgtgtctgaggtgtccaatggcaccagccggcgggccggctgtgtgtggctgctgcccctgctggtgctgcacctgctgctgaagttctag

SEQ ID NO: 55989 - DNA, 1068 bp, Artificial Sequence
  derived and/or modified sequence
atgggcgtgtgcggctacctgttcctgccctggaagtgcctggtggtcgtttccctgagacttctgttcctggtgcccacgggggtcccagtgagaagcggggatgctacattccccaaagctatggacaatgttaccgtgcgccagggtgaatctgccactctccgatgcacgatcgataatcgcgtaaccagggtcgcctggttgaataggagcacaatcctctatgccggaaatgacaaatggtgcttagaccctagggttgtccttttgtcaaatactcaaactcagtattctattgaaatccagaacgtcgatgtctatgacgaaggaccatatacctgttccgtccagactgataaccatcccaagaccagccgcgtgcaccttatagtgcaggttagcccaaagatcgtcgaaatctcgtccgatatctccattaacgagggtaacaatatttcccttacttgcatcgctacagggaggcccgaaccgactgtgacctggagacatatctcgccaaaagcagtaggctttgtttctgaggacgagtatctggaaatccagggaataactagagaacaatctggggactacgaatgcagcgcgagtaatgacgtggccgcccccgtagtgcggagggtcaaagtcacggtaaactatccgccctacattagcgaggcaaagggaacaggcgtgccggtggggcagaaagggactctccagtgtgaggcgagcgcagtgccctctgccgagtttcagtggtataaggatgataagcgtttgattgaaggcaaaaagggcgtgaaggtggagaatcgtccctttctgtccaagctcatcttcttcaacgtgtcagaacatgactatggtaattacacttgcgtggcgtcaaataagttgggccataccaatgctagtatcatgctatttgaggtgaaaaccaccgctctgacaccatggaagggacccggagcagtatccgaggtcagtaacggcacatcgcgacgtgccggctgtgtctggctcctcccactgctcgtcctccatctgttgctgaaattctag

SEQ ID NO: 55990 - DNA, 1607 bp, Artificial Sequence
  derived and/or modified sequence
ggaagttgtggctgtcgagaatgggggtctgtgggtacctgttcctgccctggaagtgcctcgtggtcgtgtctctcaggctgctgttccttgtacccacaggagtgcccgtgcgcagcggagatgccaccttccccaaagctatggacaacgtgacggtccggcagggggagagcgccaccctcaggtgcactattgacaaccgggtcacccgggtggcctggctaaaccgcagcaccatcctctatgctgggaatgacaagtggtgcctggatcctcgcgtggtccttctgagcaacacccaaacgcagtacagcatcgagatccagaacgtggatgtgtatgacgagggcccttacacctgctcggtgcagacagacaaccacccaaagacctctagggtccacctcattgtgcaagtatctcccaaaattgtagagatttcttcagatatctccattaatgaagggaacaatattagcctcacctgcatagcaactggtagaccagagcctacggttacttggagacacatctctcccaaagcggttggctttgtgagtgaagacgaatacttggaaattcagggcatcaccagggagcagtcaggggactacgagtgcagtgcctccaatgacgtggccgcgcccgtggtacggagagtaaaggtcaccgtgaactatccaccatacatttcagaagccaagggtacaggtgtccccgtgggacaaaaggggacactgcagtgtgaagcctcagcagtcccctcagcagaattccagtggtacaaggatgacaaaagactgattgaaggaaagaaaggggtgaaagtggaaaacagacctttcctctcaaaactcatcttcttcaatgtctctgaacatgactatgggaactacacttgcgtggcctccaacaagctgggccacaccaatgccagcatcatgctatttgaagtgaaaactacagccctgaccccttggaaaggtccaggcgccgtcagcgaggtgagcaacggcacgtcgaggagggcaggctgcgtctggctgctgcctcttctggtcttgcacctgcttctcaaattttgatgtgagtgccacttccccacccgggaaaggctgccgccaccaccaccaccaacacaacagcaatggcaacaccgacagcaaccaatcagatatatacaaatgaaattagaagaaacacagcctcatgggacagaaatttgagggaggggaacaaagaatactttggggggaaaaaagttttaaaaaagaaattgaaaattgccttgcagatatttaggtacaatggagttttcttttcccaaacgggaagaacacagcacacccggcttggacccactgcaagctgcatcgtgcaacctctttggtgccagtgtgggcaagggctcagcctctctgcccacagagtgcccccacgtggaacattctggagctggccatcccaaattcaatcagtccatagagacgaacagaatgagaccttccggcccaagcgtggcgctgcgggcactttggtagactgtgccaccacggcgtgtgttgtgaaacgtgaaataaaaagagcaagaaagaaaaaggaaa

SEQ ID NO: 55991 - DNA, 1068 bp, Artificial Sequence
  derived and/or modified sequence
atgggagtgtgcgggtacctgttcctcccctggaaatgcctagtggtagtctcactgcggctcctgtttctggtgcctactggagtccctgttagatctggcgatgcgactttcccaaaagcaatggataacgtgacagtgcgtcagggagagagtgctacccttcgctgcacaatcgataaccgcgtaactagggtcgcttggttaaacaggagtacaatactgtacgcaggtaacgataagtggtgtctagacccacgtgttgttctcctttccaacacccagacgcaatatagcatagagatacagaatgtggacgtctacgacgaagggccttacacgtgttcagtccagactgataaccaccccaaaacttcacgcgtacatctcatcgtgcaggtgtcgcctaagatcgtggaaatttcctcagatatatccattaatgagggcaacaacataagcctgacttgcatagccaccggcagacccgaacctaccgtgacatggagacacatctctcccaaagcagtggggtttgtctccgaagatgaatacctggaaatacaagggattactcgcgaacagagtggagactatgaatgctcagcctctaatgacgtggccgcaccagttgtaagaagagtcaaggtgacagtgaactatccgccttatatcagtgaagctaaaggaacgggtgtgcctgtcggccagaaaggtaccctgcaatgtgaagcatccgctgtgccatctgcggaatttcagtggtataaggatgataagcgcctgattgagggcaaaaaaggggttaaggtcgagaatcggcctttcctctcaaagcttatattctttaatgtgtcggagcacgattacggaaactacacctgcgtggcctctaataagttaggccacaccaatgcctcaatcatgttgttcgaggtgaaaaccacagccttgactccctggaaagggcctggcgcagtgagtgaagtttctaacggtacctcccgccgagcaggatgcgtgtggctgctccctctgctggtgctacacctgttgctcaagttctag

SEQ ID NO: 55992 - DNA, 1068 bp, Artificial Sequence
  derived and/or modified sequence
atgggcgtgtgcggctacctgttcctgccctggaagtgcctggtggtggtgagcctgagactgctgttcctggtgcccaccggcgtgcccgtgagaagcggcgacgccaccttccccaaggccatggacaacgtgaccgtgagacagggcgagagcgccaccctgagatgcaccatcgacaacagagtgaccagagtggcctggctgaacagaagcaccatcctgtacgccggcaacgacaagtggtgcctggaccccagagtggtgctgctgagcaacacccagacccagtacagcatcgagatccagaacgtggacgtgtacgacgagggcccctacacctgcagcgtgcagaccgacaaccaccccaagaccagcagagtgcacctgatcgtgcaggtgagccccaagatcgtggagatcagcagcgacatcagcatcaacgagggcaacaacatcagcctgacctgcatcgccaccggcagacccgagcccaccgtgacctggagacacatcagccccaaggccgtgggcttcgtgagcgaggacgagtacctggagatccagggcatcaccagagagcagagcggcgactacgagtgcagcgccagcaacgacgtggccgcccccgtggtgagaagagtgaaggtgaccgtgaactaccccccctacatcagcgaggccaagggcaccggcgtgcccgtgggccagaagggcaccctgcagtgcgaggccagcgccgtgcccagcgccgagttccagtggtacaaggacgacaagagactgatcgagggcaagaagggcgtgaaggtggagaacagacccttcctgagcaagctgatcttcttcaacgtgagcgagcacgactacggcaactacacctgcgtggccagcaacaagctgggccacaccaacgccagcatcatgctgttcgaggtgaagaccaccgccctgaccccctggaagggccccggcgccgtgagcgaggtgagcaacggcaccagcagaagagccggctgcgtgtggctgctgcccctgctggtgctgcacctgctgctgaagttctag

SEQ ID NO: 55993 - protein, 316 aa, Artificial Sequence
  derived and/or modified sequence
MGVCGYLFLPWKCLVVVSLRLLFLVPTGVPVRSGDATFPKAMDNVTVRQGESATLRCTIDNRVTRVAWLNRSTILYAGNDKWCLDPRVVLLSNTQTQYSIEIQNVDVYDEGPYTCSVQTDNHPKTSRVHLIVQVSPKIVEISSDISINEGNNISLTCIATGRPEPTVTWRHISPKAVGFVSEDEYLEIQGITREQSGDYECSASNDVAAPVVRRVKVTVNYPPYISEAKGTGVPVGQKGTLQCEASAVPSAEFQWYKDDKRLIEGKKGVKVENRPFLSKLIFFNVSEHDYGNYTCVASNKLGHTNASIMLFGETVL

SEQ ID NO: 55994 - DNA, 951 bp, Artificial Sequence
  derived and/or modified sequence
atgggcgtgtgcggttacttgtttctgccatggaagtgtcttgtagtggttagcctgcgcttactgtttttagtgcccacaggagtgccagtgaggagcggggacgccaccttccctaaagccatggataatgtcaccgttcgccagggtgaaagcgccacactccggtgtaccattgataatcgcgtgacccgggtggcgtggctcaaccgtagcacaatcctatatgccgggaacgacaaatggtgtcttgatcctcgcgtcgtgctgctgagtaatacgcaaactcagtacagtatcgaaatccagaatgtggacgtgtacgacgaggggccgtatacctgttctgtccagactgataaccacccaaaaacttctcgtgtccacctcattgtccaggtgagccccaagatagtggagatttcttccgacatctcaatcaacgagggcaataatatttcgttgacatgcatcgctaccgggcgacccgagcctactgtgacttggcgccacatatcaccgaaggctgtgggtttcgtatctgaagacgaatacctagagatccaaggcatcacccgcgaacaaagtggtgactatgagtgttccgcttcaaacgacgtggccgcacctgtggtaagaagggtgaaggtgaccgtgaactaccccccatatatatctgaagccaagggcacaggagtcccggtgggacagaagggcaccctccagtgtgaggcctccgccgttccatccgctgaatttcaatggtacaaggatgacaagcggcttattgaagggaaaaagggtgtgaaggtagagaaccgccctttcttgagcaagttaatcttcttcaacgtcagtgaacacgactatggcaattacacgtgtgtcgcgagcaacaagctaggacacacaaatgcaagcattatgctttttggcgaaacggtgctgtag

SEQ ID NO: 55995 - DNA, 951 bp, Artificial Sequence
  derived and/or modified sequence
atgggcgtgtgtggctacctgttcctgccctggaagtgcctggtggtggtgtccctgcggctgctcttcctggtgcccactggagtgcctgtgcgctctggagatgccaccttccccaaggccatggacaacgtgacagtgcggcagggcgagagcgccaccctgcgctgcaccatcgacaacagagtgaccagggtggcctggctgaacagaagcaccatcctgtatgctggaaatgacaagtggtgcctggacccccgggtggtgctgctgagcaacacccagacccagtacagcattgagatccagaatgtggatgtgtatgatgagggcccctacacctgcagcgtgcagacagacaaccaccccaagaccagccgggtgcacctgattgtgcaggtgagccccaagatcgtggagatcagcagtgacatcagcatcaatgaaggcaacaacatcagcctgacctgcatcgccaccggccggcctgagcccaccgtgacctggaggcacatcagccccaaggctgtgggctttgtgtctgaagatgagtacctggagatccagggcatcacccgggagcagagcggggactatgagtgcagcgccagcaatgatgtggccgcccctgtggtgagaagagtgaaggtgacagtgaactacccaccctacatcagcgaggccaagggcactggagtgcctgtgggccagaagggcaccctgcagtgtgaggccagcgctgtgcccagcgctgagttccagtggtacaaggatgacaagaggctgattgagggcaagaagggcgtgaaggtggagaaccggcccttcctgagcaagctgatcttcttcaacgtgtctgaacatgactatggcaactacacctgtgtggccagcaacaagctgggccacaccaatgccagcatcatgctgtttggagagaccgtgctgtag

SEQ ID NO: 55996 - DNA, 951 bp, Artificial Sequence
  derived and/or modified sequence
atgggcgtgtgcggctacctgttcctgccctggaagtgcctggtggtagtgtctctcagactgttgttcctagtgcctacaggggtacctgtgaggtccggggatgccactttcccaaaggcaatggacaacgtgacagtacggcagggcgaatccgctacactacggtgcactatagacaaccgagtcacccgtgttgcctggttgaatcgatcgacaatcctgtatgccggcaacgataaatggtgcctggaccccagagttgtgctgctcagtaatacccaaacgcaatattcaattgaaatacaaaacgtggatgtgtacgatgagggaccttatacctgttccgttcagactgacaaccacccaaaaacctcccgggtccacttaatcgtccaagtgtcgcctaagatagtcgagatatcgtccgacatttctatcaacgaggggaataacattagcttgacctgtattgctaccggccgacccgagcctactgtcacatggagacacatcagccctaaagccgtaggtttcgtgtccgaagatgagtaccttgagattcagggcatcactcgcgagcagtcaggcgactacgaatgctcggctagcaatgacgtggccgcccccgttgtgcgcagggttaaggtcactgtaaattatccaccttacataagtgaagctaagggcactggggtacccgtcggccagaagggaacactccagtgcgaggccagcgcagtgccgtccgcggaatttcagtggtacaaagacgacaaaagattaatcgagggcaagaagggagtaaaagtcgagaatcggcctttcttaagtaaactcatcttcttcaatgtatccgaacacgactacggaaactatacatgtgttgccagcaacaagctggggcacacgaatgcctctattatgttgtttggagaaactgtcctgtag

SEQ ID NO: 55997 - DNA, 1315 bp, Artificial Sequence
  derived and/or modified sequence
tgtggctgtcgagaatgggggtctgtgggtacctgttcctgccctggaagtgcctcgtggtcgtgtctctcaggctgctgttccttgtacccacaggagtgcccgtgcgcagcggagatgccaccttccccaaagctatggacaacgtgacggtccggcagggggagagcgccaccctcaggtgcactattgacaaccgggtcacccgggtggcctggctaaaccgcagcaccatcctctatgctgggaatgacaagtggtgcctggatcctcgcgtggtccttctgagcaacacccaaacgcagtacagcatcgagatccagaacgtggatgtgtatgacgagggcccttacacctgctcggtgcagacagacaaccacccaaagacctctagggtccacctcattgtgcaagtatctcccaaaattgtagagatttcttcagatatctccattaatgaagggaacaatattagcctcacctgcatagcaactggtagaccagagcctacggttacttggagacacatctctcccaaagcggttggctttgtgagtgaagacgaatacttggaaattcagggcatcaccagggagcagtcaggggactacgagtgcagtgcctccaatgacgtggccgcgcccgtggtacggagagtaaaggtcaccgtgaactatccaccatacatttcagaagccaagggtacaggtgtccccgtgggacaaaaggggacactgcagtgtgaagcctcagcagtcccctcagcagaattccagtggtacaaggatgacaaaagactgattgaaggaaagaaaggggtgaaagtggaaaacagacctttcctctcaaaactcatcttcttcaatgtctctgaacatgactatgggaactacacttgcgtggcctccaacaagctgggccacaccaatgccagcatcatgctatttggtgagactgtgctctgagctgggcaagaagaggggagagggtgcagaacgggagagctgggtgggagggcccctcaaggccagggtcagaggttagcagggtatcagtggacatggagagggaggaaaaaaaagagagagacacagaaagaaatggagagagagggacagagagacagggaggaggcagacagaaagagaaagaacaagagatacagtttacatgtatacaaagtagtatatgtatagtacatgtataaaagtagatctcagaagtgggaaaaggaaaatgaaaaagaatgttcatgtttcattctataatggaaaagatcccgagataggagaaaaatactttggaatgccaaaaa

SEQ ID NO: 55998 - DNA, 951 bp, Artificial Sequence
  derived and/or modified sequence
atgggggtttgtgggtatttgttcctgccgtggaagtgccttgtcgtcgtgagcctgagactgcttttcctggttcccacaggggtcccagtgaggagcggagacgctacattcccaaaggccatggataacgtgacagttcgccaaggagagtccgccaccctgcgctgcaccatcgataatagggtgactagggtcgcatggctgaacagatcaacgatactgtacgctggcaatgataagtggtgtctggaccctcgtgtggttcttctttcaaatacacaaacacagtactcgatcgaaattcagaacgtggacgtctacgacgaaggcccttacacctgctctgtgcagactgataatcaccccaaaacatcacgcgtccacctgatcgtgcaagtcagccccaagatcgtagagatcagtagcgatatttccatcaatgaggggaataatatttctttgacttgcatagctaccggcaggcccgagccgaccgtgacttggagacacatcagccctaaggctgtgggatttgtgtctgaagacgagtatttagagatccaaggcatcactcgcgaacagtcaggagattatgaatgctcagctagcaatgacgtggctgctcctgtggtcaggcgagtcaaggtaactgttaactacccgccttacatcagcgaggcgaaaggcacgggagtgcctgttggacaaaaaggcaccctccagtgcgaggccagcgcggtcccctctgcagaatttcaatggtacaaagatgacaagcgtctcatcgagggtaagaagggcgtcaaagtggagaatcggcctttcctgtcaaaactaatctttttcaatgtcagcgagcatgattacggtaattacacatgtgtcgcatcgaataagctgggccacactaacgcatcgatcatgctgtttggtgagactgtcctttag

SEQ ID NO: 55999 - DNA, 951 bp, Artificial Sequence
  derived and/or modified sequence
atgggcgtgtgcggctacctgttcctgccctggaagtgcctggtggtggtgagcctgagactgctgttcctggtgcccaccggcgtgcccgtgagaagcggcgacgccaccttccccaaggccatggacaacgtgaccgtgagacagggcgagagcgccaccctgagatgcaccatcgacaacagagtgaccagagtggcctggctgaacagaagcaccatcctgtacgccggcaacgacaagtggtgcctggaccccagagtggtgctgctgagcaacacccagacccagtacagcatcgagatccagaacgtggacgtgtacgacgagggcccctacacctgcagcgtgcagaccgacaaccaccccaagaccagcagagtgcacctgatcgtgcaggtgagccccaagatcgtggagatcagcagcgacatcagcatcaacgagggcaacaacatcagcctgacctgcatcgccaccggcagacccgagcccaccgtgacctggagacacatcagccccaaggccgtgggcttcgtgagcgaggacgagtacctggagatccagggcatcaccagagagcagagcggcgactacgagtgcagcgccagcaacgacgtggccgcccccgtggtgagaagagtgaaggtgaccgtgaactaccccccctacatcagcgaggccaagggcaccggcgtgcccgtgggccagaagggcaccctgcagtgcgaggccagcgccgtgcccagcgccgagttccagtggtacaaggacgacaagagactgatcgagggcaagaagggcgtgaaggtggagaacagacccttcctgagcaagctgatcttcttcaacgtgagcgagcacgactacggcaactacacctgcgtggccagcaacaagctgggccacaccaacgccagcatcatgctgttcggcgagaccgtgctgtag

SEQ ID NO: 56000 - protein, 1606 aa, Artificial Sequence
  derived and/or modified sequence
MVVFINAKIKSLIKLFKKKTVSNLDEESRWTVHYTAPWHQQENVFLPTTRPPCVEDLHRQAKLNLKSVLRECDKLRHDGYRSSQYYSQGPTFAANASPFCDDYQDEDEETDQKCSLSSSEEERFISIRRPKTPASSDFSDLNTQTNWTKSLPLPTPEEKMRQQAQTVQADVVPINITGENFDRQASLRRSLIYTDTLVRRPKKVKRRKTITGVPDNIQKELASGTGQDDADGHSVYTPDHYSTLGRFNSCRSAGQRSETRDSSCQTEDVKVVPPSMRRIRAQKGQGIAAQMGHFSGSSGNMSVLSDSAGIVFPSRLDSDAGFHSLPRSGARANIQSLEPRLGALGPAGDMNGTFLYQRGHPQADENLGHLGGASGTGTLLRPKSQELRHFESENIMSPACVVSPHATYSTSIIPNATLSSSSEVIAIPTAQSAGQRESKSSGSSHARIKSRDHLISRHAVKGDPQSPGRHWNEGHATILSQDLDPHSPGEPALLSLCDSAVPLNAPANRENGSQAMPYNCRNNLAFPAHPQDVDGKSESSYSGGGGHSSSEPWEYKSSGNGRASPLKPHLATPGYSTPTSNMSSCSLDQTSNKEDAGSLYSEDHDGYCASVHTDSGHGSGNLCNSSDGFGNPRHSVINVFVGRAQKNQGDRSNYQDKSLSRNISLKKAKKPPLPPSRTDSLRRIPKKSSQCNGQVLNESLIATLQHSLQLSLPGKSGSSPSQSPCSDLEEPWLPRSRSQSTVSAGSSMTSATTPNVYSLCGATPSQSDTSSVKSEYTDPWGYYIDYTGMQEDPGNPAGGCSTSSGVPTGNGPVRHVQEGSRATMPQVPGGSVKPKIMSPEKSHRVISPSSGYSSQSNTPTALTPVPVFLKSVSPANGKGKPKPKVPERKSSLISSVSISSSSTSLSSSTSTEGSGTMKKLDPAVGSPPAPPPPPVPSPPFPCPADRSPFLPPPPPVTDCSQGSPLPHSPVFPPPPPEALIPFCSPPDWCLSPPRPALSPILPDSPVSLPLPPPLLPSSEPPPAPPLDPKFMKDTRPPFTNSGQPESSRGSLRPPSTKEETSRPPMPLITTEALQMVQLRPVRKNSGAEAAQLSERTAQEQRTPVAPQYHLKPSAFLKSRNSTNEMESESQPASVTSSLPTPAKSSSQGDHGSAAERGGPVSRSPGAPSAGEAEARPSPSTTPLPDSSPSRKPPPISKKPKLFLVVPPPQKDFAVEPAENVSEALRAVPSPTTGEEGSVHSREAKESSAAQAGSHATHPGTSVLEGGAAGSMSPSRVEANVPMVQPDVSPAPKQEEPAENSADTGGDGESCLSQQDGAAGVPETNAAGSSSEACDFLKEDGNDEVMTPSRPRTTEDLFAAIHRSKRKVLGRRDSDDDHSRNHSPSPPVTPTGAAPSLASPKQVGSIQRSIRKSSTSSDNFKALLLKKGSRSDTSARMSAAEMLKNTDPRFQRSRSEPSPDAPESPSSCSPSKNRRAQEEWAKNEGLMPRSLSFSGPRYGRSRTPPSAASSRYSMRNRIQSSPMTVISEGEGEAVEPVDSIARGALGAAEGCSLDGLAREEMDEGGLLCGEGPAASLQPQAPGPVDGTASAEGREPSPQCGGSLSEES

SEQ ID NO: 56001 - DNA, 4821 bp, Artificial Sequence
  derived and/or modified sequence
atggtggtgttcatcaacgccaagatcaagagcctgatcaagctgttcaagaagaagaccgtgagcaacctggacgaggagagcagatggaccgtgcactacaccgccccctggcaccagcaggagaacgtgttcctgcccaccaccagacccccctgcgtggaggacctgcacagacaggccaagctgaacctgaagagcgtgctgagagagtgcgacaagctgagacacgacggctacagaagcagccagtactacagccagggccccaccttcgccgccaacgccagccccttctgcgacgactaccaggacgaggacgaggagaccgaccagaagtgcagcctgagcagcagcgaggaggagagattcatcagcatcagaagacccaagacccccgccagcagcgacttcagcgacctgaacacccagaccaactggaccaagagcctgcccctgcccacccccgaggagaagatgagacagcaggcccagaccgtgcaggccgacgtggtgcccatcaacatcaccggcgagaacttcgacagacaggccagcctgagaagaagcctgatctacaccgacaccctggtgagaagacccaagaaggtgaagagaagaaagaccatcaccggcgtgcccgacaacatccagaaggagctggccagcggcaccggccaggacgacgccgacggccacagcgtgtacacccccgaccactacagcaccctgggcagattcaacagctgcagaagcgccggccagagaagcgagaccagagacagcagctgccagaccgaggacgtgaaggtggtgccccccagcatgagaagaatcagagcccagaagggccagggcatcgccgcccagatgggccacttcagcggcagcagcggcaacatgagcgtgctgagcgacagcgccggcatcgtgttccccagcagactggacagcgacgccggcttccacagcctgcccagaagcggcgccagagccaacatccagagcctggagcccagactgggcgccctgggccccgccggcgacatgaacggcaccttcctgtaccagagaggccacccccaggccgacgagaacctgggccacctgggcggcgccagcggcaccggcaccctgctgagacccaagagccaggagctgagacacttcgagagcgagaacatcatgagccccgcctgcgtggtgagcccccacgccacctacagcaccagcatcatccccaacgccaccctgagcagcagcagcgaggtgatcgccatccccaccgcccagagcgccggccagagagagagcaagagcagcggcagcagccacgccagaatcaagagcagagaccacctgatcagcagacacgccgtgaagggcgacccccagagccccggcagacactggaacgagggccacgccaccatcctgagccaggacctggacccccacagccccggcgagcccgccctgctgagcctgtgcgacagcgccgtgcccctgaacgcccccgccaacagagagaacggcagccaggccatgccctacaactgcagaaacaacctggccttccccgcccacccccaggacgtggacggcaagagcgagagcagctacagcggcggcggcggccacagcagcagcgagccctgggagtacaagagcagcggcaacggcagagccagccccctgaagccccacctggccacccccggctacagcacccccaccagcaacatgagcagctgcagcctggaccagaccagcaacaaggaggacgccggcagcctgtacagcgaggaccacgacggctactgcgccagcgtgcacaccgacagcggccacggcagcggcaacctgtgcaacagcagcgacggcttcggcaaccccagacacagcgtgatcaacgtgttcgtgggcagagcccagaagaaccagggcgacagaagcaactaccaggacaagagcctgagcagaaacatcagcctgaagaaggccaagaagccccccctgccccccagcagaaccgacagcctgagaagaatccccaagaagagcagccagtgcaacggccaggtgctgaacgagagcctgatcgccaccctgcagcacagcctgcagctgagcctgcccggcaagagcggcagcagccccagccagagcccctgcagcgacctggaggagccctggctgcccagaagcagaagccagagcaccgtgagcgccggcagcagcatgaccagcgccaccacccccaacgtgtacagcctgtgcggcgccacccccagccagagcgacaccagcagcgtgaagagcgagtacaccgacccctggggctactacatcgactacaccggcatgcaggaggaccccggcaaccccgccggcggctgcagcaccagcagcggcgtgcccaccggcaacggccccgtgagacacgtgcaggagggcagcagagccaccatgccccaggtgcccggcggcagcgtgaagcccaagatcatgagccccgagaagagccacagagtgatcagccccagcagcggctacagcagccagagcaacacccccaccgccctgacccccgtgcccgtgttcctgaagagcgtgagccccgccaacggcaagggcaagcccaagcccaaggtgcccgagagaaagagcagcctgatcagcagcgtgagcatcagcagcagcagcaccagcctgagcagcagcaccagcaccgagggcagcggcaccatgaagaagctggaccccgccgtgggcagcccccccgcccccccccccccccccgtgcccagcccccccttcccctgccccgccgacagaagccccttcctgcccccccccccccccgtgaccgactgcagccagggcagccccctgccccacagccccgtgttccccccccccccccccgaggccctgatccccttctgcagcccccccgactggtgcctgagcccccccagacccgccctgagccccatcctgcccgacagccccgtgagcctgcccctgcccccccccctgctgcccagcagcgagcccccccccgccccccccctggaccccaagttcatgaaggacaccagaccccccttcaccaacagcggccagcccgagagcagcagaggcagcctgagaccccccagcaccaaggaggagaccagcagaccccccatgcccctgatcaccaccgaggccctgcagatggtgcagctgagacccgtgagaaagaacagcggcgccgaggccgcccagctgagcgagagaaccgcccaggagcagagaacccccgtggccccccagtaccacctgaagcccagcgccttcctgaagagcagaaacagcaccaacgagatggagagcgagagccagcccgccagcgtgaccagcagcctgcccacccccgccaagagcagcagccagggcgaccacggcagcgccgccgagagaggcggccccgtgagcagaagccccggcgcccccagcgccggcgaggccgaggccagacccagccccagcaccacccccctgcccgacagcagccccagcagaaagcccccccccatcagcaagaagcccaagctgttcctggtggtgccccccccccagaaggacttcgccgtggagcccgccgagaacgtgagcgaggccctgagagccgtgcccagccccaccaccggcgaggagggcagcgtgcacagcagagaggccaaggagagcagcgccgcccaggccggcagccacgccacccaccccggcaccagcgtgctggagggcggcgccgccggcagcatgagccccagcagagtggaggccaacgtgcccatggtgcagcccgacgtgagccccgcccccaagcaggaggagcccgccgagaacagcgccgacaccggcggcgacggcgagagctgcctgagccagcaggacggcgccgccggcgtgcccgagaccaacgccgccggcagcagcagcgaggcctgcgacttcctgaaggaggacggcaacgacgaggtgatgacccccagcagacccagaaccaccgaggacctgttcgccgccatccacagaagcaagagaaaggtgctgggcagaagagacagcgacgacgaccacagcagaaaccacagccccagcccccccgtgacccccaccggcgccgcccccagcctggccagccccaagcaggtgggcagcatccagagaagcatcagaaagagcagcaccagcagcgacaacttcaaggccctgctgctgaagaagggcagcagaagcgacaccagcgccagaatgagcgccgccgagatgctgaagaacaccgaccccagattccagagaagcagaagcgagcccagccccgacgcccccgagagccccagcagctgcagccccagcaagaacagaagagcccaggaggagtgggccaagaacgagggcctgatgcccagaagcctgagcttcagcggccccagatacggcagaagcagaaccccccccagcgccgccagcagcagatacagcatgagaaacagaatccagagcagccccatgaccgtgatcagcgagggcgagggcgaggccgtggagcccgtggacagcatcgccagaggcgccctgggcgccgccgagggctgcagcctggacggcctggccagagaggagatggacgagggcggcctgctgtgcggcgagggccccgccgccagcctgcagccccaggcccccggccccgtggacggcaccgccagcgccgagggcagagagcccagcccccagtgcggcggcagcctgagcgaggagagctag

SEQ ID NO: 56002 - DNA, 4821 bp, Artificial Sequence
  derived and/or modified sequence
atggtcgtatttatcaacgccaagattaaatccctgataaaattatttaaaaagaagactgtgagcaacctggacgaggagtcaagatggacggtccattatacggctccttggcaccagcaggagaatgtctttctgcccaccacccgccctccctgtgtagaagatttgcataggcaagcaaaattgaacctcaagagcgtcctgcgcgagtgcgacaagctgcgtcatgatggctaccggtcttcccaatactatagccaggggccaacattcgccgccaatgcaagccctttttgcgatgattaccaggatgaggacgaagaaactgaccaaaaatgcagcctgtcatccagtgaggaggagcggtttatctccatacgtcgaccaaaaactcctgcctcatcagacttctctgacctgaatacgcaaaccaactggactaaatctctgccactgccaactcctgaggagaaaatgcggcagcaagctcaaacagtgcaagcagacgtagtgcctattaatataacaggcgagaatttcgacagacaggcttccctcaggaggtcattgatctatacggatacccttgtgcgtcggcctaagaaagtaaagcggcgcaaaactataacaggcgtccctgataatattcagaaagagctggctagcgggacaggccaagatgatgctgatgggcactccgtctacactcctgatcactattctacgctggggcggttcaactcctgtaggtctgccggccaacggagcgagaccagagattccagctgccagactgaagatgtgaaggttgtgccccccagcatgcgacggattcgcgcgcagaaaggacagggcattgcagcccagatgggtcatttcagcggtagttccggaaatatgagcgtgctttctgacagcgctggaattgtgtttccttcacgcctggacagcgatgcaggttttcacagtctcccccggtcaggcgcccgggcaaacatacagtcattagagccccgactgggcgcactcggcccggcgggagacatgaatggtaccttcctgtatcagaggggtcatccccaggcagatgaaaatctggggcatctcggaggcgcttccggtacgggtaccctcctccggccaaaaagccaggagcttcggcactttgagtctgaaaacataatgagtccggcctgcgtggtctcaccgcacgcaacatatagtacctctatcattccaaatgccacactgtcctcttcaagcgaagtgattgctatcccaacagctcagtccgctggtcagcgggagtcgaagagctctgggtcctctcatgcacggataaaaagtcgagatcacctcatatcgcgccatgccgtaaaaggtgacccacagtctcccggacgccattggaatgagggtcacgccaccattctctcccaggacctagacccccactcacctggagagccggcgctgctgtcattgtgcgattctgcagtgccactcaacgcaccagccaatcgggagaatggctcacaggccatgccctacaattgccgcaacaacttggctttcccggctcacccacaggacgtcgacgggaaatctgagtccagctatagtgggggagggggccatagtagttcagaaccctgggagtataagtcctccggaaatggtcgcgcctccccacttaaaccgcacctggccacacccggatattcgacaccaacctccaacatgagctcatgctccctggaccaaaccagcaacaaagaagacgccggcagcctttactccgaggatcatgacggctactgtgctagcgtgcacactgattctggccatggctcgggtaacctctgtaacagtagtgatggcttcggcaacccccgacatagtgtgatcaacgtgttcgtgggtcgggcccagaagaatcaaggtgacaggtctaactaccaggacaagtctcttagcagaaatatatcgctcaagaaagcgaagaagccaccgctacccccatcgcggacagacagtttacgccggataccaaagaagtccagtcaatgtaatggccaggtactgaatgaaagtctgatcgcaaccttacagcactcactgcaactatccctgcctggaaagtcaggctcttctccttcgcagtctccgtgctcagacctagaggagccgtggcttcctaggagccgcagtcagagcaccgtgagcgccggatcatcaatgacgagtgccaccaccccgaacgtctattcactctgtggagccaccccctcccagagcgatactagctccgtgaagtcggaatataccgacccatggggatattatatcgactatacaggcatgcaagaagatcccggaaacccagccggaggctgtagcacctctagtggcgtccccaccggtaatggccccgtccgtcacgtccaggaaggctcaagggcaactatgccccaggtgccgggcggcagtgttaaaccaaaaataatgtccccagagaagtcacacagggtaatcagtccaagcagtggctatagctctcaaagcaatacacctaccgctttgacaccagtgcccgtgtttcttaagtcagtaagccctgcgaatggaaaaggcaagcccaagcccaaagtgccagaaaggaaaagctccctcatcagttccgtgtcaatcagttccagctcaacatcattgtcctcatctacctctacggaggggagtggcaccatgaaaaagcttgatccagcagtagggagccctccagccccaccaccgccaccagtacctagccccccttttccttgtcccgcggaccgctccccatttcttcctccaccccctcccgttacagactgctcccaggggtcccccttaccccatagcccagtgttccctccgcctccaccagaggccttgatccccttttgctcaccaccagactggtgcctgtctcctccacggccagctctctcacccatcttaccagattcccccgtgagcctgccgctgccccctccactgttacctagctcggaacccccccctgccccccctcttgatcctaaattcatgaaagatactcggcctccattcactaactccggacagccagagagttccagggggtcacttcgcccgcccagcacaaaagaagaaacctctaggccaccgatgccactcatcacaactgaggctctgcaaatggtgcaactgcgacccgtccgcaagaatagcggggccgaagctgcacagctgtccgaacgaactgcgcaggagcagcgcactcccgtagccccacagtaccacctgaagccgagtgctttccttaagagccgaaatagcaccaatgaaatggaaagcgaaagccagcctgcttctgtaacctcttctctgcccactccagcaaagtctagctcccagggtgaccatgggtccgccgccgaacgcggcggacccgtgtcccgctcaccaggtgctccttctgcaggggaagccgaggcaagaccctcaccttcgacaaccccacttccagattcaagcccaagccggaaaccccctcctatctcaaagaaaccgaagctgtttctggtggtccccccgccacagaaggacttcgcagtagaacccgcagaaaacgtctccgaggctctacgggctgtcccttccccaactaccggtgaagagggatctgtgcatagtcgcgaggccaaggaaagttcagctgcccaggcaggctcgcacgcaacccatcccggaaccagtgttttggagggaggagcagccggaagcatgagcccatcacgagtggaggccaacgtgcccatggtgcaaccggacgtaagccccgctccaaaacaagaagagcctgctgagaattccgccgacactggcggcgatggggaaagttgtctgagccagcaggatggggctgccggcgtccctgaaacaaacgcagcgggaagctccagcgaggcttgcgattttctcaaggaggatgggaacgatgaggtgatgactccttctcgcccacggaccaccgaagatctgtttgcagcgattcataggtctaaacggaaggttctcggacgcagggactctgatgacgaccatagccgaaatcattctccaagtccaccggtaactcccacgggggctgctccctctcttgcctcacctaagcaggtgggcagtatacagagatccatacgcaaatcctccacctcctccgataatttcaaggcgttgctcctcaagaagggcagccgaagcgacacatcagcaaggatgtctgcagccgagatgctgaagaacactgatccaaggtttcaacggtccaggtccgaacccagccccgacgccccagaaagtccctcatcctgctcaccaagcaagaatcggagggcccaggaggagtgggcaaaaaatgaaggactgatgccaaggtctttgagcttctcggggcctagatacgggcggtccagaacacccccctctgcagcttcctctcgctatagcatgaggaacagaatacagtcgtccccaatgaccgtgataagtgagggcgaaggagaggcagtagagcctgtcgattcgattgcaaggggcgccctgggcgctgccgagggctgcagcttggatggattggccagagaggagatggatgaagggggcctcctgtgtggtgaaggccccgcagcttcattgcaacctcaagcccctggacccgtggatggaacagcctccgctgagggccgcgaaccctctccccagtgcggtggcagtctgagcgaggaaagctag

SEQ ID NO: 56003 - DNA, 4821 bp, Artificial Sequence
  derived and/or modified sequence
atggtggtgttcatcaatgccaagatcaagagcctcatcaagctgttcaagaagaagacagtgagcaacctggatgaggagagccgctggacagtgcactacacagccccctggcaccagcaggagaatgtgttcctgcccaccaccaggcctccctgtgtggaggacctgcaccggcaggccaagctgaacctgaagtctgtgctgagagaatgtgacaagctgcggcatgatggctaccgcagcagccagtactacagccagggccccacctttgctgccaatgccagccccttctgtgatgactaccaggatgaagatgaggagacagaccagaagtgcagcctgagcagcagcgaggaggagcgcttcatcagcatccggcggcccaagaccccagccagcagtgacttcagtgacctgaacacccagaccaactggaccaagagcctgcccctgcccaccccagaggagaagatgaggcagcaggcccagacagtgcaggctgatgtggtgcccatcaacatcactggagaaaattttgaccggcaggccagcctgcggcgcagcctcatctacacagacaccctggtgagaagacccaagaaggtgaagaggaggaagaccatcactggagtgcctgacaacatccagaaggagctggccagcggcaccggccaggatgatgctgatggccacagcgtgtacaccccagaccactacagcaccctgggccgcttcaacagctgccgctctgctggccagaggtctgagacccgggacagcagctgccagacagaagatgtgaaggtggtgcccccatccatgaggcgcatccgggcccagaagggccagggcattgctgcccagatgggccacttcagcggcagcagcggcaacatgtctgtgctgagtgacagcgctggcatcgtgttccccagccggctggacagtgatgctggcttccacagcctgcccaggtctggggcccgggccaacatccagagcctggagccccggctgggcgccctgggccctgctggggacatgaatggcaccttcctgtaccagaggggccacccccaggctgatgagaacctgggccacctgggcggggccagcggcaccggcaccctgctgcggcccaagagccaggagctgcggcactttgaaagtgagaacatcatgagccctgcctgtgtggtgagcccccacgccacctacagcaccagcatcatccccaatgccaccctgagcagcagcagcgaggtgattgccatccccacagcccagagcgctggccagcgggagagcaagagcagcggcagcagccacgcccgcatcaagagccgggaccacctgatcagcagacatgctgtgaagggggacccccagagccctggccgccactggaatgaaggacatgccaccatcctgagccaggacctggacccccacagccctggagagcccgccctgctgagcctgtgtgacagcgctgtgcccctgaatgccccagccaaccgggagaatggcagccaggccatgccctacaactgcaggaacaacctggccttccctgcccacccccaggatgtggatggcaagtctgagagcagctacagcggcggcggcggccacagcagcagcgagccctgggagtacaagagcagtggaaatggccgggccagccccctgaagccccacctggccaccccaggctacagcacccccaccagcaacatgagcagctgcagcctggaccagaccagcaacaaggaggatgctggcagcctgtacagcgaggaccatgatggctactgtgcctctgtgcacacagattctggccacggcagcggcaacctgtgcaacagcagtgatggctttggaaaccccaggcacagcgtcatcaacgtgtttgtgggccgggcccagaagaaccagggcgacaggagcaactaccaggacaagagcctgagcaggaacatcagcctgaagaaggccaagaagccacccctgccccccagcaggacagacagcctgcggcgcatccccaagaagagcagccagtgcaatggccaggtgctgaatgaaagcctgattgccaccctgcagcacagcctgcagctgagcctgcccgggaagagcggcagcagccccagccagagcccctgcagcgacctggaggagccctggctgcccaggagccgcagccagagcacagtgtctgctggcagctccatgaccagcgccaccaccccaaatgtgtacagcctgtgtggggccacccccagccagagcgacaccagctctgtgaagtctgagtacacagacccctggggctactacatcgactacacaggcatgcaggaggaccccggcaacccagctgggggctgcagcaccagcagcggcgtgcccactggaaatggacctgtgagacatgtgcaggagggcagccgggccaccatgccccaggtgcctgggggctctgtgaagcccaagatcatgagccctgagaagagccacagggtcatcagccccagcagcggctacagcagccagagcaacacccccacagccctgacccctgtgcctgtgttcctgaagtctgtgtccccagccaacgggaagggcaagcccaagcccaaggtgcctgagaggaagagcagcctcatcagctctgtgtccatcagcagcagcagcaccagcctgagcagcagcaccagcacagagggcagcggcaccatgaagaagctggaccctgctgtgggcagccccccagcccctcctcctcctcctgtgcccagcccccccttcccctgcccagctgacaggagccccttcctgcccccacctcctcctgtgacagactgcagccagggcagccccctgccccacagccctgtgttccccccacctcctcctgaggccctgatccccttctgcagccccccagactggtgcctgagcccccccaggcctgccctgagccccatcctgcctgacagccctgtgtccctgcccctgcccccacccctgctgcccagcagcgagcccccaccagccccacccctggaccccaagttcatgaaggacacccggccccccttcaccaacagcggccagcctgagagcagccggggcagcctgcggccccccagcaccaaggaggagaccagcaggcctcccatgcccctcatcaccacagaggccctgcagatggtgcagctgcggcctgtgaggaagaacagcggggctgaggccgcccagctgtctgagaggacagcccaggagcagaggacccctgtggccccccagtaccacctgaagcccagcgccttcctgaagagcaggaacagcaccaatgagatggagagcgagagccagcctgcctctgtgaccagcagcctgcccaccccagccaagagcagcagccagggcgaccacggcagcgctgctgagcggggcggccctgtgagccgcagccctggggcccccagcgctggggaggccgaggcccggcccagccccagcaccacccccctgcctgacagcagccccagcaggaagcccccacccatcagcaagaagcccaagctgttcctggtggtgcccccaccccagaaggactttgctgtggagccagcagaaaatgtgtctgaggccctgcgggctgtgcccagccccaccaccggggaggagggctctgtgcacagccgggaggccaaggagagcagcgctgcccaggccggcagccacgccacccaccctggcacctctgtgctggagggcggggccgccggctccatgagccccagccgggtggaggccaacgtgcccatggtgcagccagatgtgtccccagcccccaagcaggaggagcctgctgagaacagcgctgacacaggaggagatggagagagctgcctgagccagcaggatggagctgctggggtgcctgagaccaatgctgctggcagcagcagcgaggcctgtgacttcctgaaggaggatggaaatgatgaggtgatgacccccagccggcccaggaccacagaggacctgtttgctgccatccacaggagcaagaggaaggtgctgggccggcgggacagtgatgatgaccacagcaggaaccacagccccagcccccctgtgacccccaccggggccgcccccagcctggccagccccaagcaggtgggcagcatccagaggagcatcaggaagagcagcaccagcagtgacaacttcaaggccctgctgctgaagaagggcagcagaagtgacaccagcgccaggatgtctgctgctgagatgctgaagaacacagacccccgcttccagaggagccgctctgagcccagcccagatgcccctgagagccccagcagctgcagccccagcaagaacagaagagcccaggaggagtgggccaagaatgaaggcctgatgcccaggagcctgtccttcagcggccccaggtatggccgcagcaggaccccaccttctgctgccagcagccgctacagcatgaggaaccgcatccagagcagccccatgaccgtcatcagcgagggggagggggaggccgtggagcctgtggacagcatcgcccggggggccctgggcgctgctgagggctgcagcctggatggcctggcccgggaggagatggatgaaggaggcctgctgtgtggggagggccctgctgccagcctgcagccccaggcccctggccctgtggatggaacagccagcgctgagggccgggagcccagcccccagtgtggcggcagcctgtctgaggagagctag

SEQ ID NO: 56004 - DNA, 4821 bp, Artificial Sequence
  derived and/or modified sequence
atggtggtgttcatcaacgccaagatcaagagcctgatcaagctgtttaaaaagaagacggttagcaacctagacgaggaaagcagatggacggtgcactatactgcaccatggcatcagcaggagaacgttttcctgcctactaccagacctccctgtgtggaggacctgcatcgtcaggcaaagttgaacctgaagtccgtcttgcgagagtgtgataaactccggcatgatggctacaggtcctcacagtactactctcagggccccacttttgcggccaacgcttcacccttctgcgatgactaccaggacgaagacgaagaaaccgaccagaaatgctctctgtcttcctctgaggaggaacgcttcatatctatccggagacctaagacccctgcttcttctgatttttcggatctcaacacccagactaactggactaagagcttgcctctgcctactcctgaggagaaaatgcgccagcaagcccagacagtccaagctgacgttgtacccattaatatcaccggcgaaaactttgatcggcaagcgtccctgagaagatccctcatatataccgatacactggtaaggcgacctaaaaaggtgaaaagacgcaaaaccatcacgggcgttccggacaacattcagaaggagttagcgagcgggactggccaggacgacgcggatggtcacagcgtctacacacctgaccactatagtactctcggaaggttcaattcatgccggtccgcggggcagagatccgaaacccgcgacagcagttgccaaacggaagatgtgaaagtcgttcccccaagtatgcgaaggatccgagcgcagaaaggacagggcatcgctgcccaaatgggccacttctcaggtagctctggtaacatgtccgtgctgtccgacagtgccggcatcgtattcccctcaaggctggactcggacgctggttttcattccctacctcggtctggcgcccgcgcgaatattcagtcactcgagcctaggctgggcgccttaggtccggccggtgacatgaatggcacatttttgtatcagagaggacacccacaggccgatgaaaaccttggccacttaggtggcgcaagtggaaccggcacccttctgagaccgaagagtcaagagcttcggcactttgagtccgaaaatatcatgtcccccgcatgtgtggtgtctccacacgccacttacagcacgtcaataatccccaatgcaaccctgagtagttcatctgaagtgatagccatccctacagcccagtccgcgggtcagcgggagagtaagagttccggcagcagccacgcccgcatcaaatcccgtgatcacctcatttctagacatgcagtcaagggggacccccaatcgcctgggagacactggaacgaagggcacgccaccatcctgagtcaggacctggatccacattcccctggggagcccgctctactttcactctgtgattccgctgtaccactcaacgcccccgcgaatcgagagaatggctcacaggcaatgccatataattgtagaaacaatcttgcctttcctgcccatcctcaggacgttgacggcaagtccgagtctagttattctggagggggcggccactcctctagcgaaccatgggagtataaaagcagcggcaacggccgggcatcaccattaaagcctcatttggccacaccgggctattccacaccgacctctaacatgtcctcatgctcactggatcagacatccaataaggaggacgcaggaagcctatatagtgaggaccacgatgggtattgcgctagcgtgcatacagacagcgggcatggatcaggaaatctttgtaacagtagtgacggcttcggcaatccacgccacagcgttatcaatgtattcgtgggaagggcacagaagaaccaaggagacaggtctaactatcaagacaagagcttgagtagaaacataagtcttaagaaggccaagaagcctccgctgccaccaagcaggacggactctcttagacggatcccaaagaaatccagccagtgcaatgggcaagttctgaacgagtccctcatcgctacacttcaacacagtctccagctgagccttcccggaaagtcgggaagctccccgtctcagagcccatgttctgacctcgaagagccttggctcccaaggagtcgttcccagagtactgtcagcgccggatcctcaatgactagcgccaccacacccaatgtatattccctttgtggtgccaccccctctcagtctgatacaagctctgtgaagtcagagtacaccgacccttgggggtactacattgactataccgggatgcaggaggaccctggtaatccagcaggcggttgttctacgagctctggagtccctaccggaaacgggcctgtgaggcacgttcaggaaggctcgagagccaccatgccccaggttcctggtggatccgttaagcccaaaatcatgtccccagaaaagtctcacagggttatctccccatccagcggatacagctctcagagcaatacacccactgcactaactcctgtaccggtcttccttaaaagtgtttccccagctaacggaaaagggaaacctaaaccgaaggtccccgagcgcaaatcatcgctcatctctagtgtaagtatcagctcttccagtacttcactgtcttcgtccacctcaactgagggttccggtacgatgaagaagctggatccggctgtgggaagccctccagccccacctccacctccagtgcctagccctccatttccttgccctgcggatcgctctccgtttctcccccctccacctcctgttactgactgttcccaaggcagccccctgccacactcccccgtcttccccccaccaccccctgaagccctgatcccgttctgtagtcctcccgactggtgtctgagccctccaagacctgctctgagccccatactccctgactcacctgtgtcccttcctctgccacctcctctgcttccttcctcagagcccccccctgcgccaccacttgacccgaagttcatgaaagataccagaccccctttcaccaattctggtcaacctgagtcctcgcgggggtcgctccgcccaccatcaacaaaagaagaaactagtcgaccgcctatgccgctgattactaccgaggccctccagatggtccagctgaggcctgtgcgaaagaatagcggggccgaagctgctcaactgtcggaaagaactgcccaggagcagcggactcctgtagccccccagtatcaccttaagccttcagcatttctgaagagccgcaatagtaccaacgaaatggaaagcgaatctcaacccgcatctgtaacctcatccctgcccacacccgccaaatcctcatcacagggagaccacggttcagccgcagagagaggcggccccgttagccgttccccaggagccccatctgcgggtgaggccgaagcccgcccatctcccagcactacccctctccctgacagctccccaagccgcaaacctccaccaatttcaaaaaaacctaagctctttctcgttgtacctccgcctcaaaaggatttcgccgttgaacctgcagaaaacgtgtctgaagcactccgagcggtgccgtctcccactactggagaggagggctcagtacacagcagggaggcgaaggagagttcagccgctcaggccgggagccacgcaactcatcctggaacaagtgtactggagggtggcgccgcggggagtatgagtccctctcgagttgaggctaacgtaccgatggttcagcctgacgtaagtcctgcgcctaagcaggaagaacctgccgagaacagtgccgatacaggaggcgacggagagtcctgtctcagccagcaggatggcgccgctggagtccccgaaaccaatgctgccggaagctccagcgaagcttgcgatttcctgaaggaagacggaaatgacgaggttatgaccccctcacgaccacgcactaccgaggacttgtttgcggccattcaccgaagtaaacgcaaggtgctggggcgccgggactcggacgacgaccactccagaaatcacagtcccagtccccctgttacaccaacaggcgccgcaccctccctggcaagccctaaacaggtcggctcgatacagagaagcatccgcaaaagttccactagctctgataattttaaggcgctgctcctgaagaaagggtcacggagcgatacttccgcacgaatgtcagccgccgaaatgttgaaaaacaccgatcccagatttcagagaagtcgatctgaaccctcccccgatgcaccggagtccccatctagctgctccccgtccaaaaaccgccgcgctcaagaagagtgggccaagaacgagggcctgatgccaagaagcttgagtttcagtggccctcgatatggccgcagccggacccctccgtctgcagcgagtagcaggtatagtatgcggaatagaatacagagctcacctatgaccgtcatctctgaaggcgaaggggaggccgttgaacctgtcgattccatcgcccggggcgcgttgggtgcagccgaaggctgttccctggatggcctggctagggaagagatggacgagggcggcctgctgtgcggagagggccctgcagcttcactacagcctcaggcacccggtcccgttgacggcactgcctcagcagaggggcgcgagccctcaccacagtgtggcggttccttgtccgaggaatcatag

SEQ ID NO: 56005 - DNA, 6535 bp, Artificial Sequence
  derived and/or modified sequence
aggttcaaggactgttaatggtttgtaactgcctgacaataaactcaacctcagttacatcagcctgggcagatgtctaaggatatgagaccgggggaagaaaaagttagaatctgtagcagaaggacgaagcttgccacctgcctactgggctgagcttttaatgtgatttacatttctaagctctatgtaggtgccctggaaatggtggtcttcattaatgcaaagattaagtctttaattaaactttttaagaagaaaacggtttccaacctagatgaggaaagccgatggacagtccactacactgccccgtggcaccagcaggagaatgtgttccttcccaccacaagacccccctgtgttgaggacctgcaccgccaagccaagctcaacctcaaatcagtactgagggaatgcgataagttgcggcatgatggctaccgcagttctcagtactactctcagggacccacctttgcggccaacgccagcccattctgtgatgattaccaagatgaagatgaagaaacagatcaaaagtgttctctgtcttcatcagaagaagaaagatttatttccatcaggagacctaaaacaccagcctcaagtgacttctccgaccttaatactcagacgaactggaccaagtcgcttccactgccaacaccagaagagaagatgcgacagcaagcccaaacagtccaggctgacgtggtgcctattaacataactggggagaatttcgatcgccaggccagccttcggcggtctctaatttacacagacactctggtaagacgaccgaagaaagtcaaaaggagaaagactattacaggagtccctgacaacatacagaaggagctagcatcaggcactggccaagatgatgctgatggccactcagtgtacacccctgatcactactctacactaggaaggttcaatagctgtcggtctgctgggcagcgctcagaaaccagggactccagctgtcagacggaggatgtgaaggtcgtaccaccttccatgaggagaatcagggcacagaaggggcaaggcattgctgcccagatgggccacttctcaggttcctctggcaacatgtctgtgctgagcgattctgcagggatcgtattcccttcccgccttgacagtgatgctggcttccatagtcttccgcgttctggagcaagggcaaacattcagtcccttgagccgaggctgggtgccctcggccctgcaggagacatgaatggcactttcctctaccagagaggtcacccacaagcagatgaaaacttaggccatttaggaggtgcctcagggactggaacacttttgagacccaaatcccaggagttgagacacttcgagagtgaaaatataatgagcccagcgtgtgtggtttctcctcatgcaacctactccaccagcatcatcccaaatgccacactgtcttcctcttccgaggtcatcgctattcccactgctcagagtgcgggacagcgggaaagtaaaagttctggctcatcacatgcaaggataaaatccagagaccacctcatctccaggcatgctgtgaaaggtgatcctcagtctcccggtcgccactggaatgagggccatgccaccattctttcacaggacttagaccctcattcccctggtgaacccgcactgttgtccctctgtgactcagccgtccctctaaatgctccagcaaatagggagaatgggtcccaagctatgccgtataattgtagaaacaacctggccttcccagcccacccccaagatgtggatggcaagagtgaatctagttattcagggggcggagggcacagcagctcggagccctgggaatacaaatcctcaggtaatggaagggcatcccccctgaagccgcatttagcaactcctggctattccactcccacaagtaacatgagcagctgcagtttggaccaaacgtccaacaaagaggatgctgggtcgctgtattctgaggaccacgatggctactgtgcatctgtgcacactgactctggacatggatctgggaatctgtgcaatagcagtgatggctttgggaaccccaggcacagcgtgatcaatgtttttgttggaagagctcagaaaaaccaaggggaccggtccaattaccaggataaatccctatcaagaaacatctctttgaagaaagcaaagaagcctcccctgccaccctcccggacagactccctccgcaggattcccaagaagagcagccagtgcaacgggcaggtgctcaacgagagcctgatcgccacactccagcactcgctgcagctgagcctcccaggcaagagtggcagctcgccctcccagagcccctgcagtgacttggaagagccctggctgccccgctcccggagccagagcacagttagtgctggcagcagcatgacttccgccaccacccccaatgtctactccctgtgcggggccacgccatcgcagagtgacacaagcagcgtcaagtcagagtacacggacccctggggttattacattgactacacgggcatgcaggaagatccggggaacccggcagggggctgttcaaccagcagtggggtgcccactgggaacgggccagtccgccatgtccaagaagggtccagagccacaatgccccaagtgcccggtggttcagtcaaaccaaagatcatgtcaccagagaagtcacacagagtcatttctccatccagtgggtattccagccagtcgaatacacccacagcactcacccctgtgcctgtgtttttaaaatcagtgtcaccagcaaacgggaaggggaagcccaagcccaaggtaccagaaaggaagtcctctctgatatcttcagtatccatttcctcatcgtccacttctctttcttctagtacttctactgaaggaagtggcactatgaagaagctggatccagccgtgggctctcccccggctcctcctcctcctcctgttccctctcctccattcccttgtcctgcagacaggtctcctttccttcctcccccacctcctgtcacagattgctcccagggctctcctctgcctcactctcctgtgttcccccctccgccgccagaagctctcattcctttctgctccccacctgattggtgcctttctcctccccgccctgcactgagccccattcttccagattcacctgtgtccttgccattgcccccacctctcttaccttcctcggaacccccacctgccccacctcttgaccccaaattcatgaaagacaccaggccgcctttcacaaattctggccagccagaatcctcccggggatccttgaggccgccttctaccaaggaggagaccagcaggccccccatgcccctgataaccacggaagcattgcagatggtgcagttgaggcccgtgagaaagaactcaggcgctgaggcggcacagttgtctgaacgaacagctcaggaacaacgaactccagttgctccacagtaccacttaaagccatctgctttcctgaaatcccgaaatagcacaaatgaaatggagagtgaaagccagcctgcctctgtgacaagctcgcttccgacgcctgccaagagctcgagtcagggtgaccatggcagtgcggctgagcgtggtggccctgtgagccgcagccctggagctccaagcgctggggaggcagaggctcggcccagccccagcaccaccccactcccagactcttcacccagcaggaagccaccccccatttccaagaagcccaaactgttcctggtggtaccacctccgcagaaagattttgcagtggagcccgcagagaacgtgagcgaagccctccgagctgtgcccagccccacgacgggagaggagggctctgtgcacagcagggaggcaaaagagagttctgcagcccaagctggctctcatgccacgcaccctggcacctcggttcttgagggaggagctgcaggatccatgtctcccagcagagtggaagccaatgtccccatggttcagcctgatgtctcaccagcccccaagcaggaggagccagccgagaacagtgcggatactgggggcgatggggagagctgcctatctcaacaggacggagcagctggggtgccggagaccaacgcagccggttcatcctcagaggcctgtgacttcctcaaggaagacgggaatgatgaggtaatgacccccagtcgacccaggaccacagaagacctttttgcagctattcacagatccaaaaggaaagtcctcggccgtagagattcagatgatgaccactcccgaaaccattctccctccccgcccgtgacacccaccggcgctgccccaagcctggcctctccaaagcaagtggggtcgattcagagaagcatccgaaagagcagcaccagcagtgacaacttcaaagctctgctgctgaaaaagggcagtcgttcagacaccagcgcccgcatgtctgcagcagagatgctcaagaacacagaccctagattccagaggtcgaggtcagagccttccccagatgcccccgagagcccgtcaagctgctccccaagcaagaacagaagggcgcaggaggagtgggccaagaacgaaggcttgatgcctcggagtctgtccttttccggccccaggtacggccgcagccgaacgccgccttctgccgccagcagcaggtacagcatgcggaaccggatccagagcagccccatgaccgtcatctcggagggagaaggggaagccgtggagcctgtggacagcatagcccgcggggctctgggcgctgcggagggatgttccctggacggactggcgagggaggagatggacgagggcggcctgctctgtggggaggggcctgccgcctccctgcagccccaggcccccggccctgtggatgggacagccagtgcagagggcagagagccctccccacagtgtggcggttctctgagcgaggagagttagggccaagaacgtaactctcccaggtgacacggggggagacgagcaatgcagcactctaggaagcctgctaggcgcccttccctggctcacccggggagcccactctgcttctgtgctgtgggccccggggttgccagccctgcagtgtgagtgaacggttatttaggactcacctggcacttgccctgtggcttaagaacaagtagaagcttaaacttctgaaagtgcttcccggggaagattttttttttttttttttttttttgctaaatgctgggtgtgtatgtgtgcattttccacactttttaatttttaaaaaatacacatatacacaaacaacatgtacagaaatagaagaaagcaagccagacttaagcttggtagagtaacggagtcctctggtctaggcggtaattgctttcagagaattacgtttatagaaatcagcgagttttgtaagaaaggagaagatgttacttcaagaaagaggcagtagagttgctggttcttaatgcacagaacacacagatatatgcacacgtgtgctgctgaggtgaggcaggtctggtgagcacggagaggctgggaaggggctaagtgactaattggttcaggtacttttttctgggggaggtagactttgcttcttttttgtaaaaatgacaaacgtagaagtggcaatgctgtaacctggtgcctgctgctgtgcagccacatacacacaattgtagcctgatttttagaagtgtgggtaattttttaatgaatttcctccttgagtagcagctgaggtcattgacaactgaagtgatggtgtggacatagagagaggggaagggttggaaaggagtaagtgatacactgctggaatttgtttcctgcctatgaaataaaattatttttcagaattaaatttgaaaacttgcactacagaactatgggtggagcttttccttttacaacagtttttttttttttttttttttaaccagagtttaaacttccattaggcaatttcctgtcacttgaaatgtcaacatttgctaacttttggatatccttttggttacaccaaagaaaaagttatggctatttttttttccttgaactgcctacagtatcatgtcctaattcagaaagatttatcaaaatctattatatattatcttactttgaagaaaatgctgaatagctcttgttagtcaaataaactgataaaaattggtagggcctggctatcaattagccctgggaaatgaatttttagattaaaaaggtttttttgcatcatttggtttgtgcatttttatatttgtttataaataattgagttgctaattacttctaatcttctccaatcagattttcaacaattttagacatgggacacacgtgtgtgaagtctttattttaatgtaataatctcattacccccacccttactcccttaacttccatgtacttagactcctttatttgttaaataaactagagtattgtcttcttcatt

SEQ ID NO: 56006 - DNA, 4821 bp, Artificial Sequence
  derived and/or modified sequence
atggtggttttcataaatgcgaagattaagtcactcataaaactgttcaagaagaagactgtgagcaacttagacgaagaaagtaggtggaccgtccactacacggctccttggcaccagcaggagaacgtctttctgcctacaacaagaccgccatgtgtggaagacctgcacaggcaggcgaagctgaatctaaagtcagtgttgagagagtgcgacaagctaaggcacgatggctacagatcttctcagtactactcacaggggcctacatttgctgcaaacgccagccccttttgcgacgattaccaggacgaggatgaggagactgaccagaagtgttctctcagcagcagcgaagaggagcggttcattagcatccggagaccaaaaacgcccgcaagcagtgacttttcggatttaaacactcaaaccaactggacaaaatctctgcccctgcctacccctgaagaaaaaatgaggcaacaggcccaaaccgtgcaggccgacgtggtcccaattaacattacaggagagaacttcgatcggcaggcatctttgcgtcgtagcctcatttataccgacacgcttgtcaggcgtcccaagaaggtcaaacggcgaaagaccatcactggggtgcccgataatattcagaaggaactggcctccggtacgggccaggatgatgccgacgggcatagcgtgtatactcctgatcattattcaacccttggccgtttcaacagctgtcgatccgccggtcagcggtcagaaacccgggactctagttgccagaccgaagacgtgaaggtcgtgcccccaagcatgcggaggatacgggcacagaagggtcaaggcatcgcagcccagatggggcatttttctgggtcttccggaaacatgtctgtgctaagcgacagcgcaggaatcgtttttccttccagactggattcggatgccggtttccactccttgcctagatctggcgcacgcgctaacattcagtctttggagccccgactcggcgcattaggcccagccggagatatgaatgggacatttttgtatcagcgaggtcaccctcaagccgatgaaaatctgggccacttaggaggagcttccggaactggaacccttttacgacctaagtcacaggaactgcggcacttcgagagcgaaaacattatgtctcctgcttgtgtggtcagccctcacgcgacttactccacctctatcatcccaaatgccactctgagtagctcctctgaggttatagctataccaactgctcaatcagcgggacaacgcgaatcaaaatcttctgggtcctctcacgcacgaatcaagagccgcgatcatttgatatcgcgtcatgctgtgaagggggatccccagagcccaggccgacattggaatgagggtcatgccacaattctgagtcaggacctagatccccactcacctggcgaacccgctctgctgagcctgtgcgattctgcagtgcccctgaatgctcccgctaatcgagagaacggctcacaagccatgccgtacaactgtcgcaacaatctggcattcccagcacatcctcaagatgtagacggcaaaagcgagagctcttactccgggggagggggtcactcctccagtgagccctgggagtacaaatcctctgggaacgggagggcctcccctctcaagccacatctggcaactccgggatacagcactcccacatctaatatgagtagttgttccctggaccagacctctaacaaagaggatgctggctctctgtattccgaggaccacgatgggtattgcgcatctgtgcatacagattcgggccacgggtctggcaacctgtgtaatagcagcgacggctttggtaatccacggcatagcgtcatcaatgtgtttgtaggcagggcgcagaagaatcagggtgaccggtccaactaccaagataagtccctttcgcgcaatatttctttgaagaaggcaaagaaacctcccttgccccctagccgcaccgactcattgcggcgtatcccaaaaaaaagctcacaatgcaatggacaggttctcaacgagagcctgatcgccaccctccaacactccctgcagctgagcctgccaggtaagtcaggctcctcaccttctcagtcgccttgttcagatctggaagaaccttggttgcccaggtctcggtctcagtctacagttagtgccggatcctccatgacgagtgcaactaccccaaatgtctactccttgtgcggggcaaccccaagccagagtgatactagcagtgtgaaatccgaatacaccgatccctggggctattatattgattacaccggtatgcaggaggacccaggaaaccccgctggcggatgctcaacaagcagcggggtcccaactggaaatggtccggtacggcacgtgcaagaagggtccagggccactatgcctcaagtgccgggtgggagcgtgaagcccaagattatgtcaccggaaaagagtcaccgggttatctcccctagtagcggctactctagtcaatccaacactccaaccgcgttaactccagttccggttttcttgaagtccgttagcccagctaacggtaaggggaaacctaagccaaaagtgccagagaggaagtcctctctcatctccagtgtgagtattagcagttcaagtacgtcactttcatcttcgacatctacggagggcagtggcaccatgaaaaagctcgatcccgctgtgggtagccctcccgcacccccaccccctcccgtgccatccccaccgtttccttgcccggctgaccgctcgccgttcctcccaccccctcctcccgttactgactgcagtcagggctcccccctcccccactcccccgtgttccctccgcctcctccggaagcactgatccctttctgtagcccaccagattggtgtctgagtccaccgaggccagccctcagccccatcttacccgattctcccgtgagcttgcctctccccccacccctgctaccctctagtgagccacccccagccccacccctcgatcctaagttcatgaaggatactcgccctcccttcaccaattcaggacagcccgaaagctcaagaggatccctgcgccctccctccacaaaggaggagacctcacgacctccaatgccacttattactacggaggccctgcagatggtgcagctgaggcccgtccgcaagaattccggtgccgaggccgcacaactgtcagaacggacagctcaggaacagcggacacctgtcgctcctcagtaccacctgaagcccagcgcctttttaaagtctcgcaattcaacaaacgagatggaaagcgaatcacagcctgctagtgtgacttccagcttacctacacctgcaaagtcatcatctcagggcgatcatggtagtgccgcagaacgcggtggaccagtgtctcgctctccaggggctccgagtgccggtgaggcagaggcccgtcctagtcccagcacaacaccattgccagacagtagcccgagtcggaaacctcccccaattagcaagaagcccaagcttttcctggtcgttccccctccccagaaagattttgctgtcgaacccgcagagaatgtgtccgaagctctgcgcgcagtcccaagtcccactactggagaagagggatcagttcactcaagagaggccaaggagtcctctgctgctcaggcaggatctcatgcgacacatcccggtacctccgtgctggagggcggtgccgcaggtagcatgtccccatctagagtcgaggccaacgtgcctatggtgcagccagacgtatcccccgctcccaagcaagaggagccagcagaaaatagcgcagacacggggggtgacggagagagttgtctcagtcaacaggacggcgctgccggtgttcccgagactaacgccgctgggtcctcatcggaggcttgtgattttctaaaagaggatggcaacgacgaagttatgacgcccagccgtcccagaaccaccgaggacctcttcgccgcaattcacagatctaagcgaaaagtgctcggtcgtcgcgattccgatgatgaccacagcaggaatcacagcccctcgcctccagtcactccaaccggcgcagccccatcactcgccagtccgaaacaggtgggttccattcaaaggtcgatccgcaagagcagcaccagcagtgacaatttcaaggctctcctgctgaagaagggatctcgctccgatacatccgcccgaatgagtgccgctgagatgttgaagaacacagatcccaggttccaacgtagtagatccgaaccctcaccagacgcgcctgagtctccttcaagttgttctccgagcaagaatcgaagagcacaggaagagtgggctaaaaatgaaggtctgatgccaaggtcgctgtctttttctgggccaagatacggcagatctagaacccccccttcggctgccagcagtcgttatagtatgaggaaccgcatccagagcagccctatgaccgtgatttccgagggggagggagaagcggtggagcctgtggacagcatcgcacgcggagccttgggagccgcagagggctgttccctggacggtctggccagagaggagatggacgagggcggactgctttgcggggaaggccctgctgcgtccctgcagccgcaagcgccaggaccagttgatggcactgcttcggctgaagggagggaaccttcccctcagtgcggcggaagcctctccgaagaaagttag

SEQ ID NO: 56007 - protein, 572 aa, Artificial Sequence
  derived and/or modified sequence
MDALCGSGELGSKFWDSNLSVHTENPDLTPCFQNSLLAWVPCIYLWVALPCYLLYLRHHCRGYIILSHLSKLKMVLGVLLWCVSWADLFYSFHGLVHGRAPAPVFFVTPLVVGVTMLLATLLIQYERLQGVQSSGVLIIFWFLCVVCAIVPFRSKILLAKAEGEISDPFRFTTFYIHFALVLSALILACFREKPPFFSAKNVDPNPYPETSAGFLSRLFFWWFTKMAIYGYRHPLEEKDLWSLKEEDRSQMVVQQLLEAWRKQEKQTARHKASAAPGKNASGEDEVLLGARPRPRKPSFLKALLATFGSSFLISACFKLIQDLLSFINPQLLSILIRFISNPMAPSWWGFLVAGLMFLCSMMQSLILQHYYHYIFVTGVKFRTGIMGVIYRKALVITNSVKRASTVGEIVNLMSVDAQRFMDLAPFLNLLWSAPLQIILAIYFLWQNLGPSVLAGVAFMVLLIPLNGAVAVKMRAFQVKQMKLKDSRIKLMSEILNGIKVLKLYAWEPSFLKQVEGIRQGELQLLRTAAYLHTTTTFTWMCSPFLVRLGTGLGPCLQGSGCPGMARAHWTLP

SEQ ID NO: 56008 - DNA, 1719 bp, Artificial Sequence
  derived and/or modified sequence
atggatgcattgtgtggttccggtgagctaggatccaagttctgggacagcaacctgagcgtgcatactgaaaaccctgatctcaccccatgtttccagaatagcctcttggcctgggtcccgtgcatctacctgtgggtggctctgccttgttaccttttgtatcttcggcatcactgtagagggtatataatcctaagccatttgtctaagctgaaaatggtcctgggagtcctactctggtgcgtgtcctgggccgatttgttttatagttttcacggcctggttcatggcagggccccagctccagtgtttttcgtcacaccactggtagtcggcgttactatgctacttgccaccctcttaatccaatacgagcgcttgcagggggtgcaatctagcggagttctgattattttttggttcttgtgcgtcgtctgtgccattgtgccatttcgatcaaaaatcctcctggccaaagccgagggggaaatttcggaccccttcaggtttacgactttttatatacactttgccctggtgctctccgctctcatcttagcgtgctttcgcgaaaagccaccctttttcagtgctaaaaatgtagacccaaatccatatcctgagacaagcgccggatttctgtctcgtttatttttttggtggttcacaaaaatggccatctatggataccggcatcccctggaagagaaggatctatggagtttgaaagaggaagaccggagccaaatggtggtgcagcaattattggaagcatggcgaaagcaggaaaagcagacagctcggcacaaagcatccgcagctcccggaaagaacgcttccggggaggacgaggtgctgctgggcgctagacctcggcctagaaaaccttccttcctaaaagccttgctcgccacattcgggtccagcttcctgatatctgcctgcttcaaactgatccaagatcttcttagttttattaacccccagctattgtccatcctaattagattcatctcaaatccaatggctccttcttggtggggattcctcgtagcaggcctgatgtttctctgtagtatgatgcaatcactgattttgcagcattactaccactacattttcgtaaccggcgttaagtttcgcaccggcattatgggcgtgatctatagaaaagctctggtcattactaatagcgtcaagcgtgccagcaccgtcggggagatcgtgaacctcatgagcgttgatgcacagcgctttatggatctggcaccttttctgaatctgctatggagcgctcccctgcaaattatacttgcaatttatttcctttggcagaatctcgggcccagtgtactagccggggttgcctttatggtgctgctgatccctctgaacggcgccgtcgccgtgaagatgcgggcatttcaggtgaaacagatgaaacttaaagatagcaggataaagctcatgtccgagatattgaatgggatcaaggtccttaaactgtacgcttgggagccttcttttctcaagcaggtggaaggcatccggcaaggcgagctccagttgttaaggaccgcagcctatcttcataccacgactactttcacctggatgtgcagcccattccttgttcggctaggcaccggtttaggtccctgcctgcaaggatctggatgcccaggtatggcgagagcacactggaccctgccatag

SEQ ID NO: 56009 - DNA, 1719 bp, Artificial Sequence
  derived and/or modified sequence
atggatgccctgtgtggcagcggggagctgggcagcaagttctgggacagcaacctgtctgtgcacacagagaacccagacctgaccccctgcttccagaacagcctgctggcctgggtgccctgcatctacctgtgggtggccctgccctgctacctgctgtacctgcggcaccactgccggggctacatcatcctgagccacctgagcaagctgaagatggtgctgggcgtgctgctgtggtgtgtgtcctgggccgacctcttctacagcttccacggcctggtgcacggccgggccccagcccctgtgttctttgtgacccccctggtggtgggcgtgaccatgctgctggccaccctgctgatccagtatgagcggctgcagggcgtgcagagcagcggcgtgctgatcatcttctggttcctgtgtgtggtgtgtgccatcgtgcccttccgcagcaagatcctgctggccaaggccgagggggagatcagtgaccccttccgcttcaccaccttctacatccactttgccctggtgctgagcgccctgatcctggcctgcttccgggagaagccacccttcttcagcgccaagaatgtggaccccaacccctacccagagaccagcgctggcttcctgagccgcctcttcttctggtggttcaccaagatggccatctacggctaccgccaccccctggaggagaaggacctgtggagcctgaaggaggaggacaggagccagatggtggtgcagcagctgctggaggcctggaggaagcaggagaagcagacagcccggcacaaggccagcgctgcccctgggaagaatgccagcggagaagatgaggtgctgctgggcgcccggccccggcccaggaagcccagcttcctgaaggccctgctggccaccttcggcagcagcttcctgatcagcgcctgcttcaagctgatccaggacctgctgtccttcatcaacccccagctgctgagcatcctgatccgcttcatcagcaaccccatggcccccagctggtggggcttcctggtggccggcctgatgttcctgtgcagcatgatgcagagcctcatcctgcagcactactaccactacatctttgtgactggagtgaagttcagaacaggcatcatgggcgtcatctacaggaaggccctggtgatcaccaacagcgtgaagagggccagcacagtgggggagatcgtgaacctgatgtctgtggatgcccagcgcttcatggacctggcccccttcctgaacctgctgtggagcgcccccctgcagatcatcctggccatctacttcctgtggcagaacctgggccccagcgtgctggccggcgtggccttcatggtgctgctgatccccctgaatggagctgtggccgtgaagatgagggccttccaggtgaagcagatgaagctgaaggacagccgcatcaagctgatgtctgagatcctgaatggcatcaaggtgctgaagctgtatgcctgggagcccagcttcctgaagcaggtggagggcatccggcagggcgagctgcagctgctgaggacagctgcctacctgcacaccaccaccaccttcacctggatgtgcagccccttcctggtgcggctgggcaccggcctgggcccctgcctgcagggcagcggctgccccggcatggcccgggcccactggaccctgccctag

SEQ ID NO: 56010 - DNA, 1719 bp, Artificial Sequence
  derived and/or modified sequence
atggacgccctgtgcggcagcggcgagctgggcagcaagttctgggactctaacctgtcagtccacacagagaatcccgacttgacgccttgttttcagaatagcctgctagcatgggtgccatgcatttatctctgggtggcacttccatgctatctgctttacctcagacatcattgcagagggtacatcatactttctcacctctcaaagttgaaaatggtgcttggagtactcctctggtgcgtctcttgggccgatctgttctacagtttccacgggctggtgcatggtcgggcccctgcccccgtcttctttgtgacaccactggtggtaggagtgaccatgctgctggctactctgctcatccaatatgagagactgcagggtgtccagtcctccggtgtgttgatcattttttggtttctctgtgtcgtctgcgccatcgtgccatttcgatccaagatcttgctggccaaggccgaaggcgagatttctgatccctttaggtttacgaccttctacatccactttgcccttgttctttcggcactaattctggcctgcttcagggaaaagccaccttttttttctgcaaagaacgtggaccctaacccctatcccgaaacttcagccggatttctgtctcgcctgtttttctggtggtttactaagatggcgatctatggctatcggcatcccctggaagaaaaagacctttggtccttgaaggaagaagataggagccagatggtggtccaacaactcctcgaagcttggaggaagcaggaaaagcagactgcacgacataaggcgtctgcggcgcccggtaagaatgcaagcggcgaagacgaagtcttactgggcgcaaggcctcgccctagaaaaccatcattcctaaaggccctcttagctacttttggctctagttttctcatatcagcatgttttaagctgattcaggatctgctgtctttcattaatcctcaattgctctccattctgattaggttcatttccaaccctatggcaccttcatggtgggggttcctggtggctggattaatgttcctgtgctctatgatgcagagcctgattttgcagcactactatcactatatcttcgttacaggcgttaaattccggacagggatcatgggggtgatttaccgaaaggccctagtcatcactaattcagtcaaaagggcaagcaccgtgggggagatcgtcaacctcatgtcagtggacgcccagaggttcatggacctggcccccttccttaacttactttggagtgcgcctttgcaaatcatcttggccatttactttctgtggcagaacctcgggccatctgtcctggcaggcgtcgcctttatggtgctccttattcctctgaacggcgctgtggcagtgaaaatgcgtgctttccaagtcaaacaaatgaagctgaaggactcacggataaagctcatgtctgagatacttaatggaatcaaggtgctcaagctttatgcttgggaacccagttttcttaaacaggttgaaggtatcaggcagggcgagttgcaactgctcaggaccgccgcctacctgcataccacaaccaccttcacttggatgtgcagcccgttcctggtacgcctgggcactggtttaggaccttgcctgcaaggatctggatgtccaggaatggccagagctcattggactctgccttag

SEQ ID NO: 56011 - DNA, 1719 bp, Artificial Sequence
  derived and/or modified sequence
atggacgcactttgtgggagtggcgaattaggctcaaagttctgggatagcaatctttcagtccatactgagaacccagatctcacaccctgtttccaaaattctctccttgcctgggttccttgtatatacctttgggtggctctgccatgctatttgctttaccttcgtcatcactgtcggggttacatcatcctcagtcacctgagcaagcttaagatggtgctgggcgtgctgctctggtgcgtgagctgggctgatctgttttactccttccatgggttggttcacggtagggcccctgcgcctgtcttctttgtgaccccactagtcgtgggagtgacaatgcttctcgccaccctgctgattcagtatgagcgtctgcagggtgtgcagagcagtggagtcttgatcattttctggttcctgtgtgtggtttgtgcaatcgtaccattccggagcaagatcctgttagctaaagctgaaggagaaatttcagatcctttccgctttactaccttctatatacatttcgcactcgtactcagtgctctgattttagcatgctttagggagaagcccccattcttttctgcaaagaacgtcgaccctaacccataccctgaaacaagtgcaggatttctctctcgcttgtttttctggtggttcacaaaaatggcaatctatggatacaggcatccactggaagagaaagacctgtggtcgctgaaagaagaggacaggagccagatggtggtacagcaactgttggaagcatggcggaagcaagagaagcagaccgcccgacacaaggcttccgcagccccagggaagaacgcaagcggagaggacgaagtcctcctgggggctaggccacggcctcgcaagccttccttccttaaggccctgctggcaacctttggcagctccttcctaatctcagcatgcttcaagctcattcaggatctcctgagtttcataaacccccagcttttaagcatattgatccggttcatttcgaatcccatggccccttcctggtggggttttcttgtcgcaggactcatgtttctttgctcaatgatgcagagcctgatcctccagcactactaccactatatttttgtcactggggtgaagttccgcacgggcattatgggtgttatttaccgcaaggccctggtcatcaccaactctgtgaaaagggccagcaccgtcggagagatcgtcaaccttatgtcagtcgacgcccaacgcttcatggacttagccccattcttaaacctattatggagtgctcccttacagatcatactggcaatatacttcctgtggcagaatctagggcctagcgtcctggccggagtcgcattcatggtgttgctgattccattgaatggagctgttgcagtgaaaatgcgggcatttcaggtcaaacagatgaaactgaaagacagtcggatcaaactgatgtcagaaatcctgaacgggatcaaggttctcaaactgtacgcatgggagccgagcttcctgaagcaggtagagggcattcggcagggtgagctgcagcttctgagaaccgccgcttacctccacaccaccactaccttcacttggatgtgttcacccttcctcgttcgattggggacgggactcggtccatgcttgcagggatccggctgtcccggtatggcgagggcccattggaccctgccatag

SEQ ID NO: 56012 - DNA, 1881 bp, Artificial Sequence
  derived and/or modified sequence
gcggaggcggctccggcgcccgctctgcccgccgctgggtccgaccgcgctcgccttccttgcagccgcgcctcggccccatggacgccctgtgcggttccggggagctcggctccaagttctgggactccaacctgtctgtgcacacagaaaacccggacctcactccctgcttccagaactccctgctggcctgggtgccctgcatctacctgtgggtcgccctgccctgctacttgctctacctgcggcaccattgtcgtggctacatcatcctctcccacctgtccaagctcaagatggtcctgggtgtcctgctgtggtgcgtctcctgggcggaccttttttactccttccatggcctggtccatggccgggcccctgcccctgttttctttgtcacccccttggtggtgggggtcaccatgctgctggccaccctgctgatacagtatgagcggctgcagggcgtacagtcttcgggggtcctcattatcttctggttcctgtgtgtggtctgcgccatcgtcccattccgctccaagatccttttagccaaggcagagggtgagatctcagaccccttccgcttcaccaccttctacatccactttgccctggtactctctgccctcatcttggcctgcttcagggagaaacctccatttttctccgcaaagaatgtcgaccctaacccctaccctgagaccagcgctggctttctctcccgcctgtttttctggtggttcacaaagatggccatctatggctaccggcatcccctggaggagaaggacctctggtccctaaaggaagaggacagatcccagatggtggtgcagcagctgctggaggcatggaggaagcaggaaaagcagacggcacgacacaaggcttcagcagcacctgggaaaaatgcctccggcgaggacgaggtgctgctgggtgcccggcccaggccccggaagccctccttcctgaaggccctgctggccaccttcggctccagcttcctcatcagtgcctgcttcaagcttatccaggacctgctctccttcatcaatccacagctgctcagcatcctgatcaggtttatctccaaccccatggccccctcctggtggggcttcctggtggctgggctgatgttcctgtgctccatgatgcagtcgctgatcttacaacactattaccactacatctttgtgactggggtgaagtttcgtactgggatcatgggtgtcatctacaggaaggctctggttatcaccaactcagtcaaacgtgcgtccactgtgggggaaattgtcaacctcatgtcagtggatgcccagcgcttcatggaccttgcccccttcctcaatctgctgtggtcagcacccctgcagatcatcctggcgatctacttcctctggcagaacctaggtccctctgtcctggctggagtcgctttcatggtcttgctgattccactcaacggagctgtggccgtgaagatgcgcgccttccaggtaaagcaaatgaaattgaaggactcgcgcatcaagctgatgagtgagatcctgaacggcatcaaggtgctgaagctgtacgcctgggagcccagcttcctgaagcaggtggagggcatcaggcagggtgagctccagctgctgcgcacggcggcctacctccacaccacaaccaccttcacctggatgtgcagccccttcctggtgaggcttggcacagggctgggtccctgcctccagggctctgggtgcccaggcatggccagggctcattggactctaccctgacaccacctccacgctgctcaggtgaccctgatcaccctctgggtgtacgtgtacgtggacccaaacaatgtgctggacgccg

SEQ ID NO: 56013 - DNA, 1719 bp, Artificial Sequence
  derived and/or modified sequence
atggacgccctgtgcggcagcggcgagctgggcagcaagttctgggacagcaacctgagcgtgcacaccgagaaccccgacctgaccccctgcttccagaacagcctgctggcctgggtgccctgcatctacctgtgggtggccctgccctgctacctgctgtacctgagacaccactgcagaggctacatcatcctgagccacctgagcaagctgaagatggtgctgggcgtgctgctgtggtgcgtgagctgggccgacctgttctacagcttccacggcctggtgcacggcagagcccccgcccccgtgttcttcgtgacccccctggtggtgggcgtgaccatgctgctggccaccctgctgatccagtacgagagactgcagggcgtgcagagcagcggcgtgctgatcatcttctggttcctgtgcgtggtgtgcgccatcgtgcccttcagaagcaagatcctgctggccaaggccgagggcgagatcagcgaccccttcagattcaccaccttctacatccacttcgccctggtgctgagcgccctgatcctggcctgcttcagagagaagccccccttcttcagcgccaagaacgtggaccccaacccctaccccgagaccagcgccggcttcctgagcagactgttcttctggtggttcaccaagatggccatctacggctacagacaccccctggaggagaaggacctgtggagcctgaaggaggaggacagaagccagatggtggtgcagcagctgctggaggcctggagaaagcaggagaagcagaccgccagacacaaggccagcgccgcccccggcaagaacgccagcggcgaggacgaggtgctgctgggcgccagacccagacccagaaagcccagcttcctgaaggccctgctggccaccttcggcagcagcttcctgatcagcgcctgcttcaagctgatccaggacctgctgagcttcatcaacccccagctgctgagcatcctgatcagattcatcagcaaccccatggcccccagctggtggggcttcctggtggccggcctgatgttcctgtgcagcatgatgcagagcctgatcctgcagcactactaccactacatcttcgtgaccggcgtgaagttcagaaccggcatcatgggcgtgatctacagaaaggccctggtgatcaccaacagcgtgaagagagccagcaccgtgggcgagatcgtgaacctgatgagcgtggacgcccagagattcatggacctggcccccttcctgaacctgctgtggagcgcccccctgcagatcatcctggccatctacttcctgtggcagaacctgggccccagcgtgctggccggcgtggccttcatggtgctgctgatccccctgaacggcgccgtggccgtgaagatgagagccttccaggtgaagcagatgaagctgaaggacagcagaatcaagctgatgagcgagatcctgaacggcatcaaggtgctgaagctgtacgcctgggagcccagcttcctgaagcaggtggagggcatcagacagggcgagctgcagctgctgagaaccgccgcctacctgcacaccaccaccaccttcacctggatgtgcagccccttcctggtgagactgggcaccggcctgggcccctgcctgcagggcagcggctgccccggcatggccagagcccactggaccctgccctag

SEQ ID NO: 56014 - protein, 344 aa, Artificial Sequence
  derived and/or modified sequence
MFTSTGSSGLYKAPLSKSLLLVPSALSLLLALLLPHCQKLFVYDLHAVKNDFQIWRLICGRIICLDLKDTFCSSLLIYNFRIFERRYGSRKFASFLLGSWVLSALFDFLLIEAMQYFFGITAASNLPSGFLAPVFALFVPFYCSIPRVQVAQILGPLSITNKTLIYILGLQLFTSGSYIWIVAISGLMSGLCYDSKMFQVHQVLCIPSWMAKFFSWTLEPIFSSSEPTSEARIGMGATLDIQRQQRMELLDRQLMFSQFAQGRRQRQQQGGMINWNRLFPPLRQRQNVNYQGGRQSEPAAPPLEVSEEQVARLMEMGFSRGDALEALRASNNDLNVATNFLLQH

SEQ ID NO: 56015 - DNA, 1035 bp, Artificial Sequence
  derived and/or modified sequence
atgttcaccagcaccggcagcagcggcctgtacaaggcccccctgagcaagagcctgctgctggtgcccagcgccctgagcctgctgctggccctgctgctgccccactgccagaagctgttcgtgtacgacctgcacgccgtgaagaacgacttccagatctggagactgatctgcggcagaatcatctgcctggacctgaaggacaccttctgcagcagcctgctgatctacaacttcagaatcttcgagagaagatacggcagcagaaagttcgccagcttcctgctgggcagctgggtgctgagcgccctgttcgacttcctgctgatcgaggccatgcagtacttcttcggcatcaccgccgccagcaacctgcccagcggcttcctggcccccgtgttcgccctgttcgtgcccttctactgcagcatccccagagtgcaggtggcccagatcctgggccccctgagcatcaccaacaagaccctgatctacatcctgggcctgcagctgttcaccagcggcagctacatctggatcgtggccatcagcggcctgatgagcggcctgtgctacgacagcaagatgttccaggtgcaccaggtgctgtgcatccccagctggatggccaagttcttcagctggaccctggagcccatcttcagcagcagcgagcccaccagcgaggccagaatcggcatgggcgccaccctggacatccagagacagcagagaatggagctgctggacagacagctgatgttcagccagttcgcccagggcagaagacagagacagcagcagggcggcatgatcaactggaacagactgttcccccccctgagacagagacagaacgtgaactaccagggcggcagacagagcgagcccgccgccccccccctggaggtgagcgaggagcaggtggccagactgatggagatgggcttcagcagaggcgacgccctggaggccctgagagccagcaacaacgacctgaacgtggccaccaacttcctgctgcagcactag

SEQ ID NO: 56016 - DNA, 1035 bp, Artificial Sequence
  derived and/or modified sequence
atgttcacctctactgggtccagcgggctctacaaggcccccctgagcaagtcacttcttctcgtcccttcggccctgagtctgctgcttgcactgttgctacctcattgccagaagctcttcgtgtatgacctgcatgccgttaaaaacgactttcaaatttggcgtctgatatgtggacgcatcatctgcctcgaccttaaggacactttctgcagttcgctgttgatctataacttccgcatcttcgagagaaggtatggctcgcgcaaattcgctagcttcctgctgggttcatgggtactcagtgcgctgtttgattttctgctgatagaagccatgcagtactttttcgggattaccgctgcttccaatttgccctccggatttcttgctccagttttcgccttgtttgtgccgttctattgctccatcccgagagtgcaggtcgcacagattcttggccctctgagcatcaccaacaagacactgatttacattctcggcctgcagctcttcacctcaggttcatatatttggatcgttgcgatttctgggttaatgtctgggttgtgttatgactcaaaaatgtttcaggttcaccaagttctttgcatccccagttggatggctaagttcttctcatggacgctcgagcctatatttagtagcagcgaaccaaccagcgaggcccggatcggaatgggcgcgactttggatattcagaggcaacaaagaatggagctgctggaccgccagctgatgttcagccaatttgcgcagggtcggcgccagcgacagcaacagggagggatgatcaactggaatcggctctttccaccccttagacagcgccagaacgtcaattaccaggggggaagacagtctgaacccgctgcaccacctttggaagtctcggaggagcaggtggcccggctgatggaaatggggttctcaaggggggacgcgctggaagccctgagggcctctaacaatgatttgaacgtggccaccaatttcctactgcagcactag

SEQ ID NO: 56017 - DNA, 1035 bp, Artificial Sequence
  derived and/or modified sequence
atgttcaccagcacaggcagcagcggcctgtacaaggcccccctgagcaagagcctgctgctggtgcccagcgccctgagcctgctgctggccctgctgctgccccactgccagaagctgtttgtgtatgacctgcatgctgtgaagaatgacttccagatctggaggctcatctgtggccgcatcatctgcctggacctgaaggacaccttctgcagcagcctgctgatctacaacttccgcatctttgaaagaagatatggcagcaggaagtttgccagcttcctgctgggctcctgggtgctgagcgccctgtttgacttcctgctgattgaggccatgcagtacttcttcggcatcacagctgccagcaacctgcccagcggcttcctggcccctgtgtttgccctgtttgtgcccttctactgcagcatcccccgggtgcaggtggcccagatcctgggccccctgagcatcaccaacaagaccctcatctacatcctgggcctgcagctgttcaccagcggcagctacatctggatcgtggccatcagcggcctgatgagcggcctgtgctatgacagcaagatgttccaggtgcaccaggtgctgtgcatccccagctggatggccaagttcttctcctggaccctggagcccatcttcagcagcagcgagcccaccagcgaggccagaattggcatgggcgccaccctggacatccagaggcagcagaggatggagctgctggaccggcagctgatgttcagccagtttgcccagggccggcggcagaggcagcagcagggcggcatgatcaactggaacagactcttcccccccctgcggcagaggcagaatgtgaactaccagggcggccggcagagcgagcctgctgccccacccctggaggtgtctgaggagcaggtggcccggctgatggagatgggcttcagcagaggagatgccctggaggccctgcgggccagcaacaatgacctgaatgtggccaccaacttcctgctgcagcactag

SEQ ID NO: 56018 - DNA, 1035 bp, Artificial Sequence
  derived and/or modified sequence
atgttcaccagcaccggcagcagcggcctgtacaaggcccccctgtcaaagtctttgctactggtgccttccgctctgtctttgttgcttgccctgctgctgcctcattgccagaagctctttgtgtatgatctgcatgccgttaaaaacgattttcagatctggagactcatatgtgggagaatcatctgtttagatctgaaagataccttttgcagctctctgctaatctacaacttccgcatctttgagcgtcgatacgggtctcgtaagttcgcctctttccttctgggaagctgggttttgtctgcattgttcgatttcctgttaatcgaggcgatgcagtatttctttgggatcacggcagcctctaatctcccatccggatttttggctcccgtgttcgccttatttgtacccttttactgctcaataccacgggtgcaggtggctcagatcttaggtcccctctctattaccaacaaaactctcatctatatactcggcctgcaactttttacttctggctcttacatctggatcgtcgctatttccggtctcatgtcaggcctttgttacgattcgaaaatgttccaagtgcatcaggtgctctgcatcccctcttggatggcgaagtttttttcatggactctcgagcctatcttttcgtcctctgaacccacgtccgaagcccgcattggaatgggcgccactctggacatacagcgtcagcagaggatggagctattggaccgacagctgatgttctcccaatttgcccagggaagacgccagcgacaacagcaggggggaatgattaattggaatcgtttgtttcctcccctgcggcagcgccagaatgtgaactaccagggcggccgtcagagcgagcctgctgcgccgcccctcgaggtgtccgaggagcaggtcgcacgactgatggagatgggcttctcccgaggcgacgcacttgaagctctgcgggcctctaataacgaccttaacgttgccacgaactttctactccagcactag

SEQ ID NO: 56019 - DNA, 1035 bp, Artificial Sequence
  derived and/or modified sequence
atgttcaccagcacggggtcatctggtttgtacaaagccccactgagcaagagcctgctcttggttcccagtgccctctccctcctgctggcgcttctactgcctcattgccaaaagttgtttgtctacgatctgcacgcagtcaagaatgactttcagatctggagattgatctgcgggagaataatctgtctcgatttaaaagatacattttgtagctcccttctcatttataattttaggatatttgagaggaggtacgggagcagaaaatttgcatcgttcctgctaggcagctgggtgctgtcagccctctttgactttttgctcatcgaagccatgcagtacttctttggaattacagctgcttctaaccttccttcgggattcctggccccagttttcgctctttttgtacccttctactgttctatcccacgtgtccaggtggctcagatcttggggcctcttagcatcaccaataaaaccctaatatatattctcggcctacagctcttcacaagcggctcatatatctggattgtggccatttccggcctgatgtcaggtctctgttatgactctaaaatgtttcaggtccatcaggtgctctgcatccccagttggatggctaagtttttttcctggaccctagagcccatatttagctcatccgagccgacgtcagaggcacgcatcggaatgggagcaacgctggatatccagagacagcagcgaatggagctgctggaccgtcaactgatgtttagtcagtttgcacagggacgtcggcaaagacagcagcagggtggcatgattaattggaatcgcctgttccctcccctacgccaacgccagaacgttaactatcaaggcggtcgccagagtgagcccgctgcccctccattagaagtgtccgaggaacaggtcgctcgcctgatggaaatgggcttttctcggggagatgcactcgaggcccttcgggcttctaacaatgatttgaatgtggccaccaactttctgttgcaacactag

SEQ ID NO: 56020 - DNA, 1375 bp, Artificial Sequence
  derived and/or modified sequence
ccgttcgtcagcggcgagtggcctcgcggcgccggattcgtcgctccgccaagagtgcgcctgcgcggtcgctggggctcgcacttcagcttcccctcccccggcgccctctggggctccgagcccggcgggaccatgttcaccagcaccggctccagtgggctctacaaggcgcctctgtcgaagagccttctgctggtccccagtgccctctccctcctgctcgccctcctcctgcctcactgccagaagctctttgtgtatgaccttcacgcagtcaagaacgacttccagatttggaggttgatatgtggaagaataatttgccttgatttgaaagatactttctgcagtagtctgcttatttataattttaggatatttgaaagaagatatggaagcagaaaatttgcatcctttttgctgggttcctgggttttgtcagccttatttgactttctcctcattgaagctatgcagtatttctttggcatcactgcagctagtaatttgccttctggattcctggcacctgtgtttgctctgtttgtaccattttactgctccataccaagagtccaagtggcacaaattctgggtccgttgtccatcacaaacaagacattgatttatatattgggactgcagcttttcacctctggttcctacatctggattgtagccataagtggacttatgtccggtctgtgctacgacagcaaaatgttccaggtgcatcaggtgctctgcatccccagctggatggcaaaattcttttcttggacacttgaacccatcttctcttcttcagaacccaccagcgaagccagaattgggatgggagccacgctggacatccagagacagcagagaatggagctgctggaccggcagctgatgttctctcagtttgcacaagggaggcgacagagacagcagcagggaggaatgatcaattggaatcgtctttttcctcctttacgtcagcgacaaaacgtaaactatcagggcggtcggcagtctgagccagcagcgccccctctagaagtttctgaggaacaggtcgcccggctcatggagatgggattttccagaggtgatgctttggaagccctgagagcttcaaacaatgacctcaatgtcgccaccaacttcctgctgcagcactgatagtcccaggccaacactgggaccggaccggcagccgagtgacagtgcgtggtccccaccatcagatcagcccggggaccgagcatctctggtgctgatgttcttgtgggaagagggaggttccaccgcacccctgccctcaaccgcaagactgttgccgttttagtgtggagataagtttgccattacattagcatgtattttc

SEQ ID NO: 56021 - protein, 313 aa, Artificial Sequence
  derived and/or modified sequence
MALLCYNRGCGQRFDPETNSDDACTYHPGVPVFHDALKGCTKGRHNSEKPPEPVKPEVKTTEKKELCELKPKFQEHIIQAPKPVEAIKRPSPDEPMTNLELKISASLKQALDKLKLSSGNEENKKEEDNDEIKIGTSCKNGGCSKTYQGLESLEEVCVYHSGVPIFHEGMKYWSCCRRKTSDFNTFLAQEGCTKGKHMWTKKDAGKKVVPCRHDWHQTGGEVTISVYAKNSLPELSRVEANSTLLNVHIVFEGEKEFDQNVKLWGVIDVKRSYVTMTATKIEITMRKAEPMQWASLELPAAKKQEKQKDATTD

SEQ ID NO: 56022 - DNA, 942 bp, Artificial Sequence
  derived and/or modified sequence
atggccctgctgtgctacaacagaggctgcggccagagattcgaccccgagaccaacagcgacgacgcctgcacctaccaccccggcgtgcccgtgttccacgacgccctgaagggctgcaccaagggcagacacaacagcgagaagccccccgagcccgtgaagcccgaggtgaagaccaccgagaagaaggagctgtgcgagctgaagcccaagttccaggagcacatcatccaggcccccaagcccgtggaggccatcaagagacccagccccgacgagcccatgaccaacctggagctgaagatcagcgccagcctgaagcaggccctggacaagctgaagctgagcagcggcaacgaggagaacaagaaggaggaggacaacgacgagatcaagatcggcaccagctgcaagaacggcggctgcagcaagacctaccagggcctggagagcctggaggaggtgtgcgtgtaccacagcggcgtgcccatcttccacgagggcatgaagtactggagctgctgcagaagaaagaccagcgacttcaacaccttcctggcccaggagggctgcaccaagggcaagcacatgtggaccaagaaggacgccggcaagaaggtggtgccctgcagacacgactggcaccagaccggcggcgaggtgaccatcagcgtgtacgccaagaacagcctgcccgagctgagcagagtggaggccaacagcaccctgctgaacgtgcacatcgtgttcgagggcgagaaggagttcgaccagaacgtgaagctgtggggcgtgatcgacgtgaagagaagctacgtgaccatgaccgccaccaagatcgagatcaccatgagaaaggccgagcccatgcagtgggccagcctggagctgcccgccgccaagaagcaggagaagcagaaggacgccaccaccgactag

SEQ ID NO: 56023 - DNA, 2003 bp, Artificial Sequence
  derived and/or modified sequence
tagccgcctcagtcgtcagaccggtgctagcgacacgggagtggcaaacgcatcctcttgccgttcccggtgtttgggccttgcctgtgacggtgggaaaagaaaatggccttgctgtgctacaaccggggctgcggtcagcgcttcgatcctgagaccaattccgacgatgcttgcacataccacccaggtgttccggtctttcacgatgcattaaagggctgtacaaaaggtagacataatagtgagaagccacctgagccagtcaaacctgaagtcaagactactgagaagaaggagctatgtgaattaaaacccaaatttcaggaacacatcattcaagcccctaagccagtagaagcaataaaaagaccaagcccagatgaaccaatgacaaatttggaattaaaaatatctgcctccctaaaacaagcacttgataaacttaaactgtcatcagggaatgaagaaaataagaaagaagaagacaatgatgaaattaagattgggacctcatgtaagaatggagggtgttcaaagacataccagggtctagagagtctagaagaagtctgtgtatatcattctggagtacctattttccatgaggggatgaaatactggagctgttgtagaagaaaaacttctgattttaatacattcttagcccaagagggctgtacaaaagggaaacacatgtggactaaaaaagatgctgggaaaaaagttgttccatgtagacatgactggcatcagactggaggtgaagttaccatttcagtatatgctaaaaactcacttccagaacttagccgagtagaagcaaatagcacattgttaaatgtgcatattgtatttgaaggagagaaggaatttgatcaaaatgtgaaattatggggtgtgattgatgtaaagcgaagttatgtaactatgactgcaacaaagattgaaatcactatgagaaaagctgaaccgatgcagtgggcaagccttgaactgcctgcagctaaaaagcaggaaaaacaaaaagatgccacaacagattgagtgggagatggaaggaaggctattacattatttccgaatttttaatactgtgtgaagtggtggcttgctgctgtaatcttttgttttgttgttgtgttactgaatgtggcatttcagggttaacattaggttcttaaaagccaaagtcagtttgtctttttgtgcctctcatctttcttttgtgttatgtaagattgattattcatttctccctactggtaggaaccatagttgtgtcctatacttgaagaggctggaaagtagcccataaccataattgcagtatttctttgtatttctctgttaagcaaagaaatattaaggaacattttttttatgtttttgtattattccataattagtaaagcaagatgaaatgtcaaattttaatcagttttttcatggatttgtgttcttacagtacttgaaaatatttaaggaagagatgaagctctgcagttttttctatgtgggatgattacttttttaaggaggattaattctgaggtagtatagtaactaaaggggaatatatgaattgtttaacaaattagaatttgtttacaactacttgaatttttaaattatgtcaaaacttacattacttgccaagcagtatgatgttataggaaacataaataagattacagaggtatcaatttggttaaaattcaccattttataagactaagcaataatcttaacaacctctttcctgaatatttaaatgtgtttgtatggtgttatgactaattgttactgatttagagactaagccctcttaaaacctttagttaaatataaaaagaaattatatatatcttgcctccctgatggaaaactatataaaattgtagacttaaaaggtttgtggaaatacattaggatatcagaaaactaaatatatggagttgctttatgactattacatgttaaataaaaatagcttaattgtt

SEQ ID NO: 56024 - DNA, 942 bp, Artificial Sequence
  derived and/or modified sequence
atggctctgctgtgttacaacaggggctgtgggcagaggtttgatccggaaacgaacagtgacgacgcatgcacataccacccaggggttcctgtcttccacgatgctctgaagggctgtactaaaggtaggcataactctgagaagccccccgagcctgtgaagcctgaggtcaagactaccgagaaaaaagaactttgcgagctgaagcctaaatttcaagagcatatcatccaggctccaaagcccgtggaagccattaagcgcccatcacccgatgagccgatgacgaacctggaactgaagatatcagccagccttaagcaagcgttggataagctgaaattatcatcagggaatgaggaaaataagaaagaggaggataacgatgaaataaagattggaacatcttgcaaaaacggggggtgcagcaagacttaccagggtctcgagtccctcgaggaggtgtgtgtctatcatagtggagtgcctatcttccacgaagggatgaaatactggtcctgttgtcggagaaaaacaagcgactttaacacattcctggctcaggagggctgtaccaaggggaagcacatgtggaccaagaaggatgccgggaagaaagtggtcccttgccggcatgattggcatcagacaggaggtgaagttaccatttctgtatacgcaaaaaacagcctccccgagctgtccagggtagaagccaactcaaccctgctgaacgtacatatcgtttttgagggcgaaaaggaatttgatcagaatgtgaaactctggggcgtaatcgacgtcaaacgaagctatgtcactatgacagcgactaagatcgaaattacaatgcgtaaagctgaacccatgcagtgggccagtctggagttaccggctgcgaagaagcaggagaagcagaaagacgccacaactgactag

SEQ ID NO: 56025 - DNA, 942 bp, Artificial Sequence
  derived and/or modified sequence
atggccctgctgtgctacaacagaggctgcggccagagatttgatcctgagaccaacagtgatgatgcctgcacctaccaccctggggtgcctgtgttccatgatgccctgaagggctgcaccaagggccgccacaacagcgagaagcccccagagcctgtgaagccagaggtgaagaccacagagaagaaggagctgtgtgagctgaagcccaagttccaggagcacatcatccaggcccccaagcctgtggaggccatcaagaggcccagcccagatgagcccatgaccaacctggagctgaagatcagcgccagcctgaagcaggccctggacaagctgaagctgagcagtggaaatgaggagaacaagaaggaggaggacaatgatgagatcaagattggcaccagctgcaagaatggaggctgcagcaagacctaccagggcctggagagcctggaggaggtgtgtgtgtaccacagcggcgtgcccatcttccacgagggcatgaagtactggagctgctgcaggaggaagaccagtgacttcaacaccttcctggcccaggagggctgcaccaagggcaagcacatgtggaccaagaaggatgctgggaagaaggtggtgccctgcagacatgactggcaccagacaggaggagaggtgaccatctctgtgtatgccaagaacagcctgcctgagctgagccgggtggaggccaacagcaccctgctgaatgtgcacatcgtgtttgaaggagagaaggagtttgaccagaatgtgaagctgtggggcgtgattgatgtgaagaggagctatgtgaccatgacagccaccaagattgagatcaccatgaggaaggccgagcccatgcagtgggccagcctggagctgcctgctgccaagaagcaggagaagcagaaggatgccaccacagactag

SEQ ID NO: 56026 - DNA, 942 bp, Artificial Sequence
  derived and/or modified sequence
atggccctgctgtgctacaaccggggctgcggccagcggttcgacccggaaactaactctgacgatgcgtgcacttaccacccaggtgtgcccgtatttcacgacgcactgaaagggtgtacaaagggccggcataatagcgagaaacctccagaaccagttaaaccagaggttaagacgaccgagaaaaaagaattgtgtgaacttaagccaaaattccaagagcacatcatccaagcgcccaagcccgtcgaagcgataaaaagaccttcccccgacgagcccatgacaaacctcgaactgaagatatccgcctccctaaagcaggctctggacaagctgaagctatcatcaggtaacgaggaaaacaaaaaggaggaggacaacgatgaaattaagattggcacgagttgcaagaacggtgggtgcagtaaaacatatcagggcctcgaatcccttgaagaagtatgcgtttatcactctggagtgccaatattccacgagggaatgaagtattggagttgctgcaggcggaagacatcagacttcaacacgtttttagcacaggagggctgtactaaagggaagcacatgtggaccaaaaaagacgcaggcaagaaagttgtcccgtgtcgccacgactggcaccaaactggcggagaagtgacaatctcagtttacgccaaaaactctttaccagaattgtcacgagtcgaggccaattccactctgctgaacgtgcatattgttttcgaaggcgaaaaagagtttgatcagaatgtcaagctctggggtgtgatcgacgtgaagcgaagctatgtaaccatgacagctactaagatcgaaattaccatgaggaaagcagagccaatgcagtgggcatccctggaactgcccgccgccaagaaacaggagaagcaaaaggacgcaacaaccgattag

SEQ ID NO: 56027 - DNA, 942 bp, Artificial Sequence
  derived and/or modified sequence
atggcgctgctttgttacaatcgcggatgtgggcagagattcgacccggagacgaacagtgatgatgcctgcacttaccaccccggtgtgccagtgttccacgacgcgttgaagggctgcactaagggtaggcacaatagcgaaaaaccgcctgagcccgtcaaacccgaagtaaagacaacagaaaagaaggaactttgcgagctgaaacccaaatttcaggaacatattatacaagcacccaaaccagtggaagctattaaacgacccagccctgacgagcctatgactaatctggagctgaagatttccgcttccctgaagcaggcattggataagcttaaactcagtagtgggaacgaagagaacaagaaagaagaggacaatgatgagattaaaatcggaacgagctgcaagaacggtgggtgtagtaagacgtatcaggggctagagtcactggaagaagtgtgcgtgtatcattctggcgtgcccattttccacgagggcatgaagtattggtcatgctgcaggcgtaagacctccgattttaatactttcttggctcaggaggggtgtacaaaagggaaacatatgtggactaaaaaggacgctggcaaaaaggtcgttccctgcagacatgattggcaccagactgggggagaagtcacaatttcggtatacgcgaagaatagtttgccagagctctctcgggttgaggctaactcaacactcttaaatgtccatattgtattcgagggggagaaggagtttgaccaaaacgttaagctgtggggagtgatcgacgtgaaacggtcctatgtaacaatgactgctacgaagatcgagataacaatgagaaaagcagaacctatgcagtgggccagcctcgagttgcctgccgctaagaaacaggagaagcaaaaagatgccaccacagactag

SEQ ID NO: 56028 - protein, 1128 aa, Artificial Sequence
  derived and/or modified sequence
MADCVRGWAAVGGALPTSPGPSLGAKGALKAGVGEDGVGGGRLVHGRARYDSGGVSNGDCSLGVSGDEARASPTRGPRGVALAPTPSAVVCTLPRESKPGGLPRRSSIIKDGTKQKRERKKTVSFSSMPTEKKISSASDCINSMVEGSELKKVRSNSRIYHRYFLLDADMQSLRWEPSKKDSEKAKIDIKSIKEVRTGKNTDIFRSNGISDQISEDCAFSVIYGENYESLDLVANSADVANIWVTGLRYLISYGKHTLDMLESSQDNMRTSWVSQMFSEIDVDNLGHITLCNAVQCIRNLNPGLKTSKIELKFKELHKSKDKAGTEVTKEEFIEVFHELCTRPEIYFLLVQFSSNKEFLDTKDLMMFLEAEQGVAHINEEISLEIIHKYEPSKEGQEKGWLSIDGFTNYLMSPDCYIFDPEHKKVCQDMKQPLSHYFINSSHNTYLIEDQFRGPSDITGYIRALKMGCRSVELDVWDGPDNEPVIYTGHTMTSQIVFRSVIDIINKYAFFASEYPLILCLENHCSIKQQKVMVQHMKKLLGDKLYTTSPNVEESYLPSPDVLKGKILIKAKKLSSNCSGVEGDVTDEDEGAEMSQRMGKENMEQPNNVPVKRFQLCKELSELVSICKSVQFKEFQVSFQVQKYWEVCSFNEVLASKYANENPGDFVNYNKRFLARVFPSPMRIDSSNMNPQDFWKCGCQIVAMNFQTPGLMMDLNIGWFRQNGNCGYVLRPAIMREEVSFFSANTKDSVPGVSPQLLHIKIISGQNFPKPKGSGAKGDVVDPYVYVEIHGIPADCAEQRTKTVHQNGDAPIFDESFEFQINLPELAMVRFVVLDDDYIGDEFIGQYTIPFECLQTGYRHVPLQSLTGEVLAHASLFVHVAITNRRGGGKPHKRGLSVRKGKKSREYASLRTLWIKTVDEVFKNAQPPIRDATDLRENMQNAVVSFKELCGLSSVANLMQCMLAVSPRFLGPDNTPLVVLNLSEQYPTMELQGIVPEVLKKIVTTYDMMIQSLKALIENADAVYEKIVHCQKAAMEFHEHLHSIGTKEGLKERKLQKAVESFTWNITILKGQADLLKYAKNETLENLKQIHFAAVSCGLNKPGTENADVQKPRRSLEVIPEKANDETGE

SEQ ID NO: 56029 - protein, 1001 aa, Artificial Sequence
  derived and/or modified sequence
MPTEKKISSASDCINSMVEGSELKKVRSNSRIYHRYFLLDADMQSLRWEPSKKDSEKAKIDIKSIKEVRTGKNTDIFRSNGISDQISEDCAFSVIYGENYESLDLVANSADVANIWVTGLRYLISYGKHTLDMLESSQDNMRTSWVSQMFSEIDVDNLGHITLCNAVQCIRNLNPGLKTSKIELKFKELHKSKDKAGTEVTKEEFIEVFHELCTRPEIYFLLVQFSSNKEFLDTKDLMMFLEAEQGVAHINEEISLEIIHKYEPSKEGQEKGWLSIDGFTNYLMSPDCYIFDPEHKKVCQDMKQPLSHYFINSSHNTYLIEDQFRGPSDITGYIRALKMGCRSVELDVWDGPDNEPVIYTGHTMTSQIVFRSVIDIINKYAFFASEYPLILCLENHCSIKQQKVMVQHMKKLLGDKLYTTSPNVEESYLPSPDVLKGKILIKAKKLSSNCSGVEGDVTDEDEGAEMSQRMGKENMEQPNNVPVKRFQLCKELSELVSICKSVQFKEFQVSFQVQKYWEVCSFNEVLASKYANENPGDFVNYNKRFLARVFPSPMRIDSSNMNPQDFWKCGCQIVAMNFQTPGLMMDLNIGWFRQNGNCGYVLRPAIMREEVSFFSANTKDSVPGVSPQLLHIKIISGQNFPKPKGSGAKGDVVDPYVYVEIHGIPADCAEQRTKTVHQNGDAPIFDESFEFQINLPELAMVRFVVLDDDYIGDEFIGQYTIPFECLQTGYRHVPLQSLTGEVLAHASLFVHVAITNRRGGGKPHKRGLSVRKGKKSREYASLRTLWIKTVDEVFKNAQPPIRDATDLRENMQNAVVSFKELCGLSSVANLMQCMLAVSPRFLGPDNTPLVVLNLSEQYPTMELQGIVPEVLKKIVTTYDMMIQSLKALIENADAVYEKIVHCQKAAMEFHEHLHSIGTKEGLKERKLQKAVESFTWNITILKGQADLLKYAKNETLENLKQIHFAAVSCGLNKPGTENADVQKPRRSLEVIPEKANDETGE

SEQ ID NO: 56030 - DNA, 3387 bp, Artificial Sequence
  derived and/or modified sequence
atggcagactgcgtccgtggatgggccgccgtgggcggtgcattaccaacgtctcccggaccaagcctgggagctaagggagccctcaaagcgggcgtgggcgaggatggcgtgggaggaggaaggctggttcacggtagagcaagatatgattctggaggggttagcaatggggattgtagcctgggagtttcaggtgatgaagcaagggcttcccccacaaggggaccacgcggagttgcactcgcccctaccccttccgccgtcgtgtgtactctcccccgagagtccaaacccgggggtctgccaagacgtagttcaatcattaaagacggaacaaagcagaagcgtgaacgcaagaagacagttagtttctcctcaatgcctactgagaagaaaatttctagcgctagcgattgtatcaactctatggtggaagggtccgaactgaagaaggttcgatcaaacagcagaatctaccatcgctattttctgctggacgctgatatgcagagtttgaggtgggaacctagcaagaaagactctgagaaggcaaagatcgatattaaatcaatcaaggaggtgcgcacgggcaaaaatactgatattttccggtctaatggaatttccgatcagatttccgaggactgtgcattcagcgtgatctacggcgaaaactatgagtctctggacttagtggcaaacagcgcagacgtggccaacatctgggtaacaggtctcagatacctgatcagctatggcaagcatacactggatatgctggagtcgagtcaggataatatgcggacaagctgggtttctcagatgtttagtgagatcgatgtcgataatctggggcacatcacattatgtaatgcggttcaatgtattcgcaatctgaatcctgggctgaaaacttccaaaattgagcttaaattcaaagagttacacaagagcaaagacaaggccggaacagaagtcactaaagaagaattcatagaagtgttccatgagctgtgtacacgacccgagatctattttctgctggtgcagttcagcagtaataaggaatttttggataccaaagatctcatgatgttcctcgaggctgagcaaggggttgcgcacatcaatgaggagatctcgctcgaaattatacacaagtatgagccctctaaagaaggacaggagaaggggtggctatcaatcgatggctttacaaactacctgatgtctccagattgctatatctttgacccggagcacaagaaggtgtgccaggacatgaagcagccattgtcccactactttatcaactcatctcacaacacctacctcatcgaagatcaatttaggggaccaagtgacatcaccggttatatacgcgccctgaaaatggggtgcaggagcgttgaactagacgtctgggacggtccagataacgagcctgtgatctacaccggccacacgatgacttcccagatagtgttccgctcagtgattgacatcataaacaaatacgctttctttgcaagcgagtatcccctcattctctgcctcgagaatcattgctcaatcaaacagcagaaggttatggttcaacatatgaaaaagttattgggggacaaactgtataccacttctccaaacgtggaggagagttacctcccatcgccagatgtactcaaaggaaaaatcctgatcaaggcaaagaagctttctagcaattgtagtggggtcgagggagatgttactgatgaggatgaaggtgcagagatgagccagcgaatgggaaaagaaaacatggaacagcctaataacgtgccagttaagcgctttcagttgtgcaaagagctttctgagcttgtatcaatctgcaagtccgtacaattcaaggaatttcaggtttccttccaggtgcagaagtactgggaagtgtgcagttttaacgaggttctagcaagcaaatacgccaatgagaacccgggtgacttcgtgaattacaataaacgcttcttagcaagggtatttcctagccctatgagaattgatagctccaacatgaatccccaggatttttggaaatgtgggtgtcagatcgttgcaatgaattttcaaacccctggccttatgatggatttgaatattggatggtttaggcagaacggaaactgcggctatgtgctacgcccagctattatgcgcgaagaagtgtctttcttcagcgctaacactaaggactctgtgcctggcgttagcccccagctactgcatattaaaattattagtggccaaaatttccctaaacctaagggttcaggagccaaaggcgacgttgtggacccctatgtctatgtggagattcacggtattcccgccgattgtgccgaacagagaaccaagacggtgcaccaaaatggcgatgcccctatttttgatgaatcgtttgaattccaaatcaatctaccggagctggcgatggttcggtttgtcgtgctcgatgacgactatatcggcgatgagtttatcggccagtatacaattcccttcgagtgtctgcagacaggatacagacatgtgcccctacagtctctgacaggagaagtattggctcatgcttcactgttcgtgcatgtggcaatcaccaaccgtcgtggtggtggaaagcctcataagaggggtctgtctgtgaggaaaggcaaaaaaagccgagagtacgcgtccctacgcactctgtggattaagactgtggatgaggtgttcaaaaacgcccagcccccaatccgggacgcaaccgatctgcgtgaaaatatgcagaacgcagtggtgagtttcaaagagctatgcggacttagctccgtggccaatctgatgcagtgtatgctggctgtaagtccaaggtttctcggcccggacaatacgcctctcgtggttctcaacctgtctgagcagtaccccacaatggagctgcaggggattgtgccagaagtattgaagaagatagtgaccacgtatgacatgatgattcagagcttaaaggctttaatagaaaatgccgatgccgtgtacgaaaagattgtccattgccagaaagccgcaatggaatttcacgaacaccttcacagcatcggcaccaaagaggggcttaaggagagaaagcttcagaaggccgtagaatcgtttacttggaacatcactattctcaagggtcaggcggatctgctgaaatatgcaaagaatgaaacattggagaacttgaagcagattcattttgccgctgtgtcttgcggactaaataagcctgggacagaaaatgctgacgtccagaagccacgcaggagtctggaggtgattcctgagaaggccaatgacgagacaggagagtag

SEQ ID NO: 56031 - DNA, 3387 bp, Artificial Sequence
  derived and/or modified sequence
atggctgactgtgtgcggggctgggccgctgtgggcggggccctgcccaccagccctggccccagcctgggcgccaagggggccctgaaggccggcgtgggagaagatggagtgggcggcggccgcctggtgcacggccgggcccgctatgacagcggcggcgtgtccaatggagactgcagcctgggcgtgtctggagatgaggcccgggccagccccacccggggcccccggggcgtggccctggcccccaccccatctgctgtggtgtgcaccctgccccgggagagcaagccaggcggcctgccccggcgcagcagcatcatcaaggatggcaccaagcagaagcgggagaggaagaagacagtgtccttcagctccatgcccacagagaagaagatcagcagcgccagtgactgcatcaacagcatggtggagggcagcgagctgaagaaggtgcgcagcaacagccgcatctaccaccgctacttcctgctggatgctgacatgcagagcctgcgctgggagcccagcaagaaggacagcgagaaggccaagattgacatcaagagcatcaaggaggtgaggacaggcaagaacacagacatcttccgcagcaatggcatcagtgaccagatcagcgaggactgtgccttcagcgtcatctatggagaaaattatgagagcctggacctggtggccaacagcgcagatgtggccaacatctgggtgacaggcctgcgctacctgatctcctatggcaagcacaccctggacatgctggagagcagccaggacaacatgaggacctcctgggtgtcccagatgttcagcgagattgatgtggacaacctgggccacatcaccctgtgcaatgctgtgcagtgcatccggaacctgaaccctggcctgaagaccagcaagattgagctgaagttcaaggagctgcacaagagcaaggacaaggccggcacagaggtgaccaaggaggagttcatcgaggtgttccacgagctgtgcaccaggcctgagatctacttcctgctggtgcagttcagcagcaacaaggagttcctggacaccaaggacctgatgatgttcctggaggccgagcagggcgtggcccacatcaatgaggagatcagcctggagatcatccacaagtatgagcccagcaaggagggccaggagaagggctggctgagcattgatggcttcaccaactacctgatgagcccagactgctacatctttgatcctgagcacaagaaggtgtgccaggacatgaagcagcccctgagccactacttcatcaacagcagccacaacacctacctgattgaggaccagttccggggccccagcgacatcaccggctacatccgggccctgaagatgggctgccgctctgtggagctggatgtgtgggatggccctgacaatgaacctgtgatctacacaggccacaccatgaccagccagatcgtgttccgctctgtgattgacatcatcaacaagtatgccttctttgccagcgagtaccccctcatcctgtgcctggagaaccactgcagcatcaagcagcagaaggtgatggtgcagcacatgaagaagctgctgggggacaagctgtacaccaccagccccaacgtggaggagagctacctgcccagcccagatgtgctgaagggcaagatcctgatcaaggccaagaagctgagcagcaactgcagcggcgtggagggagatgtgacagatgaagatgagggcgctgagatgagccagaggatgggcaaggagaacatggagcagcccaacaacgtgcctgtgaagcgcttccagctgtgcaaggagctgtctgagctggtgtccatctgcaagtctgtgcagttcaaggagttccaggtgtccttccaggtgcagaagtactgggaggtgtgcagcttcaatgaggtgctggccagcaaatatgccaatgaaaatcctggggactttgtgaactacaacaagcgcttcctggcccgggtcttccccagccccatgagaattgacagcagcaacatgaacccccaggacttctggaagtgtggctgccagatcgtggccatgaacttccagaccccaggcctgatgatggacctgaacatcggctggttccggcagaatggaaactgtggctacgtgctgcggcctgccatcatgagggaggaggtgtccttcttcagcgccaacaccaaggacagcgtgcctggggtgagcccccagctgctgcacatcaagatcatcagcggccagaacttccccaagcccaagggcagcggggccaagggagatgtggtggacccctacgtgtatgtggagatccacggcatcccagctgactgtgccgagcagaggaccaagacagtgcaccagaatggagatgcccccatctttgatgagagctttgagttccagatcaacctgcctgagctggccatggtgcgctttgtggtgctggatgatgactacatcggagatgagttcatcggccagtacaccatcccctttgaatgtctgcagacaggctacagacatgtgcccctgcagagcctgaccggggaggtgctggcccacgccagcctgtttgtgcacgtggccatcaccaacagaagaggaggcggcaagccccacaagaggggcctgtctgtgaggaagggcaagaagagccgggagtatgccagcctgcggaccctgtggatcaagacagtggatgaggtgttcaagaatgcccagccccccatcagagatgccacagacctgcgggagaacatgcagaatgctgtggtgtccttcaaggagctgtgtggcctgagctctgtggccaacctgatgcagtgcatgctggccgtgagcccccgcttcctgggccctgacaacacccccctggtggtgctgaacctgtctgagcagtaccccaccatggagctgcagggcatcgtgcctgaggtgctgaagaagatcgtgaccacctatgacatgatgatccagagcctgaaggccctgattgaaaatgctgatgctgtgtatgagaagatcgtgcactgccagaaggccgccatggagttccacgagcacctgcacagcatcggcaccaaggagggcctgaaggagaggaagctgcagaaggctgtggagagcttcacctggaacatcaccatcctgaagggccaggccgacctgctgaagtatgccaagaatgagaccctggagaacctgaagcagatccactttgctgctgtgtcctgtggcctgaacaagccaggcacagaaaatgctgatgtgcagaagccccggcgcagcctggaggtgattcctgagaaggccaatgatgagaccggggagtag

SEQ ID NO: 56032 - DNA, 3387 bp, Artificial Sequence
  derived and/or modified sequence
atggccgactgcgtgcggggctgggccgccgtgggcggcgccctgccaaccagtccagggccttctctgggagccaaaggggctctgaaggccggcgttggagaggacggagttggcggcggacgtctggtgcatgggcgagccaggtatgactctggcggcgtgagcaacggagattgtagcctaggcgtttccggtgacgaagcccgcgcgagcccaactagaggaccaagaggagtggccctagcacctacccccagtgccgtcgtttgtaccctacctcgagagagtaaacctggtgggcttccaagacgctcaagcatcatcaaggacggaaccaaacaaaagagagaaaggaagaagaccgttagcttctccagcatgccaacagaaaagaagatctcgagcgccagcgattgtattaacagcatggtggaggggtcagagctcaagaaagttagatccaatagtcggatctaccataggtacttcctgttggacgcagacatgcagtctctgaggtgggaaccatcaaagaaggactctgagaaagcgaagatagatatcaagagcattaaggaggtgcgaaccgggaagaacaccgatatttttagatccaacggcatctctgaccagatctccgaggattgtgcgttctcagtgatttatggcgagaactacgagtctttggacctggtagcaaacagcgccgatgtggccaatatttgggtgaccggactgaggtatcttatcagctatggcaaacacacactggacatgcttgaatcctcacaagacaatatgaggacaagttgggtgtctcagatgttcagtgagatagacgtcgacaatctgggccacatcactctttgtaatgccgtgcagtgcatccgcaaccttaacccaggattaaagacctcgaaaatagagctgaaatttaaagaactgcacaagtccaaagacaaggccgggactgaggtcacaaaggaagagttcattgaggtatttcacgaactttgcacccggcccgaaatctacttcctgcttgtccagttttcctcgaacaaagagtttctagatacaaaagacctcatgatgttcctcgaggcagagcagggggttgctcatattaatgaggaaatttcactggagattattcataagtacgagcctagcaaagagggccaagaaaagggatggctttctattgatggatttacaaactacctaatgtcacctgactgttatattttcgatcccgagcataaaaaggtgtgccaagacatgaaacagcccctttcgcactactttattaattcttcccataacacctatcttattgaggaccagttcagaggacctagcgatattacagggtacattcgggccctgaagatgggttgcaggagcgttgaactggatgtgtgggacggaccagacaatgagcccgtcatatatacgggacacacaatgacgtcccagatcgtatttcgatcggtgatcgatattatcaacaagtacgcctttttcgcaagcgaataccccctgattctgtgcctggagaaccactgcagcatcaagcaacagaaggtgatggtccaacatatgaaaaagctcttgggcgacaaactgtataccacctcccccaacgttgaagagagctatctgcccagcccagatgtactgaaagggaagattttgattaaggccaagaagctgagtagtaactgctcaggggtggagggcgacgtcaccgacgaggacgaaggagcggagatgagccaacgcatgggtaaagaaaatatggaacagcccaacaacgtgcccgtcaaacgtttccagctgtgcaaggaactaagtgagctggtcagcatttgtaagtctgtccagttcaaggagttccaggtgtctttccaggtgcagaaatattgggaagtatgctcctttaatgaagtgctcgcatctaagtatgctaacgagaaccctggagacttcgttaactacaataagaggttccttgcccgggtcttcccatccccgatgcgaattgattcttccaatatgaatcctcaggatttttggaaatgtggatgccagatcgtggccatgaacttccaaactcctgggttgatgatggacctgaacattggatggttcagacaaaacggtaactgtggatacgttctgcgacccgccatcatgagagaggaggtgtcgttcttctctgcgaacactaaggactcagtgcccggggtgagccctcaactgctacacatcaaaattatctccgggcagaacttcccaaaacctaagggatccggggccaagggcgacgtagtggatccttatgtgtacgtcgaaattcacgggatccctgctgattgcgccgagcagcgcactaaaactgtccaccaaaacggggatgcgccaatttttgatgagtcttttgagttccagatcaatttaccggagctcgcaatggtgagatttgtggtgttggatgatgactacatcggtgatgagtttatcgggcagtacactatcccttttgaatgcctgcagacaggctatcggcacgttccacttcaaagtctgaccggtgaggttttggcacacgccagcttattcgtgcacgttgccatcactaatcgaagggggggcggaaaaccacataaacgcggcttgagtgtccgaaaaggtaagaagtctcgagagtacgcaagcctcaggactctatggattaaaaccgtggacgaggtgttcaaaaacgctcagccccctattcgagacgcaaccgacctgcgtgaaaacatgcaaaatgcagtagtgagcttcaaggagctatgtggcctgtcctcagttgccaacctaatgcaatgtatgcttgctgtctcccccagatttcttggacccgacaacacaccactggttgtgctaaacctgtccgagcagtatccaactatggaactgcagggcatcgtgcctgaagtactgaaaaaaatagttacaacctacgacatgatgattcaaagcctcaaagctctcattgaaaatgcagatgctgtctacgagaagattgtgcattgtcagaaagctgcaatggagttccacgagcaccttcattctataggcaccaaagaaggtttaaaggagaggaaactgcagaaagctgtggaaagcttcacttggaatattaccatcttgaaggggcaagcagatctactaaaatatgctaagaacgagacgctggagaatctcaaacagattcacttcgcagctgtaagctgtggactgaacaagcccggcacagagaacgcggacgtgcagaagcctagacgcagtctagaagtgattcccgagaaagccaatgacgaaacaggtgaatag

SEQ ID NO: 56033 - DNA, 4160 bp, Artificial Sequence
  derived and/or modified sequence
ccgcgcgcggcggcccgaggcggcggcggggacgcgggggcgcgaggacgcggctttgtgcaggcgggtctgctggggcgcccatggctgattgcgtgcgtgggtgggctgccgtcggcggggccctgcccacctccccgggcccgtccctcggtgccaagggcgccctgaaagccggagtgggggaagacggtgtcgggggaggtcgcctcgtccacgggcgggcgcgctatgacagcggcggggtttccaacggagactgcagcctcggcgtgtccggggacgaagcccgggctagccctaccaggggaccccgcggcgttgcgctcgccccgacccccagcgcggtcgtctgtaccctcccccgggagagcaagccgggcggcctgccccgccggagcagcatcatcaaggatggtacaaaacagaagagggaacggaaaaagacagtctcattcagcagcatgccaacagagaagaagatcagcagtgcaagtgattgtattaattcaatggttgagggttcagaactcaaaaaggttcgctccaactctagaatttatcataggtactttttactggatgctgacatgcagagcctaaggtgggagccatctaagaaggattctgagaaagccaagattgacattaaatccatcaaggaagtgagaacaggaaaaaacacagacatattccgcagcaatggcatttctgaccagatatctgaagattgtgcgttttccgtcatatatggagagaattatgagtcactggatttggttgccaactccgcagatgttgcaaacatctgggttacaggactgcggtacctaatttcttatggaaaacatacacttgatatgttagaaagtagccaagataacatgaggacttcttgggtttcacaaatgtttagtgaaattgatgtagataaccttggacatataactctgtgtaatgctgtgcaatgtatcagaaacctcaatcctggtttaaaaacgagcaaaattgagcttaagttcaaagaattgcataaatcaaaggacaaagctggtaccgaggtcacaaaggaagaatttattgaggtttttcatgagctttgtactagacctgaaatttatttccttttagttcagttttcaagcaataaagaattccttgataccaaggaccttatgatgtttcttgaggcagaacagggtgtggcacatataaatgaggaaataagccttgaaattattcacaaatatgaaccatccaaagagggtcaggaaaagggctggctctccatagacgggttcactaattaccttatgtcacctgactgttatatattcgatccagaacataagaaggtctgtcaggatatgaagcaacctctgtctcattactttataaactcatctcataatacatacttaatagaggatcagttccgaggtccctccgacatcacaggatatattcgagctcttaaaatgggttgccggagtgttgaattagatgtatgggatgggccggacaatgaacctgtaatttacacaggccacaccatgacctctcagatagttttccgcagtgtcattgatattattaacaagtatgcattctttgcttcagagtatcctcttatcttgtgtttagaaaaccactgttccattaaacaacagaaggtaatggttcagcacatgaagaaacttttaggagacaagctctatacaacatcacccaatgttgaggaatcttatctaccatccccagatgtcctgaaagggaaaatactaattaaagcaaagaagctgtcctcaaattgctctggggtagaaggagatgttactgacgaagatgaaggagcagaaatgtctcagaggatgggaaaagagaacatggagcaacccaataatgtgcctgtgaagcgatttcagctttgtaaagaactgtctgaactggtcagcatctgcaaatcagttcagttcaaagaatttcaggtgtcgtttcaggttcagaagtactgggaagtctgttcctttaatgaagtgcttgccagcaagtacgccaatgaaaatccaggggactttgtaaattacaacaaacgttttcttgctagggtttttcccagtccaatgagaattgattccagtaacatgaatcctcaagatttttggaaatgtggttgccaaattgtagccatgaactttcagacaccaggactgatgatggacctgaatattggctggtttaggcagaacggaaactgtggctatgtcctccggccagccatcatgagggaggaggtctccttcttcagcgccaatacaaaagactctgtcccaggggtctcacctcaacttcttcacattaaaatcatcagtgggcagaactttcccaagcccaaaggatcaggtgccaaaggtgatgtggtagatccttatgtctatgttgaaatccatggaatccctgctgattgtgcagaacaaaggacaaaaacagtgcaccagaatggagacgctcccatttttgatgaaagctttgaatttcaaatcaacctgcctgaactggccatggtgcgctttgtagtgctggatgatgactacattggggatgaattcatcggccagtacacaattccctttgaatgtttacagacgggctaccgccatgtccccctgcagtccttaactggagaggtccttgcacatgcttctttatttgtccacgtggctattactaaccgaagaggaggaggaaagcctcataaaaggggcctttctgtgagaaaagggaagaaatccagggaatatgcatctttgagaacactgtggattaaaaccgtggatgaggtattcaagaatgcccagccccctatacgggatgccacagatctgagagaaaacatgcagaatgcggtggtgtcattcaaggagctgtgtggcctctcctctgtggccaatctcatgcagtgcatgttggcggtgtctccccgctttctggggcccgataacacacccctagtggtcctaaatctcagcgagcagtaccccacaatggagctgcagggaattgtgccggaggttctgaagaagatcgtaacaacttatgacatgatgattcagtccctcaaggcgttgattgaaaatgcagatgctgtatatgaaaagatcgtacattgtcagaaggcagccatggaattccatgaacacttgcacagcataggcaccaaggaaggtttgaaggaaagaaaactacaaaaagcagtggagagctttacctggaatattaccatcttaaagggacaagcagatcttttgaaatatgctaagaatgagacattggagaacctgaaacaaatccattttgctgctgtttcatgtggactgaataaaccaggcaccgaaaatgctgatgtccagaagccacgccggagcttggaagtcatacccgaaaaagcaaacgatgaaactggagaatgaggaaacttacaataaaccattatggagtttataactctaggaccaattgtagtcagatgggacatttgctttgcactcactaatgagaataatattcgggattttaaagcacaactggaatagctaattacagtctattaaaactgtgaatgtatgtagcaatcctgcgtgtgaaggcaaataaactctttaacaggcaattatattgctggccaaaatatgctatatttgtatacaaagacattctaactcagttccagtatgaagaaagattattcactctagctccactgagaaacattttcctaagtgaaaacaatttcttaagatggaaatggattggattgtcaaattattatttattggagaaaaaaacctgatctacacatttttacttatatggggttgccagagtctctgggttctagatgattttggtggcatgcttgctgagccataattactaaagagaatgtaagtggacgggttccctgaatccccggggtccttggagagccatcgaggagaatgtgcaattggactgaagctccctggctgaagatacatgccgagtcagcacatgggtagagatgatgtaaaagcagccaatctggaaacaatacattgtaaatagtttttcattgtatgaagtagtgttcacattaaaaagatgttttatgatatttctcc

SEQ ID NO: 56034 - DNA, 3348 bp, Artificial Sequence
  derived and/or modified sequence
ccgcgcgcggcggcccgaggcggcggcggggacgcgggggcgcgaggacgcggctttgtgcaggcgggtctgctggggcgcccatggctggattgcgtgcgtgggtgggctgccgtcggcggggccctgcccacctccccgggcccgtccctcggtgccaagggcgccctgaaagccggagtgggggaagacggtgtcgggggaggtcgcctcgtccacgggcgggcgcgctatgacagcggcggggtttccaacggagactgcagcctcggcgtgtccggggacgaagcccgggctagccctaccaggggaccccgcggcgttgcgctcgccccgacccccagcgcggtcgtctgtaccctcccccgggagagcaagccgggcggcctgccccgccggagcagcatcatcaaggatggtacaaaacagaagagggaacggaaaaagacagtctcattcagcagcatgccaacagagaagaagatcagcagtgcaagtgattgtattaattcaatggttgagggttcagaactcaaaaaggttcgctccaactctagaatttatcataggtactttttactggatgctgacatgcagagcctaaggtgggagccatctaagaaggattctgagaaagccaagattgacattaaatccatcaaggaagtgagaacaggaaaaaacacagacatattccgcagcaatggcatttctgaccagatatctgaagattgtgcgttttccgtcatatatggagagaattatgagtcactggatttggttgccaactccgcagatgttgcaaacatctgggttacaggactgcggtacctaatttcttatggaaaacatacacttgatatgttagaaagtagccaagataacatgaggacttcttgggtttcacaaatgtttagtgaaattgatgtagataaccttggacatataactctgtgtaatgctgtgcaatgtatcagaaacctcaatcctggtttaaaaacgagcaaaattgagcttaagttcaaagaattgcataaatcaaaggacaaagctggtaccgaggtcacaaaggaagaatttattgaggtttttcatgagctttgtactagacctgaaatttatttccttttagttcagttttcaagcaataaagaattccttgataccaaggaccttatgatgtttcttgaggcagaacagggtgtggcacatataaatgaggaaataagccttgaaattattcacaaatatgaaccatccaaagagggtcaggaaaagggctggctctccatagacgggttcactaattaccttatgtcacctgactgttatatattcgatccagaacataagaaggtctgtcaggatatgaagcaacctctgtctcattactttataaactcatctcataatacatacttaatagaggatcagttccgaggtccctccgacatcacaggatatattcgagctcttaaaatgggttgccggagtgttgaattagatgtatgggatgggccggacaatgaacctgtaatttacacaggccacaccatgacctctcagatagttttccgcagtgtcattgatattattaacaagtatgcattctttgcttcagagtatcctcttatcttgtgtttagaaaaccactgttccattaaacaacagaaggtaatggttcagcacatgaagaaacttttaggagacaagctctatacaacatcacccaatgttgaggaatcttatctaccatccccagatgtcctgaaagggaaaatactaattaaagcaaagaagctgtcctcaaattgctctggggtagaaggagatgttactgacgaagatgaaggagcagaaatgtctcagaggatgggaaaagagaacatggagcaacccaataatgtgcctgtgaagcgatttcagctttgtaaagaactgtctgaactggtcagcatctgcaaatcagttcagttcaaagaatttcaggtgtcgtttcaggttcagaagtactgggaagtctgttcctttaatgaagtgcttgccagcaagtacgccaatgaaaatccaggggactttgtaaattacaacaaacgttttcttgctagggtttttcccagtccaatgagaattgattccagtaacatgaatcctcaagatttttggaaatgtggttgccaaattgtagccatgaactttcagacaccaggactgatgatggacctgaatattggctggtttaggcagaacggaaactgtggctatgtcctccggccagccatcatgagggaggaggtctccttcttcagcgccaatacaaaagactctgtcccaggggtctcacctcaacttcttcacattaaaatcatcagtgggcagaactttcccaagcccaaaggatcaggtgccaaaggtgatgtggtagatccttatgtctatgttgaaatccatggaatccctgctgattgtgcagaacaaaggacaaaaacagtgcaccagaatggagacgctcccatttttgatgaaagctttgaatttcaaatcaacctgcctgaactggccatggtgcgctttgtagtgctggatgatgactacattggggatgaattcatcggccagtacacaattccctttgaatgtttacagacgggctaccgccatgtccccctgcagtccttaactggagaggtccttgcacatgcttctttatttgtccacgtggctattactaaccgaagaggaggaggaaagcctcataaaaggggcctttctgtgagaaaagggaagaaatccagggaatatgcatctttgagaacactgtggattaaaaccgtggatgaggtattcaagaatgcccagccccctatacgggatgccacagatctgagagaaaacatgcagaatgcggtggtgtcattcaaggagctgtgtggcctctcctctgtggccaatctcatgcagtgcatgttggcggtgtctccccgctttctggggcccgataacacacccctagtggtcctaaatctcagcgagcagtaccccacaatggagctgcagggaattgtgccggaggttctgaagaagatcgtaacaacttatgacatgatgattcagtccctcaaggcgttgattgaaaatgcagatgctgtatatgaaaagatcgtacattgtcagaaggcagccatggaattccatgaacacttgcacagcataggcaccaaggaaggtttgaaggaaagaaaactacaaaaagcagtggagagctttacctggaatattaccatcttaaagataagaaagacaggaaggaggagtatttttgtgcctcagactcccataatggtatga

SEQ ID NO: 56035 - DNA, 4153 bp, Artificial Sequence
  derived and/or modified sequence
ccgcgcgcggcggcccgaggcggcggcggggacgcgggggcgcgaggacgcggctttgtgcaggcgggtctgctggggcgcccatggctggattgcgtgcgtgggtgggctgccgtcggcggggccctgcccacctccccgggcccgtccctcggtgccaagggcgccctgaaagccggagtgggggaagacggtgtcgggggaggtcgcctcgtccacgggcgggcgcgctatgacagcggcggggtttccaacggagactgcagcctcggcgtgtccggggacgaagcccgggctagccctaccaggggaccccgcggcgttgcgctcgccccgacccccagcgcggtcgtctgtaccctcccccgggagagcaagccgggcggcctgccccgccggagcagcatcatcaaggatggtacaaaacagaagagggaacggaaaaagacagtctcattcagcagcatgccaacagagaagaagatcagcagtgcaagtgattgtattaattcaatggttgagggttcagaactcaaaaaggttcgctccaactctagaatttatcataggtactttttactggatgctgacatgcagagcctaaggtgggagccatctaagaaggattctgagaaagccaagattgacattaaatccatcaaggaagtgagaacaggaaaaaacacagacatattccgcagcaatggcatttctgaccagatatctgaagattgtgcgttttccgtcatatatggagagaattatgagtcactggatttggttgccaactccgcagatgttgcaaacatctgggttacaggactgcggtacctaatttcttatggaaaacatacacttgatatgttagaaagtagccaagataacatgaggacttcttgggtttcacaaatgtttagtgaaattgatgtagataaccttggacatataactctgtgtaatgctgtgcaatgtatcagaaacctcaatcctggtttaaaaacgagcaaaattgagcttaagttcaaagaattgcataaatcaaaggacaaagctggtaccgaggtcacaaaggaagaatttattgaggtttttcatgagctttgtactagacctgaaatttatttccttttagttcagttttcaagcaataaagaattccttgataccaaggaccttatgatgtttcttgaggcagaacagggtgtggcacatataaatgaggaaataagccttgaaattattcacaaatatgaaccatccaaagagggtcaggaaaagggctggctctccatagacgggttcactaattaccttatgtcacctgactgttatatattcgatccagaacataagaaggtctgtcaggatatgaagcaacctctgtctcattactttataaactcatctcataatacatacttaatagaggatcagttccgaggtccctccgacatcacaggatatattcgagctcttaaaatgggttgccggagtgttgaattagatgtatgggatgggccggacaatgaacctgtaatttacacaggccacaccatgacctctcagatagttttccgcagtgtcattgatattattaacaagtatgcattctttgcttcagagtatcctcttatcttgtgtttagaaaaccactgttccattaaacaacagaaggtaatggttcagcacatgaagaaacttttaggagacaagctctatacaacatcacccaatgttgaggaatcttatctaccatccccagatgtcctgaaagggaaaatactaattaaagcaaagaagctgtcctcaaattgctctggggtagaaggagatgttactgacgaagatgaaggagcagaaatgtctcagaggatgggaaaagagaacatggagcaacccaataatgtgcctgtgaagcgatttcagctttgtaaagaactgtctgaactggtcagcatctgcaaatcagttcagttcaaagaatttcaggtgtcgtttcaggttcagaagtactgggaagtctgttcctttaatgaagtgcttgccagcaagtacgccaatgaaaatccaggggactttgtaaattacaacaaacgttttcttgctagggtttttcccagtccaatgagaattgattccagtaacatgaatcctcaagatttttggaaatgtggttgccaaattgtagccatgaactttcagacaccaggactgatgatggacctgaatattggctggtttaggcagaacggaaactgtggctatgtcctccggccagccatcatgagggaggaggtctccttcttcagcgccaatacaaaagactctgtcccaggggtctcacctcaacttcttcacattaaaatcatcagtgggcagaactttcccaagcccaaaggatcaggtgccaaaggtgatgtggtagatccttatgtctatgttgaaatccatggaatccctgctgattgtgcagaacaaaggacaaaaacagtgcaccagaatggagacgctcccatttttgatgaaagctttgaatttcaaatcaacctgcctgaactggccatggtgcgctttgtagtgctggatgatgactacattggggatgaattcatcggccagtacacaattccctttgaatgtttacagacgggctaccgccatgtccccctgcagtccttaactggagaggtccttgcacatgcttctttatttgtccacgtggctattactaaccgaagaggaggaggaaagcctcataaaaggggcctttctgtgagaaaagggaagaaatccagggaatatgcatctttgagaacactgtggattaaaaccgtggatgaggtattcaagaatgcccagccccctatacgggatgccacagatctgagagaaaacatgcagaatgcggtggtgtcattcaaggagctgtgtggcctctcctctgtggccaatctcatgcagtgcatgttggcggtgtctccccgctttctggggcccgataacacacccctagtggtcctaaatctcagcgagcagtaccccacaatggagctgcagggaattgtgccggaggttctgaagaagatcgtaacaacttatgacatgatgattcagtccctcaaggcgttgattgaaaatgcagatgctgtatatgaaaagatcgtacattgtcagaaggcagccatggaattccatgaacacttgcacagcataggcaccaaggaaggtttgaaggaaagaaaactacaaaaagcagtggagagctttacctggaatattaccatcttaaagggacaagcagatcttttgaaatatgctaagaatgagacattggagaacctgaaacaaatccattttgctgctgtttcatgtggactgaataaaccaggcaccgaaaatgctgatgtccagaagccacgccggagcttggaagtcatacccgaaaaagcaaacgatgaaactggagaatgaggaaacttacaataaaccattatggagtttataactctaggaccaattgtagtcagatgggacatttgctttgcactcactaatgagaataatattcgggattttaaagcacaactggaatagctaattacagtctattaaaactgtgaatgtatgtagcaatcctgcgtgtgaaggcaaataaactctttaacaggcaattatattgctggccaaaatatgctatatttgtatacaaagacattctaactcagttccagtatgaagaaagattattcactctagctccactgagaaacattttcctaagtgaaaacaatttcttaagatggaaatggattggattgtcaaattattatttattggagaaaaaaacctgatctacacatttttacttatatggggttgccagagtctctgggttctagatgattttggtggcatgcttgctgagccataattactaaagagaatgtaagtggacgggttccctgaatccccggggtccttggagagccatcgaggagaatgtgcaattggactgaagctccctggctgaagatacatgccgagtcagcacatgggtagagatgatgtaaaagcagccaatctggaaacaatacattgtaaatagtttttcattgtatgaagtagtgttcacattaaaaagatgttttatgat

SEQ ID NO: 56036 - DNA, 3387 bp, Artificial Sequence
  derived and/or modified sequence
atggcagattgcgtgcggggatgggcagctgtgggtggagccctccccaccagcccgggtccatcactgggggctaagggcgcactcaaagccggtgtgggtgaagatggcgttggcggaggtcgcctggtacatgggagggccaggtacgattcagggggtgtaagtaatggcgactgttcccttggcgtgtctggggatgaagcacgagcctcacccacccggggtccaagaggggtggccctggctcctactccaagcgccgtggtgtgtacactgccaagagaatcgaaacccggtggcctcccacggcgatcctccatcattaaagacggtaccaaacagaaacgcgagcgcaaaaaaaccgtgagcttcagttctatgcctaccgaaaagaagatatcctcagcatccgattgcatcaattccatggttgaaggcagtgagctgaagaaagttcggtcaaattctcgaatctatcatcgatactttctgctagatgcggacatgcagagtctgcggtgggaaccctccaagaaagattccgagaaggccaagattgacatcaaatccataaaggaggtgagaacaggaaagaataccgatatattccgatccaacgggatcagtgatcagatcagcgaagactgcgctttttccgttatttacggtgagaactacgaatcccttgatctggtagcaaacagcgcggatgtggccaatatttgggtgacaggtctgcgttatcttatttcttacggaaaacatacattagatatgcttgagtcatcacaagacaacatgagaacgagttgggtgagccagatgttctctgagatcgatgtcgataatctgggtcatatcactctgtgcaatgcagtgcagtgcatacggaacctgaatccaggattgaaaacttctaagattgaattgaagtttaaggagctacataagtctaaggataaagccggaacagaggttactaaggaagagtttattgaagtgtttcacgagctgtgtactcgaccagagatttattttctgctagtgcagttctcgagcaacaaggagttcctggacacaaaggacctgatgatgttcctcgaggcggaacagggcgtggcccacatcaatgaagaaatttccctggagattatccacaaatacgaaccgtcaaaggaaggtcaggaaaaaggttggctcagcattgacggtttcactaactatctaatgagccctgactgctatattttcgacccagagcataagaaagtctgccaggatatgaaacagccactttcccactacttcattaattcatctcataatacatatctaattgaggatcagtttcgtggaccctctgacattaccggttatatccgtgccctgaagatggggtgccgtagcgttgaactagatgtttgggacggacccgacaatgagcccgtgatctatactggacacactatgacgtctcaaatcgtatttagatccgtcatcgacattatcaataagtatgccttttttgcaagcgagtatccactcattctgtgcctagagaatcactgcagcattaaacagcagaaggtgatggtgcagcacatgaagaagctccttggggataagctctacacaacctccccgaatgtggaggagtcttacctaccatccccggacgtgctgaaaggcaagatattgataaaagccaagaagctgagcagcaattgctccggagtcgagggagacgtgaccgacgaagacgaaggggcagagatgtcacagcggatgggaaaagagaatatggagcaaccaaataacgttcccgttaaacggttccagctgtgtaaagagctctcagagctggtctccatttgtaaaagcgtacaattcaaggagtttcaggtttcatttcaagttcagaagtactgggaggtgtgtagctttaatgaggtactcgcatcgaaatacgcaaatgagaacccaggagatttcgtgaactataacaaacgttttctggctagagtgttcccaagccctatgcggatagactctagcaatatgaacccgcaggatttctggaagtgtggttgccagattgtcgccatgaattttcaaacccctggtctgatgatggacctcaacatcggatggtttagacagaacggtaactgtgggtacgtgctcagacccgctattatgcgggaggaggtgtccttcttcagtgctaacacaaaggatagtgtgccgggagtaagccctcaactgctacacatcaagattatctctggccagaacttccctaagcctaaaggctcgggcgctaagggggacgtcgtggatccctatgtgtatgttgagatccacggaattccagctgactgcgccgagcagcgaacaaaaaccgtgcaccagaacggcgatgcacccatcttcgatgaatcatttgagttccagatcaacctccctgaactggctatggtccgctttgtcgtcctggatgacgattatatcggcgacgagtttattggacagtacaccatcccgttcgagtgtctgcagaccgggtacagacacgtgccactgcaatccttaaccggcgaggtgcttgcacacgcctcattgttcgtgcacgttgctataaccaaccgaagaggtggcggaaaaccccataagcggggtctgtccgtgaggaagggtaagaaaagcagggaatatgcctccctgcgcacactgtggataaagacagttgacgaggtgtttaaaaatgcacagcctcctattagagatgccactgacctgagggaaaacatgcagaatgcagtggtgtcctttaaagagctgtgtggattgtcgtctgtggcaaacctgatgcagtgtatgctcgccgttagccctaggtttctggggccagataacactcctctcgttgtgttgaacctgagcgagcagtacccaactatggagttgcagggcattgtgcccgaagtcctaaagaagatcgtgactacatatgatatgatgatccagagcctgaaggctcttattgagaacgcagacgcggtgtacgagaaaatcgtacactgtcagaaagccgctatggagttccatgagcatctccactccatcgggaccaaggagggactgaaagagcgtaagttgcagaaagcggtagagtcgtttacatggaatatcacaatccttaaggggcaggccgacttattgaagtacgctaagaacgagaccctcgagaatctaaagcagatccattttgccgctgtctcctgtggactgaataagccgggtaccgagaatgcagacgtgcagaaaccacgaaggtccctggaggtcatcccagaaaaggctaatgacgaaaccggagaatag

SEQ ID NO: 56037 - DNA, 3387 bp, Artificial Sequence
  derived and/or modified sequence
atggccgactgcgtgagaggctgggccgccgtgggcggcgccctgcccaccagccccggccccagcctgggcgccaagggcgccctgaaggccggcgtgggcgaggacggcgtgggcggcggcagactggtgcacggcagagccagatacgacagcggcggcgtgagcaacggcgactgcagcctgggcgtgagcggcgacgaggccagagccagccccaccagaggccccagaggcgtggccctggcccccacccccagcgccgtggtgtgcaccctgcccagagagagcaagcccggcggcctgcccagaagaagcagcatcatcaaggacggcaccaagcagaagagagagagaaagaagaccgtgagcttcagcagcatgcccaccgagaagaagatcagcagcgccagcgactgcatcaacagcatggtggagggcagcgagctgaagaaggtgagaagcaacagcagaatctaccacagatacttcctgctggacgccgacatgcagagcctgagatgggagcccagcaagaaggacagcgagaaggccaagatcgacatcaagagcatcaaggaggtgagaaccggcaagaacaccgacatcttcagaagcaacggcatcagcgaccagatcagcgaggactgcgccttcagcgtgatctacggcgagaactacgagagcctggacctggtggccaacagcgccgacgtggccaacatctgggtgaccggcctgagatacctgatcagctacggcaagcacaccctggacatgctggagagcagccaggacaacatgagaaccagctgggtgagccagatgttcagcgagatcgacgtggacaacctgggccacatcaccctgtgcaacgccgtgcagtgcatcagaaacctgaaccccggcctgaagaccagcaagatcgagctgaagttcaaggagctgcacaagagcaaggacaaggccggcaccgaggtgaccaaggaggagttcatcgaggtgttccacgagctgtgcaccagacccgagatctacttcctgctggtgcagttcagcagcaacaaggagttcctggacaccaaggacctgatgatgttcctggaggccgagcagggcgtggcccacatcaacgaggagatcagcctggagatcatccacaagtacgagcccagcaaggagggccaggagaagggctggctgagcatcgacggcttcaccaactacctgatgagccccgactgctacatcttcgaccccgagcacaagaaggtgtgccaggacatgaagcagcccctgagccactacttcatcaacagcagccacaacacctacctgatcgaggaccagttcagaggccccagcgacatcaccggctacatcagagccctgaagatgggctgcagaagcgtggagctggacgtgtgggacggccccgacaacgagcccgtgatctacaccggccacaccatgaccagccagatcgtgttcagaagcgtgatcgacatcatcaacaagtacgccttcttcgccagcgagtaccccctgatcctgtgcctggagaaccactgcagcatcaagcagcagaaggtgatggtgcagcacatgaagaagctgctgggcgacaagctgtacaccaccagccccaacgtggaggagagctacctgcccagccccgacgtgctgaagggcaagatcctgatcaaggccaagaagctgagcagcaactgcagcggcgtggagggcgacgtgaccgacgaggacgagggcgccgagatgagccagagaatgggcaaggagaacatggagcagcccaacaacgtgcccgtgaagagattccagctgtgcaaggagctgagcgagctggtgagcatctgcaagagcgtgcagttcaaggagttccaggtgagcttccaggtgcagaagtactgggaggtgtgcagcttcaacgaggtgctggccagcaagtacgccaacgagaaccccggcgacttcgtgaactacaacaagagattcctggccagagtgttccccagccccatgagaatcgacagcagcaacatgaacccccaggacttctggaagtgcggctgccagatcgtggccatgaacttccagacccccggcctgatgatggacctgaacatcggctggttcagacagaacggcaactgcggctacgtgctgagacccgccatcatgagagaggaggtgagcttcttcagcgccaacaccaaggacagcgtgcccggcgtgagcccccagctgctgcacatcaagatcatcagcggccagaacttccccaagcccaagggcagcggcgccaagggcgacgtggtggacccctacgtgtacgtggagatccacggcatccccgccgactgcgccgagcagagaaccaagaccgtgcaccagaacggcgacgcccccatcttcgacgagagcttcgagttccagatcaacctgcccgagctggccatggtgagattcgtggtgctggacgacgactacatcggcgacgagttcatcggccagtacaccatccccttcgagtgcctgcagaccggctacagacacgtgcccctgcagagcctgaccggcgaggtgctggcccacgccagcctgttcgtgcacgtggccatcaccaacagaagaggcggcggcaagccccacaagagaggcctgagcgtgagaaagggcaagaagagcagagagtacgccagcctgagaaccctgtggatcaagaccgtggacgaggtgttcaagaacgcccagccccccatcagagacgccaccgacctgagagagaacatgcagaacgccgtggtgagcttcaaggagctgtgcggcctgagcagcgtggccaacctgatgcagtgcatgctggccgtgagccccagattcctgggccccgacaacacccccctggtggtgctgaacctgagcgagcagtaccccaccatggagctgcagggcatcgtgcccgaggtgctgaagaagatcgtgaccacctacgacatgatgatccagagcctgaaggccctgatcgagaacgccgacgccgtgtacgagaagatcgtgcactgccagaaggccgccatggagttccacgagcacctgcacagcatcggcaccaaggagggcctgaaggagagaaagctgcagaaggccgtggagagcttcacctggaacatcaccatcctgaagggccaggccgacctgctgaagtacgccaagaacgagaccctggagaacctgaagcagatccacttcgccgccgtgagctgcggcctgaacaagcccggcaccgagaacgccgacgtgcagaagcccagaagaagcctggaggtgatccccgagaaggccaacgacgagaccggcgagtag

SEQ ID NO: 56038 - protein, 152 aa, Artificial Sequence
  derived and/or modified sequence
TVSNLLEHKILEMEGKHKEELDTLKEEKENLQGLVTRQTYIIQELEKQLNRATTNNSVLQKQQLELMDTVHNLVNLCTKEGVLLKGGKREEEKPFRDCADVYQAGFNKSGIYTIYINNMPEPKKVFCNMDVNGGGWTVIQHREDGSLDFQRG

SEQ ID NO: 56039 - protein, 498 aa, Artificial Sequence
  derived and/or modified sequence
MTVFLSFAFLAAILTHIGCSNQRRSPENSGRRYNRIQHGQCAYTFILPEHDGNCRESTTDQYNTNALQRDAPHVEPDFSSQKLQHLEHVMENYTQWLQKLENYIVENMKSEMAQIQQNAVQNHTATMLEIGTSLLSQTAEQTRKLTDVETQVLNQTSRLEIQLLENSLSTYKLEKQLLQQTNEILKIHEKNSLLEHKILEMEGKHKEELDTLKEEKENLQGLVTRQTYIIQELEKQLNRATTNNSVLQKQQLELMDTVHNLVNLCTKEGVLLKGGKREEEKPFRDCADVYQAGFNKSGIYTIYINNMPEPKKVFCNMDVNGGGWTVIQHREDGSLDFQRGWKEYKMGFGNPSGEYWLGNEFIFAITSQRQYMLRIELMDWEGNRAYSQYDRFHIGNEKQNYRLYLKGHTGTAGKQSSLILHGADFSTKDADNDNCMCKCALMLTGGWWFDACGPSNLNGMFYTAGQNHGKLNGIKWHYFKGPSYSLRSTTMMIRPLDF

SEQ ID NO: 56040 - protein, 298 aa, Artificial Sequence
  derived and/or modified sequence
MEGKHKEELDTLKEEKENLQGLVTRQTYIIQELEKQLNRATTNNSVLQKQQLELMDTVHNLVNLCTKEGVLLKGGKREEEKPFRDCADVYQAGFNKSGIYTIYINNMPEPKKVFCNMDVNGGGWTVIQHREDGSLDFQRGWKEYKMGFGNPSGEYWLGNEFIFAITSQRQYMLRIELMDWEGNRAYSQYDRFHIGNEKQNYRLYLKGHTGTAGKQSSLILHGADFSTKDADNDNCMCKCALMLTGGWWFDACGPSNLNGMFYTAGQNHGKLNGIKWHYFKGPSYSLRSTTMMIRPLDF

SEQ ID NO: 56041 - protein, 13 aa, Artificial Sequence
  derived and/or modified sequence
DAPHVEPDFSSQK

SEQ ID NO: 56042 - protein, 832 aa, Artificial Sequence
  derived and/or modified sequence
MILQAHLHSLCLLMLYLATGYGQEGKFSGPLKPMTFSIYEGQEPSQIIFQFKANPPAVTFELTGETDNIFVIEREGLLYYNRALDRETRSTHNLQVAALDANGIIVEGPVPITIKVKDINDNRPTFLQSKYEGSVRQNSRPGKPFLYVNATDLDDPATPNGQLYYQIVIQLPMINNVMYFQINNKTGAISLTREGSQELNPAKNPSYNLVISVKDMGGQSENSFSDTTSVDIIVTENIWKAPKPVEMVENSTDPHPIKITQVRWNDPGAQYSLVDKEKLPRFPFSIDQEGDIYVTQPLDREEKDAYVFYAVAKDEYGKPLSYPLEIHVKVKDINDNPPTCPSPVTVFEVQENERLGNSIGTLTAHDRDEENTANSFLNYRIVEQTPKLPMDGLFLIQTYAGMLQLAKQSLKKQDTPQYNLTIEVSDKDFKTLCFVQINVIDINDQIPIFEKSDYGNLTLAEDTNIGSTILTIQATDADEPFTGSSKILYHIIKGDSEGRLGVDTDPHTNTGYVIIKKPLDFETAAVSNIVFKAENPEPLVFGVKYNASSFAKFTLIVTDVNEAPQFSQHVFQAKVSEDVAIGTKVGNVTAKDPEGLDISYSLRGDTRGWLKIDHVTGEIFSVAPLDREAGSPYRVQVVATEVGGSSLSSVSEFHLILMDVNDNPPRLAKDYTGLFFCHPLSAPGSLIFEATDDDQHLFRGPHFTFSLGSGSLQNDWEVSKINGTHARLSTRHTEFEEREYVVLIRINDGGRPPLEGIVSLPVTFCSCVEGSCFRPAGHQTGIPTVGMAVGILLTTLLVIGIILAVVFIRIKKDKGKDNVESAQASEVKPLRS

SEQ ID NO: 56043 - DNA, 2499 bp, Artificial Sequence
  derived and/or modified sequence
atgatcctgcaggctcaccttcacagtctgtgcctcctgatgctgtatttagccacaggatatggccaagagggtaagttctctgggccactaaaaccaatgacattcagcatatacgaaggccaggaaccatcccaaatcatatttcagttcaaggctaacccacccgcggtcactttcgaattgacaggagagacggataacatattcgtaatcgagcgagagggcttactgtactataatcgagcccttgacagggagacccgctctacccacaacttacaggtggcagcgctcgacgcaaatggtattatcgtcgaggggcccgtccctattacaataaaggtgaaagatatcaatgacaaccggcctacctttttacagagcaaatacgaaggtagtgtgaggcaaaacagcaggcctggcaaacccttcctatatgtgaacgctactgacctagacgatcccgccacccctaatggtcaactatattaccagattgtcatccaattgcccatgatcaataacgtgatgtacttccaaattaacaataagactggtgcgatcagcctgactcgagaaggctcccaggaactgaatcctgcaaaaaaccctagttacaacctggtcatctctgtaaaggacatgggtggacagagtgagaactccttcagtgacacaacctccgtcgacataattgtaacagaaaacatctggaaggctcctaaacccgtagagatggtagaaaactccactgacccgcatcccatcaaaattacccaggtccgttggaacgacccgggggcacagtacagcctggtggacaaagagaaactcccccggttccctttcagcatcgatcaggaaggggacatatacgtgacccagcctctcgacagagaggaaaaagatgcttacgtcttttatgccgtcgctaaggacgagtatggtaagcccctctcttaccctctggaaatacatgtgaaagttaaggatattaatgataacccaccaacttgtccttcacctgtgaccgtcttcgaggtgcaggaaaacgagcgactcgggaatagcattgggacactcacggcccacgatagggacgaagagaatacagcaaattctttcctgaattataggattgtagagcagaccccaaagttgcccatggacggattgttcctcattcagacttacgcagggatgctccagctggccaagcagtctctcaagaagcaggataccccacagtataatctgacaattgaggtgagcgataaggacttcaaaacactttgtttcgtacaaataaacgttattgacatcaatgaccagatacctattttcgagaagtccgactacggtaatcttactctggcggaggatacgaacattgggtctaccattctgactattcaggctaccgatgcggatgagcccttcacaggctctagtaaaattctatatcatatcatcaaaggggactcagaaggccgacttggcgtggatacagacccacataccaacacgggttatgtcatcataaagaaacccctggattttgagacggccgctgtgtcgaacatagtgtttaaggccgagaaccccgaaccactcgtgtttggagtgaaatacaacgcatcaagtttcgcaaaatttactttgatcgtgaccgacgtaaatgaggccccccagtttagccagcacgtgttccaggccaaggtgtctgaagacgtggctattgggacaaaagtcggaaatgttaccgccaaggatcccgaagggcttgacatcagttactcgttgcgtggggatacgcgtggatggctgaagatcgatcacgtcacgggggagatattcagtgtagcccccctggatcgggaagcagggtctccctatagagtccaggtcgtagccacagaggtagggggaagctctctcagtagcgtgagtgagttccatctgatcctaatggacgtcaatgataatcctccgcggctcgccaaggattacacaggtctgttcttttgtcaccccttgtccgctcccggctccctgattttcgaagcaaccgacgacgatcaacacctctttcgtggtccacattttaccttttcacttggttctggcagcctgcagaatgattgggaagtctctaagattaacggcacgcacgcccgcttatccacccgccataccgagttcgaggagagagagtacgtggtcctgattcgaatcaacgatggcggcagacctccattggaagggatcgtgtcgctgcccgtcaccttttgttcttgtgttgagggatcatgttttcggccagccggacaccagacaggaataccaaccgtgggaatggccgtggggatcctgctgaccacattgcttgtaattggaattatcctggcggtggtgttcattcggattaaaaaagacaaaggcaaagataatgttgagagcgcccaggctagcgaagtgaaaccgctccggtcttag

SEQ ID NO: 56044 - DNA, 2499 bp, Artificial Sequence
  derived and/or modified sequence
atgattctccaagcacatcttcactcgctgtgcttgctgatgctctatcttgctacaggatacggtcaggaaggcaagttcagcgggcctttaaaacctatgacattctcaatctatgagggccaggagccgagccagatcattttccagtttaaggccaatccacccgctgtgacctttgaattaacgggcgagacagacaacatttttgtcattgaaagagaggggcttctctactacaatcgagccttagacagagaaactaggagcacgcataacctccaggtggctgctctagacgctaatggaatcatagttgagggccccgttcccatcactatcaaagtcaaagacatcaatgacaacagaccaacgtttcttcagtctaagtatgaaggatctgtcaggcaaaactcacgacccggcaaacccttcctctacgtcaacgccactgacttagatgacccggccacaccaaatgggcagctgtattatcagatcgtgattcagctcccaatgatcaacaatgtaatgtatttccagattaacaataaaactggtgccataagcctcacacgcgaggggagccaggagctcaatccggcaaagaatccatcctacaatctggtcatttccgtgaaggatatgggtggtcaatcggagaattcgttctccgatactacatcagtggatatcattgttacagagaatatctggaaggctccaaaacctgttgaaatggtagaaaactccaccgatccacaccctataaaaatcacccaagtccgctggaacgacccgggtgcacagtactccctggttgacaaagaaaagctaccccgcttcccattcagcattgatcaagagggcgacatatacgtgacccagcccctcgatagagaagagaaggacgcttacgtcttttatgccgtggctaaagatgagtatgggaagcccttaagctatcccctggagatacacgtgaaagtcaaagacatcaacgataatccacctacatgcccttcaccagtgacagttttcgaagttcaggaaaatgaacggttaggcaactccattggcacgctaaccgcccatgacagagacgaggaaaacactgccaatagttttttaaattacagaattgtggagcagactccaaaactccccatggatggccttttcctcatccagacctacgctggcatgctgcagctggccaaacagagtctgaaaaagcaggacactccccagtataacttgaccatagaagtgagtgataaagattttaaaaccctttgttttgttcaaatcaacgtgattgacatcaacgaccagatacccatttttgaaaaaagcgattatggtaatctgaccctagcggaagataccaacatcggaagcactatcttgacaattcaagctacagacgccgacgagccctttactggctctagtaagattctgtaccatattatcaagggcgacagcgaaggcaggctgggtgtggacaccgatccccacactaacacggggtatgtgataattaagaagcccctcgattttgagacggccgccgtctccaacattgtgttcaaagccgaaaatcctgaaccgctcgtgtttggagtgaagtataatgcctcatcatttgccaagttcacactgattgtgacagacgtgaatgaagcccctcaattctctcaacacgtttttcaggccaaggtgagcgaagacgtggcgatcggcacaaaagttggcaacgtcacagccaaagacccggagggcctggacataagctactccctccgcggagatacgcggggatggctgaaaatagatcacgtcacaggtgagatattcagtgtcgcacccctggatagggaggctggtagcccatatcgggtgcaggtagttgctaccgaagtggggggctcgagcttatcttccgtcagcgaattccatctgattctgatggacgtgaacgacaacccaccacgacttgccaaggactatacaggcctctttttttgtcatcctctgtccgcgcctggttccctcatttttgaagccacagacgacgatcaacatttgttccgcgggccccattttactttttctctgggaagcgggagcctccagaatgactgggaagtttccaaaatcaacgggacccatgcgcgcctcagcactcggcacactgaattcgaggagcgggaatacgtggtgctcatcaggataaatgacggtgggagacccccactcgaaggcatagtgagcctgccagttaccttctgctcctgcgtggagggaagttgtttcaggccggccgggcaccagaccgggattcccactgtgggaatggcggtgggcatactgctgaccacccttctggttatcgggattattctggcggtcgtgtttatcaggatcaagaaggacaagggaaaagataacgttgaatccgctcaggcctctgaagtgaagcccctcagatcatag

SEQ ID NO: 56045 - DNA, 2499 bp, Artificial Sequence
  derived and/or modified sequence
atgatcctgcaggcccacctgcacagcctgtgcctgctgatgctgtacctggccaccggctacggccaggagggcaagttcagcggccccctgaagcccatgaccttcagcatctatgagggccaggagcccagccagatcatcttccagttcaaggccaaccccccagctgtgacctttgagctgactggagaaacagacaacatcttcgtcatcgagcgggagggcctgctgtactacaacagagccctggaccgggagaccaggagcacccacaacctgcaggtggccgccctggatgccaacggcatcatcgtggagggccctgtgcccatcaccatcaaggtgaaggacatcaatgacaaccggcccaccttcctgcagagcaaatatgagggctctgtgcggcagaacagcaggcctgggaagcccttcctgtatgtgaatgccacagacctggatgatcctgccacccccaacggccagctgtactaccagatcgtcatccagctgcccatgatcaacaacgtgatgtacttccagatcaacaacaagacaggagccatcagcctgacccgggagggcagccaggagctgaacccagccaagaaccccagctacaacctggtgatctctgtgaaggacatgggcggccagagtgaaaattccttcagtgacaccacctctgtggacatcatcgtgacagagaacatctggaaggcccccaagcctgtggagatggtggagaacagcacagacccccaccccatcaagatcacccaggtgcgctggaatgaccccggggcccagtacagcctggtggacaaggagaagctgccccgcttccccttcagcattgaccaggagggggacatctacgtgacccagcccctggaccgggaggagaaggatgcctacgtgttctatgctgtggccaaggatgaatatggcaagcccctgagctaccccctggagatccacgtgaaggtgaaggacatcaatgacaacccccccacctgccccagccctgtgacagtgtttgaggtgcaggagaatgaaaggctgggcaacagcatcggcaccctgacagcccatgacagagatgaggagaacacagccaacagcttcctgaactacagaattgtggagcagacccccaagctgcccatggatggcctcttcctgatccagacctacgccggcatgctgcagctggccaagcagagcctgaagaagcaggacaccccccagtacaacctgaccatcgaggtgtctgacaaggacttcaagaccctgtgctttgtgcagatcaacgtcatcgacatcaatgaccagatccccatctttgagaagagtgactatggcaacctgaccctggccgaggacaccaacatcggcagcaccatcctgaccatccaggccacagatgctgatgagcccttcaccggcagcagcaagatcctgtaccacatcatcaagggggacagcgagggccgcctgggcgtggacacagacccccacaccaacacaggctacgtgatcatcaagaagcccctggactttgaaacagctgctgtgagcaacatcgtgttcaaggccgagaaccctgagcccctggtgtttggagtgaagtacaatgccagcagctttgccaagttcaccctcatcgtgacagatgtgaatgaggccccccagttcagccagcacgtgttccaggccaaggtgtctgaagatgtggccatcggcaccaaggtgggcaatgtgacagccaaggaccctgagggcctggacatctcctacagcctgcggggggacacccggggctggctgaagattgaccacgtgactggagagatcttctctgtggcccccctggaccgggaggccggcagcccctacagagtgcaggtggtggccacagaggtgggcggcagcagcctgagctctgtgtctgagttccacctgatcctgatggatgtgaatgacaaccccccccggctggccaaggactacacaggcctcttcttctgccaccccctgagcgcccctggcagcctcatctttgaggccacagatgatgaccagcacctgttccggggcccccacttcaccttcagcctgggcagcggcagcctgcagaatgactgggaggtgtccaagatcaatggcacccacgcccggctgagcaccaggcacacagaatttgaggagcgggagtatgtggtgctgatccgcatcaatgatggcggccggccccccctggagggcatcgtgtccctgcctgtgaccttctgcagctgtgtggagggcagctgcttccggcctgctggccaccagacaggcatccccaccgtgggcatggctgtgggcatcctgctgaccaccctgctggtgattggcatcatcctggccgtggtgttcatccgcatcaagaaggacaagggcaaggacaacgtggagagcgcccaggccagcgaggtgaagcccctgcggagctag

SEQ ID NO: 56046 - DNA, 2499 bp, Artificial Sequence
  derived and/or modified sequence
atgatcctgcaggcccacctgcacagcctgtgcctgctgatgctgtatttagctactggctatggccaagaaggtaaattctcaggtccattgaaaccgatgaccttctctatatatgaggggcaggaaccctcccagattatttttcagtttaaggctaaccccccggcagtgacctttgagctaacaggcgaaacggacaacatctttgttattgaaagggaagggttgctttactataacagggcattggacagagaaacacgaagcacccacaacctccaggtcgcggcgttagatgctaatggtataattgtggaagggccagtgcccattacaatcaaggtgaaagacatcaatgacaacaggccaacttttctgcagtccaaatacgagggatccgtgcggcagaactcacgcccgggcaagccgttcctgtatgtgaatgcgaccgatctggatgatccagccactcctaatggccaactttattatcaaatcgtgatccagttgcccatgatcaataacgtgatgtatttccaaatcaataataaaactggagctatttccctgacgcgcgaaggaagccaagagttgaaccccgccaaaaatccatcctataacctggtcattagtgtgaaggatatgggtggtcagtccgagaattcatttagtgatactaccagtgtggatatcattgtgaccgaaaatatctggaaagcccctaaacccgtggaaatggtcgagaattcaactgacccacatcctatcaagatcacccaggttaggtggaacgacccgggtgcccaatattctctcgttgataaagaaaaactcccccggttccctttttccatcgatcaggaaggcgacatctacgtgacacagcctctggaccgcgaagaaaaggatgcatacgtattctacgctgttgctaaggacgaatacgggaagcccctgtcatacccactggaaatccacgttaaggttaaagacataaatgacaatccgccgacctgccccagtccagtcactgtgtttgaagtgcaagagaacgaaagattaggtaattctattggcactctgaccgcccatgaccgtgatgaggaaaacaccgctaactcatttctcaactacaggatagtcgaacagacacccaaattgccaatggatggactgtttttgattcaaacctacgcaggaatgctgcagttggcaaagcagagtttgaagaaacaagacactccccaatacaacctgactatagaggtctccgataaggatttcaagactctgtgtttcgtccaaattaatgtcattgatatcaatgaccagatccctatttttgagaaatcagactacggtaatctgacattagccgaggacacaaacattggttcaacaatcctgacaatccaggctaccgatgctgatgaacctttcaccgggtcctctaaaattttataccatataatcaaaggtgattcagaggggcgccttggcgtggataccgatcctcataccaacaccgggtacgtaattataaagaaacctctcgactttgagacagcagccgtatctaacatcgtctttaaggctgagaaccctgagccgctggtgtttggcgtcaagtataatgccagttctttcgctaagtttacactgatagtcacagacgttaatgaggctccacagttcagtcaacacgtatttcaggccaaggtgagcgaagacgtggcgataggaactaaggtgggaaacgttacagcgaaggaccccgagggactggatatatcttattcacttagaggagacactcgcggatggcttaagatcgaccacgtgactggtgagatcttcagtgtcgctcccctggacagggaagccgggtccccctatagggtccaggttgttgccacagaagtggggggatcatccttgtcctctgttagtgagtttcatctgattctgatggatgtgaacgacaaccccccaagacttgctaaagactatacgggacttttcttttgccacccactgtctgcccctggatccctgatattcgaagccaccgacgatgaccagcatctgtttcgaggcccccactttacgttttctctgggcagcggtagcctccagaacgactgggaggttagtaaaattaatggcactcatgcgaggctatcaactcggcacactgaatttgaggagagggagtatgttgtgctgatcaggattaatgatgggggtcgcccgccactggagggaattgtgtcactcccagtaaccttttgctcctgtgtagagggctcgtgcttccggccagcaggccaccaaaccggcattcccacagttggcatggctgttggtattctgctgacaacattgctggttatcggaattatcctcgcagtggtcttcatccggatcaagaaggataaagggaaagacaacgttgagtccgcccaggcctctgaagtcaagccattacgaagttag

SEQ ID NO: 56047 - DNA, 2499 bp, Artificial Sequence
  derived and/or modified sequence
atgatcctgcaggcccacctgcacagcctgtgcctgctgatgctgtacctggctacaggctatgggcaggaagggaagttcagtgggccactgaagcctatgacttttagcatttatgagggccaggagccaagtcagattattttccaattcaaagcaaaccccccagctgtgactttcgagctcactggggagaccgacaatatcttcgtgattgaacgggagggtttgctctattacaaccgcgcccttgatcgcgagacacggagcacccacaaccttcaggtggcagccctcgatgccaatggcatcatcgtggagggtcctgtgcccataacgataaaggtgaaagatattaacgacaatcggccgacatttctgcagtccaagtacgaggggagcgtcaggcagaactcacgtcccggaaagccttttctctacgtcaacgccacggatcttgatgatccggcgacgcccaacgggcagctctattaccagatcgtgatacagcttccgatgatcaataacgttatgtacttccagattaataacaaaacaggagctatcagtcttacccgggaaggaagtcaggagctgaaccccgctaagaaccccagttataatttagtcatctcggtgaaggacatgggcggccagagtgaaaactccttctccgacaccacatccgtagacataatagtgaccgaaaatatatggaaggctcccaagccggtggagatggtcgagaattccactgatccccaccccatcaagattacgcaggttaggtggaacgatcccggtgcacagtacagtctagtggacaaggaaaagctgccacgattccccttcagcatcgatcaggaaggagacatctatgtaacacagcccctggaccgggaggagaaggacgcatacgtattctatgctgtcgcaaaagacgagtacggcaagccactctcatatccgttggagatccatgtgaaagtgaaggacattaatgacaatcctccgacttgcccctctccagtcaccgtattcgaggtacaggaaaatgaacgtctggggaacagcattggcactctcacggcccatgaccgtgacgaggaaaataccgcaaactcgtttttgaattaccggatcgtcgagcagactcccaagctgccgatggacggccttttcctgattcagacatacgccgggatgctccaattagctaagcaaagcctaaagaaacaggatactccccaatataacctaacaattgaggtttccgacaaagatttcaagacgctgtgcttcgtgcaaattaacgtgatagatattaacgaccagattcctatcttcgagaaaagtgattacggcaatctcaccctggcggaagacacaaacatcgggtccactatactaaccatccaggcaacagatgccgacgaacccttcacgggaagctctaagatactctatcatatcatcaagggcgatagtgagggccgcctgggcgtcgacacagatccacacacaaacaccgggtatgtcatcattaaaaaacctttagactttgaaaccgccgccgtgtcaaacatagtgtttaaagcagaaaaccccgaaccgttagtgtttggggtcaagtacaatgcctccagctttgccaaatttaccctgatagtcacggacgttaacgaggcaccccagttcagtcaacacgtgttccaggccaaagtatcagaggatgtggcgattggaacaaaggtggggaatgttaccgcaaaagaccctgaggggctcgacatctcttacagcctgcgcggggacacaaggggttggcttaaaatcgatcacgttacaggtgaaattttctctgtggctcccctagatcgtgaggccgggagcccatatcgagtacaggtagtggccacagaggtgggagggagctctctttcatctgtgagtgagttccatctgattttgatggatgtaaatgataaccctcccagattggccaaggactatactggcctgttcttttgccatccgctgtctgcgccaggcagccttattttcgaggcaaccgatgacgatcagcacttatttagggggcctcactttacgttcagccttgggagcggatctttgcaaaacgattgggaggttagcaagattaatggcacacatgcccggctgagcactaggcataccgagttcgaagagagggagtacgtggtgcttatccgcataaacgatggtggacggccccctctggaaggaattgtgtcgcttcctgtgacgttttgcagttgcgtcgaaggctcctgctttcggcctgcaggccaccagactggaattcccactgtcggtatggcggtggggattttgttaactacccttctcgtcattggtattatcttggcagtcgtatttatcagaataaagaaggacaagggcaaagataacgtggagtctgcccaagcatcggaagtgaaacccctccgttcctag

SEQ ID NO: 56048 - DNA, 2499 bp, Artificial Sequence
  derived and/or modified sequence
atgatcttgcaggctcaccttcacagcctttgcttgttgatgctgtatctagctacgggatatggtcaggaagggaagttctccgggccactgaagcctatgacgttttctatctatgaggggcaagagccgtcccagataatcttccagtttaaagctaatccccctgctgtgacattcgaacttaccggggagaccgacaatatttttgtcatcgaacgcgagggcttgttatactacaatagagcattggatagagagaccagatctacccataacctgcaggtcgccgctctggatgctaacggcattattgtggaaggccctgtgccaattaccattaaggtaaaggacattaacgataacaggcctacgttccttcagagtaaatatgagggctccgtccggcagaacagcagacctgggaagccgtttctgtacgttaacgcaaccgatctcgacgacccggcaacacccaacggacagctgtattaccagatcgtcatacagttaccaatgattaataacgtcatgtattttcagatcaataacaagactggtgctataagcctgacaagagaaggaagccaggagctcaatccggctaaaaatcccagctataatctcgtgataagcgtgaaggatatgggcggacagagtgaaaacagcttttcagatacaacgtccgttgacatcatcgtaaccgaaaatatctggaaagctcccaaacccgttgagatggtcgagaactctacggaccctcatcccatcaagatcacgcaggttagatggaacgaccccggagctcagtatagcctcgtagacaaagagaagcttcccaggttccctttcagcatagatcaggagggcgatatctatgtcactcagcctctggatagggaagagaaggatgcatacgttttctacgccgtggctaaagatgagtacggaaaacccctttcatatcccctcgaaattcatgtaaaagtcaaggatatcaatgacaatcctcccacctgtccatccccagtgacagtttttgaagttcaggagaacgaaagactgggaaactccatcgggacattgaccgcccacgaccgcgacgaggaaaataccgcaaactcgttcctcaattatagaattgtagagcagacacctaagctacctatggacggcctattcttgatacagacctacgctggtatgctgcagctcgccaagcagagtctgaagaaacaggacacgccccagtataatctgacgatcgaagtgtcagataaggactttaagaccttgtgttttgtgcagatcaacgtaatagatatcaacgaccagattcccatttttgagaaaagcgactatggaaatctgacgcttgccgaagacacaaatattggcagtaccatattaaccattcaggccactgacgccgatgaacccttcactggcagctcaaagatattgtatcacatcatcaagggagattctgaaggcaggctgggcgtcgatactgacccccataccaatactggttatgtcataattaaaaaaccgctggactttgagactgctgccgtctccaatattgtcttcaaggctgaaaacccagaacctctggtttttggtgtcaagtacaatgcgtctagcttcgccaaattcaccctaatcgtcacagatgtaaacgaggccccacagtttagtcaacacgtgtttcaggccaaggttagcgaagatgtcgccatcggcacgaaggtggggaacgtgactgccaaggacccagagggcctagacatttcgtacagtttgcgtggtgataccagaggatggctaaagatagatcatgtgaccggggaaattttctctgtggcacccctcgatcgtgaggccggatccccctacagggttcaggttgtcgcaacggaggtcggcggatcctccctttcctctgtgtccgaatttcatctgatcctcatggacgtgaacgataatccgcctaggctcgccaaagactacacgggcttattcttctgccatccactatctgccccaggatcactgattttcgaggctacagatgacgaccagcacctcttccgcggaccccacttcacattcagtctgggcagcggatccctacaaaacgattgggaggtctccaaaattaacggcacccatgctcggctgtcaacccggcataccgaatttgaggaaagagaatatgtggtgttaatcaggattaacgatggagggaggccaccactggaagggatcgtgagccttcccgttaccttctgttcctgcgttgaaggcagctgctttcgaccggcagggcaccagacgggaattccaactgtcggaatggctgtggggatactgctgaccacactacttgtgattggcataattttggccgtggtttttattcgtattaaaaaggataagggaaaggacaatgttgaaagtgcccaagcgtccgaggtgaagcctctcagatcttag

SEQ ID NO: 56049 - DNA, 2499 bp, Artificial Sequence
  derived and/or modified sequence
atgatcttacaagcccatttacactccctgtgtttattaatgctgtacctcgcaaccggttatgggcaggagggtaagtttagtgggcctttgaaacccatgacttttagcatctatgagggtcaggaaccttcccaaatcattttccagtttaaggccaacccacccgctgtgacctttgaactgactggcgagaccgacaatatcttcgtgatcgagcgcgaagggttactctactacaaccgggctctggatcgggaaaccagatccacccataatctgcaggtggctgcccttgatgcaaacgggataatcgtggaaggccctgtgcctataacgatcaaggtcaaggacatcaacgacaaccggccaacattcctccagtctaagtatgaaggttctgttcgccagaactctcgccctggaaaaccttttttatatgtgaacgcgacagatctggacgatcctgctacacctaacgggcagttgtactaccaaattgtcattcaactgcctatgatcaataatgtgatgtattttcagattaacaacaagaccggcgctatcagtcttacccgcgagggttcccaggagcttaatccagccaagaacccatcatataatcttgtgataagtgtgaaggacatgggcggacagtcagaaaatagcttttctgacaccacgtccgtggacataatcgtgaccgagaacatttggaaggcccctaaacccgtggagatggtcgaaaactctaccgacccccaccccatcaaaatcacacaggtccgctggaacgacccaggcgctcagtattccttggtggataaggaaaagctcccccgtttcccttttagtatcgatcaggaaggtgatatctatgttactcaacctctcgacagagaggagaaggacgcttacgtgttctacgctgttgctaaagatgaatacggaaaacctctttcatatccactggaaatccatgttaaagtgaaggatatcaacgacaaccccccaacttgtcctagcccggtcaccgtgttcgaagtgcaggagaacgagaggctcggaaactctattgggacgcttacggctcatgacagagacgaggagaatactgctaattcctttctcaactaccgcattgttgaacagacgccgaaattgcctatggatggcctgttcttaattcagacttacgccggaatgctgcagctggcaaagcagtcactcaagaaacaagatactccccaatataacttgaccatcgaggtttcagataaggactttaaaacactttgctttgtgcagatcaatgtaatcgacatcaatgaccagatcccaatattcgaaaaatcagattacggtaaccttacacttgccgaagacacaaatattggtagtacgatcctcactattcaggcaacggacgctgacgaaccattcacagggagtagtaaaatcctgtatcacattatcaagggggattcagagggtcgcctgggcgtcgacactgacccgcacacaaataccggctatgtgataatcaagaagcctttagatttcgagaccgcagccgtctctaacatcgttttcaaagcagagaaccctgaaccacttgttttcggggttaagtacaatgcctcgagcttcgctaagtttactctgatagttaccgatgtgaacgaggctccacaattctcacagcacgtgttccaggcaaaggtatcggaggatgtagcaatcggcacaaaagtgggaaacgtgaccgctaaagaccccgaggggttggatatctcatacagtctgagaggcgatacaagaggctggcttaaaatcgatcacgtgacgggagagatttttagcgtggcacctctcgacagagaagcagggtcaccttatagagtccaggttgtcgccaccgaggtaggcggatcctcgctgagctcggtgtccgagttccacctcattctgatggacgtgaatgataatccaccgaggttagcaaaggactacacagggttgtttttttgccaccccctgtccgcacccggtagtttaatttttgaagccaccgatgacgatcagcatctgtttagaggcccacatttcacattctccctcggctccggaagtttacagaacgactgggaggtctccaaaatcaatggaacgcacgccaggttgtcaacacgccacactgagtttgaagaaagggagtatgtggtattgataagaataaacgacggcggtaggcctccactcgaaggcatcgtttcactgccggtgactttctgttcttgcgtcgagggcagctgcttccgtcccgctggccaccaaacgggaataccaactgttggcatggcggttggcattctgctgacaaccctgctcgtcattggaatcattcttgccgtggtgtttattcgcataaaaaaagacaagggaaaggacaatgtggaatctgcccaggcgagcgaagtgaaaccactgcgctcatag

SEQ ID NO: 56050 - DNA, 2499 bp, Artificial Sequence
  derived and/or modified sequence
atgattctgcaggctcatctgcactccctctgtctcctcatgctttatttagccacaggttatggacaggaaggaaaattttcaggccccctcaagcctatgaccttcagtatatacgagggccaggagcctagccagatcatattccagttcaaagccaatccacccgctgttactttcgagctgactggcgaaactgataacatctttgtgattgagagagaggggttgctgtattataatcgtgctctcgaccgggagacccgctcaacacacaacctccaggtagccgccctcgacgctaacggaataattgttgaaggcccagtccctatcaccattaaagtcaaggatatcaatgataatcgtccgacatttctgcagagtaaatacgagggctcagtgaggcaaaactccagaccaggcaagccattcctgtacgtaaatgcgactgacctggacgatccagcaactccaaacggacaactttactatcaaatcgttattcagctgcccatgataaataatgtgatgtacttccaaataaacaacaagacaggggctatttcactgaccagagagggaagccaggagctcaatcctgcaaaaaacccgagctataaccttgttattagtgtaaaggacatgggcggacagagcgagaactccttctccgacactacttctgtggatatcatcgtgactgagaacatatggaaagccccaaaaccggtcgaaatggtggaaaactccactgatccgcacccaattaagattacccaggtaaggtggaacgatcctggagcccaatactcacttgtcgacaaggagaaactgccccggttcccgttcagcattgatcaggaaggagatatctacgttacacagccgctggatagggaagaaaaggacgcttatgtcttttatgcagttgccaaagatgagtacgggaagccactcagttatcctctggaaatccacgtcaaggtcaaggacatcaatgacaatcccccaacatgcccaagtcctgtcactgtgtttgaagtgcaagagaatgagcggctgggcaactccatcggcacacttaccgcacacgacagagacgaagagaatacagcgaactcattcttgaactatcggatagttgaacagactcctaaattgcctatggacgggctgtttttaatacaaacctatgcaggcatgcttcagctggcgaagcaatctttgaagaagcaggacacacctcagtacaatctcacgatcgaagtgtcagataaggattttaagaccctctgctttgtccagatcaacgtcatcgacatcaatgatcaaatcccaatttttgagaagagtgactatggaaaccttaccctagccgaagacacgaacatcggtagcaccatactgaccattcaggctactgatgctgatgaaccgttcaccggatcgtctaaaatcctgtaccacatcattaagggcgacagcgaaggaaggctgggcgtggataccgatccacacacaaacacgggatacgtaatcataaaaaagcctctggatttcgaaaccgccgccgttagtaatattgtatttaaggccgagaaccccgagccactggtatttggggtcaaatataacgctagttcctttgcaaagtttaccctcattgtcaccgacgtcaacgaggcgccacagttctctcagcacgtttttcaggccaaagtcagcgaagacgtagccataggcaccaaagtcgggaatgtgacagctaaagaccccgagggactggacatctcttattctctgaggggcgacacacgcgggtggcttaaaattgatcacgtgactggcgagatttttagtgtcgctcccctagatagggaagccgggagcccatacagagtgcaggtggtcgcgactgaagttggcggatcttcgttatctagtgtgtccgaatttcatctcattcttatggatgttaacgataatccccctcgactggcgaaagactatacaggccttttcttctgccaccctttaagtgcccccggctctctcattttcgaggcaacagatgacgatcagcatctgtttcgcggcccccatttcacgtttagcttaggatccggatcgctccaaaatgactgggaggtgtctaaaatcaacggtactcatgccagactgtcgacacgccacaccgagttcgaggagagggagtatgttgtattgataagaataaatgacggtggccgcccgcctctggaagggattgtgtcactgcctgtcactttctgctcttgcgtcgaaggaagttgttttaggcccgctgggcaccaaactggaatcccaacggtgggcatggcggtcggcattctgttaacgacactgctggtaatcggtattatcctcgctgtggtttttattcggatcaaaaaggataagggcaaagataatgtagagagcgctcaggcttctgaggtgaagccccttcggtcctag

SEQ ID NO: 56051 - DNA, 2499 bp, Artificial Sequence
  derived and/or modified sequence
atgattcttcaggcccatctccattctttatgccttctgatgttatatttagcaactggctatggccaggaggggaagttctcaggtccccttaaaccaatgacattttctatttacgagggccaagaaccgagccagattatctttcaattcaaggctaacccaccagcagtaacattcgaactgaccggcgaaacagataacatctttgtgatagagagagaaggactactgtactacaaccgcgctctcgatcgggagactagaagtacacataatctacaggtagcagccctcgatgcgaatggaatcatcgtagaaggccccgtgcccattactatcaaggtgaaagatatcaacgataaccgtcctactttcctgcagtccaagtatgagggcagcgtgcgccaaaattcccgtcccggcaagccatttctttacgttaatgccacagacctggatgaccctgcgactcccaacggccaactctactatcaaattgtcattcaacttccaatgattaacaacgttatgtatttccaaatcaacaacaaaacaggagcaattagtctgactagggaaggctctcaggaactcaacccagccaaaaacccttcttataatctggttatcagtgtcaaggatatgggggggcaaagcgaaaactctttttctgataccactagtgttgatataattgttacagagaacatctggaaagcgcccaaacccgtggagatggtcgaaaacagcacagacccgcacccgatcaagatcacccaggttcgatggaatgaccccggagcccagtactcccttgtagataaagagaaactgcctcggtttccgttttctatcgaccaggaaggggatatttatgtgacgcaacctctcgaccgggaagagaaggacgcttatgtgttttacgcagttgcaaaagacgaatatgggaagccactaagttaccccctagagattcatgtgaaagtgaaagacatcaatgacaatccccccacatgtccgagtccagtaacggtgtttgaagtgcaggaaaatgaaagactcggaaattcaatcggaacactgaccgcccatgatagggacgaggaaaatacagctaattctttcctgaactaccggattgttgaacagacacccaagctgcctatggacggcctgttcctgatccagacttatgcgggcatgcttcaactcgcaaaacagagcctcaagaagcaggatacaccccagtacaatctgacaatagaagttagcgataaagatttcaagaccctgtgcttcgtccagatcaacgtgatagacatcaatgaccaaatccccatctttgaaaaatcagattacggtaatctcacactcgccgaagacactaatattggaagcacaatactcaccattcaggccacagatgccgacgagccttttactggaagtagcaagatcctctaccacattatcaagggcgattctgaaggacgcttgggtgtggacacagaccctcataccaacacaggctatgtgattataaaaaagcccttggactttgagacggctgcagtgagcaatatcgtattcaaagctgaaaaccctgaacctctcgtgttcggcgttaaatacaatgctagttcatttgccaaatttactctgatcgtgactgacgtgaacgaggccccgcagtttagccaacatgtattccaagctaaggtgtccgaggacgtcgcaattgggactaaagtgggaaatgtgacagccaaagatcctgaaggccttgatatcagctatagtctgagaggggatacccgcggatggcttaaaatcgatcatgtaacaggagaaatatttagcgtcgcacctcttgaccgggaagccggttcaccataccgtgtgcaggtcgtggccacagaagtcggagggtccagtcttagctctgtgtcggagtttcacctcatcctgatggacgttaatgataaccctccaaggctcgccaaagattatacaggtttgtttttctgccaccccttatctgcccccggctcgctgatctttgaagctaccgatgacgaccaacacctgttcagaggtcctcactttacatttagcctaggctctggcagcctgcaaaacgattgggaagtgtccaaaatcaacggcacacacgcaaggttatcaacccgtcacacagagtttgaggaacgtgaatacgtggtgctcatcagaatcaatgatggcggcagaccacccctggaaggcattgttagcttacccgtgactttttgttcttgtgtcgaaggttcatgctttcgtcccgccggccaccagacgggcatacctacagtgggaatggcagtgggaattctgctgaccactctgcttgtgatcgggataattctagccgtagtctttataagaattaagaaggacaaaggaaaagacaatgttgaatctgcccaagcttccgaggtaaagccacttcgctcttag

SEQ ID NO: 56052 - DNA, 3693 bp, Artificial Sequence
  derived and/or modified sequence
ggaagagggagtgttcccgggggagatactccagtcgtagcaagagtctcgaccactgaatggaagaaaaggacttttaaccaccattttgtgacttacagaaaggaatttgaataaagaaaactatgatacttcaggcccatcttcactccctgtgtcttcttatgctttatttggcaactggatatggccaagaggggaagtttagtggacccctgaaacccatgacattttctatttatgaaggccaagaaccgagtcaaattatattccagtttaaggccaatcctcctgctgtgacttttgaactaactggggagacagacaacatatttgtgatagaacgggagggacttctgtattacaacagagccttggacagggaaacaagatctactcacaatctccaggttgcagccctggacgctaatggaattatagtggagggtccagtccctatcaccataaaagtgaaggacatcaacgacaatcgacccacgtttctccagtcaaagtacgaaggctcagtaaggcagaactctcgcccaggaaagcccttcttgtatgtcaatgccacagacctggatgatccggccactcccaatggccagctttattaccagattgtcatccagcttcccatgatcaacaatgtcatgtactttcagatcaacaacaaaacgggagccatctctcttacccgagagggatctcaggaattgaatcctgctaagaatccttcctataatctggtgatctcagtgaaggacatgggaggccagagtgagaattccttcagtgataccacatctgtggatatcatagtgacagagaatatttggaaagcaccaaaacctgtggagatggtggaaaactcaactgatcctcaccccatcaaaatcactcaggtgcggtggaatgatcccggtgcacaatattccttagttgacaaagagaagctgccaagattcccattttcaattgaccaggaaggagatatttacgtgactcagcccttggaccgagaagaaaaggatgcatatgttttttatgcagttgcaaaggatgagtacggaaaaccactttcatatccgctggaaattcatgtaaaagttaaagatattaatgataatccacctacatgtccgtcaccagtaaccgtatttgaggtccaggagaatgaacgactgggtaacagtatcgggacccttactgcacatgacagggatgaagaaaatactgccaacagttttctaaactacaggattgtggagcaaactcccaaacttcccatggatggactcttcctaatccaaacctatgctggaatgttacagttagctaaacagtccttgaagaagcaagatactcctcagtacaacttaacgatagaggtgtctgacaaagatttcaagaccctttgttttgtgcaaatcaacgttattgatatcaatgatcagatccccatctttgaaaaatcagattatggaaacctgactcttgctgaagacacaaacattgggtccaccatcttaaccatccaggccactgatgctgatgagccatttactgggagttctaaaattctgtatcatatcataaagggagacagtgagggacgcctgggggttgacacagatccccataccaacaccggatatgtcataattaaaaagcctcttgattttgaaacagcagctgtttccaacattgtgttcaaagcagaaaatcctgagcctctagtgtttggtgtgaagtacaatgcaagttcttttgccaagttcacgcttattgtgacagatgtgaatgaagcacctcaattttcccaacacgtattccaagcgaaagtcagtgaggatgtagctataggcactaaagtgggcaatgtgactgccaaggatccagaaggtctggacataagctattcactgaggggagacacaagaggttggcttaaaattgaccacgtgactggtgagatctttagtgtggctccattggacagagaagccggaagtccatatcgggtacaagtggtggccacagaagtaggggggtcttccttgagctctgtgtcagagttccacctgatccttatggatgtgaatgacaaccctcccaggctagccaaggactacacgggcttgttcttctgccatcccctcagtgcacctggaagtctcattttcgaggctactgatgatgatcagcacttatttcggggtccccattttacattttccctcggcagtggaagcttacaaaacgactgggaagtttccaaaatcaatggtactcatgcccgactgtctaccaggcacacagagtttgaggagagggagtatgtcgtcttgatccgcatcaatgatgggggtcggccacccttggaaggcattgtttctttaccagttacattctgcagttgtgtggaaggaagttgtttccggccagcaggtcaccagactgggatacccactgtgggcatggcagttggtatactgctgaccacccttctggtgattggtataattttagcagttgtgtttatccgcataaagaaggataaaggcaaagataatgttgaaagtgctcaagcatctgaagtcaaacctctgagaagctgaatttgaaaaggaatgtttgaatttatatagcaagtgctatttcagcaacaaccatctcatcctattacttttcatctaacgtgcattataattttttaaacagatattccctcttgtcctttaatatttgctaaatatttcttttttgaggtggagtcttgctctgtcgcccaggctggagtacagtggtgtgatcccagctcactgcaacctccgcctcctgggttcacatgattctcctgcctcagcttcctaagtagctgggtttacaggcacccaccaccatgcccagctaatttttgtatttttaatagagacggggtttcgccatttggccaggctggtcttgaactcctgacgtcaagtgatctgcctgccttggtctcccaatacaggcatgaaccactgcacccacctacttagatatttcatgtgctatagacattagagagatttttcatttttccatgacatttttcctctctgcaaatggcttagctacttgtgtttttcccttttggggcaagacagactcattaaatattctgtacattttttctttatcaaggagatatatcagtgttgtctcatagaactgcctggattccatttatgttttttctgattccatcctgtgtccccttcatccttgactcctttggtatttcactgaatttcaaacatttgtcagagaagaaaaacgtgaggactcaggaaaaataaataaataaaagaacagccttttcccttagtattaacagaaatgtttctgtgtcattaaccatctttaatcaatgtgacatgttgctctttggctgaaattcttcaacttggaaatgacacagacccacagaaggtgttcaaacacaacctactctgcaaaccttggtaaaggaaccagtcagctggccagatttcctcactacctgccatgcatacatgctgcgcatgttttcttcattcgtatgttagtaaagttttggttattatatatttaacatgtggaagaaaacaagacatgaaaagagtggtgacaaatcaagaataaacactggttgtagtcagtttt

SEQ ID NO: 56053 - DNA, 2625 bp, Artificial Sequence
  derived and/or modified sequence
aatcacggtggaagtatgatattttggctgtggatctgagttgatcaatctgcttagtggacttgagtccccccacccccgcttgtctgattggggctcctgggaggaatttgaataaagaaaactatgatacttcaggcccatcttcactccctgtgtcttcttatgctttatttggcaactggatatggccaagaggggaagtttagtggacccctgaaacccatgacattttctatttatgaaggccaagaaccgagtcaaattatattccagtttaaggccaatcctcctgctgtgacttttgaactaactggggagacagacaacatatttgtgatagaacgggagggacttctgtattacaacagagccttggacagggaaacaagatctactcacaatctccaggttgcagccctggacgctaatggaattatagtggagggtccagtccctatcaccataaaagtgaaggacatcaacgacaatcgacccacgtttctccagtcaaagtacgaaggctcagtaaggcagaactctcgcccaggaaagcccttcttgtatgtcaatgccacagacctggatgatccggccactcccaatggccagctttattaccagattgtcatccagcttcccatgatcaacaatgtcatgtactttcagatcaacaacaaaacgggagccatctctcttacccgagagggatctcaggaattgaatcctgctaagaatccttcctataatctggtgatctcagtgaaggacatgggaggccagagtgagaattccttcagtgataccacatctgtggatatcatagtgacagagaatatttggaaagcaccaaaacctgtggagatggtggaaaactcaactgatcctcaccccatcaaaatcactcaggtgcggtggaatgatcccggtgcacaatattccttagttgacaaagagaagctgccaagattcccattttcaattgaccaggaaggagatatttacgtgactcagcccttggaccgagaagaaaaggatgcatatgttttttatgcagttgcaaaggatgagtacggaaaaccactttcatatccgctggaaattcatgtaaaagttaaagatattaatgataatccacctacatgtccgtcaccagtaaccgtatttgaggtccaggagaatgaacgactgggtaacagtatcgggacccttactgcacatgacagggatgaagaaaatactgccaacagttttctaaactacaggattgtggagcaaactcccaaacttcccatggatggactcttcctaatccaaacctatgctggaatgttacagttagctaaacagtccttgaagaagcaagatactcctcagtacaacttaacgatagaggtgtctgacaaagatttcaagaccctttgttttgtgcaaatcaacgttattgatatcaatgatcagatccccatctttgaaaaatcagattatggaaacctgactcttgctgaagacacaaacattgggtccaccatcttaaccatccaggccactgatgctgatgagccatttactgggagttctaaaattctgtatcatatcataaagggagacagtgagggacgcctgggggttgacacagatccccataccaacaccggatatgtcataattaaaaagcctcttgattttgaaacagcagctgtttccaacattgtgttcaaagcagaaaatcctgagcctctagtgtttggtgtgaagtacaatgcaagttcttttgccaagttcacgcttattgtgacagatgtgaatgaagcacctcaattttcccaacacgtattccaagcgaaagtcagtgaggatgtagctataggcactaaagtgggcaatgtgactgccaaggatccagaaggtctggacataagctattcactgaggggagacacaagaggttggcttaaaattgaccacgtgactggtgagatctttagtgtggctccattggacagagaagccggaagtccatatcgggtacaagtggtggccacagaagtaggggggtcttccttgagctctgtgtcagagttccacctgatccttatggatgtgaatgacaaccctcccaggctagccaaggactacacgggcttgttcttctgccatcccctcagtgcacctggaagtctcattttcgaggctactgatgatgatcagcacttatttcggggtccccattttacattttccctcggcagtggaagcttacaaaacgactgggaagtttccaaaatcaatggtactcatgcccgactgtctaccaggcacacagagtttgaggagagggagtatgtcgtcttgatccgcatcaatgatgggggtcggccacccttggaaggcattgtttctttaccagttacattctgcagttgtgtggaaggaagttgtttccggccagcaggtcaccagactgggatacccactgtgggcatggcagttggtatactgctgaccacccttctggtgattggtataattttagcagttgtgtttatccgcataaagaaggataaaggcaaagataatgttgaaagtgctcaagcatctgaagtcaaacctctgagaagctga

SEQ ID NO: 56054 - DNA, 2499 bp, Artificial Sequence
  derived and/or modified sequence
atgatcctgcaggcccacctgcacagcctgtgcctgctgatgctgtacctggccaccggctacggccaggagggcaagttcagcggccccctgaagcccatgaccttcagcatctacgagggccaggagcccagccagatcatcttccagttcaaggccaacccccccgccgtgaccttcgagctgaccggcgagaccgacaacatcttcgtgatcgagagagagggcctgctgtactacaacagagccctggacagagagaccagaagcacccacaacctgcaggtggccgccctggacgccaacggcatcatcgtggagggccccgtgcccatcaccatcaaggtgaaggacatcaacgacaacagacccaccttcctgcagagcaagtacgagggcagcgtgagacagaacagcagacccggcaagcccttcctgtacgtgaacgccaccgacctggacgaccccgccacccccaacggccagctgtactaccagatcgtgatccagctgcccatgatcaacaacgtgatgtacttccagatcaacaacaagaccggcgccatcagcctgaccagagagggcagccaggagctgaaccccgccaagaaccccagctacaacctggtgatcagcgtgaaggacatgggcggccagagcgagaacagcttcagcgacaccaccagcgtggacatcatcgtgaccgagaacatctggaaggcccccaagcccgtggagatggtggagaacagcaccgacccccaccccatcaagatcacccaggtgagatggaacgaccccggcgcccagtacagcctggtggacaaggagaagctgcccagattccccttcagcatcgaccaggagggcgacatctacgtgacccagcccctggacagagaggagaaggacgcctacgtgttctacgccgtggccaaggacgagtacggcaagcccctgagctaccccctggagatccacgtgaaggtgaaggacatcaacgacaacccccccacctgccccagccccgtgaccgtgttcgaggtgcaggagaacgagagactgggcaacagcatcggcaccctgaccgcccacgacagagacgaggagaacaccgccaacagcttcctgaactacagaatcgtggagcagacccccaagctgcccatggacggcctgttcctgatccagacctacgccggcatgctgcagctggccaagcagagcctgaagaagcaggacaccccccagtacaacctgaccatcgaggtgagcgacaaggacttcaagaccctgtgcttcgtgcagatcaacgtgatcgacatcaacgaccagatccccatcttcgagaagagcgactacggcaacctgaccctggccgaggacaccaacatcggcagcaccatcctgaccatccaggccaccgacgccgacgagcccttcaccggcagcagcaagatcctgtaccacatcatcaagggcgacagcgagggcagactgggcgtggacaccgacccccacaccaacaccggctacgtgatcatcaagaagcccctggacttcgagaccgccgccgtgagcaacatcgtgttcaaggccgagaaccccgagcccctggtgttcggcgtgaagtacaacgccagcagcttcgccaagttcaccctgatcgtgaccgacgtgaacgaggccccccagttcagccagcacgtgttccaggccaaggtgagcgaggacgtggccatcggcaccaaggtgggcaacgtgaccgccaaggaccccgagggcctggacatcagctacagcctgagaggcgacaccagaggctggctgaagatcgaccacgtgaccggcgagatcttcagcgtggcccccctggacagagaggccggcagcccctacagagtgcaggtggtggccaccgaggtgggcggcagcagcctgagcagcgtgagcgagttccacctgatcctgatggacgtgaacgacaacccccccagactggccaaggactacaccggcctgttcttctgccaccccctgagcgcccccggcagcctgatcttcgaggccaccgacgacgaccagcacctgttcagaggcccccacttcaccttcagcctgggcagcggcagcctgcagaacgactgggaggtgagcaagatcaacggcacccacgccagactgagcaccagacacaccgagttcgaggagagagagtacgtggtgctgatcagaatcaacgacggcggcagaccccccctggagggcatcgtgagcctgcccgtgaccttctgcagctgcgtggagggcagctgcttcagacccgccggccaccagaccggcatccccaccgtgggcatggccgtgggcatcctgctgaccaccctgctggtgatcggcatcatcctggccgtggtgttcatcagaatcaagaaggacaagggcaaggacaacgtggagagcgcccaggccagcgaggtgaagcccctgagaagctag

SEQ ID NO: 56055 - protein, 692 aa, Artificial Sequence
  derived and/or modified sequence
MAKRSRSEDEDDDLQYADHDYEVPQQKGLKKLWNRVKWTRDEDDKLKKLVEQHGTDDWTLIASHLQNRSDFQCQHRWQKVLNPELIKGPWTKEEDQRVIELVQKYGPKRWSLIAKHLKGRIGKQCRERWHNHLNPEVKKSSWTEEEDRIIYEAHKRLGNRWAEIAKLLPGRTDNSIKNHWNSTMRRKVEQEGYLQDGIKSERSSSKLQHKPCAAMDHMQTQNQFYIPVQIPGYQYVSPEGNCIEHVQPTSAFIQQPFIDEDPDKEKKIKELEMLLMSAENEVRRKRIPSQPGSFSSWSGSFLMDDNMSNTLNSLDEHTSEFYSMDENQPVSAQQNSPTKFLAVEANAVLSSLQTIPEFAETLELIESDPVAWSDVTSFDISDAAASPIKSTPVKLMRIQHNEGAMECQFNVSLVLEGKKNTCNGGNSEAVPLTSPNIAKFSTPPAILRKKRKMRVGHSPGSELRDGSLNDGGNMALKHTPLKTLPFSPSQFFNTCPGNEQLNIENPSFTSTPICGQKALITTPLHKETTPKDQKENVGFRTPTIRRSILGTTPRTPTPFKNALAAQEKKYGPLKIVSQPLAFLEEDIREVLKEETGTDLFLKEEDEPAYKSCKQENTASGKKVRKSLVLDNWEKEESGTQLLTEDISDMQSNCEWETVVYGKTEDQLIMTEQARRYLSTYTATSSTSRALIL

SEQ ID NO: 56056 - DNA, 2079 bp, Artificial Sequence
  derived and/or modified sequence
atggccaagagaagcagaagcgaggacgaggacgacgacctgcagtacgccgaccacgactacgaggtgccccagcagaagggcctgaagaagctgtggaacagagtgaagtggaccagagacgaggacgacaagctgaagaagctggtggagcagcacggcaccgacgactggaccctgatcgccagccacctgcagaacagaagcgacttccagtgccagcacagatggcagaaggtgctgaaccccgagctgatcaagggcccctggaccaaggaggaggaccagagagtgatcgagctggtgcagaagtacggccccaagagatggagcctgatcgccaagcacctgaagggcagaatcggcaagcagtgcagagagagatggcacaaccacctgaaccccgaggtgaagaagagcagctggaccgaggaggaggacagaatcatctacgaggcccacaagagactgggcaacagatgggccgagatcgccaagctgctgcccggcagaaccgacaacagcatcaagaaccactggaacagcaccatgagaagaaaggtggagcaggagggctacctgcaggacggcatcaagagcgagagaagcagcagcaagctgcagcacaagccctgcgccgccatggaccacatgcagacccagaaccagttctacatccccgtgcagatccccggctaccagtacgtgagccccgagggcaactgcatcgagcacgtgcagcccaccagcgccttcatccagcagcccttcatcgacgaggaccccgacaaggagaagaagatcaaggagctggagatgctgctgatgagcgccgagaacgaggtgagaagaaagagaatccccagccagcccggcagcttcagcagctggagcggcagcttcctgatggacgacaacatgagcaacaccctgaacagcctggacgagcacaccagcgagttctacagcatggacgagaaccagcccgtgagcgcccagcagaacagccccaccaagttcctggccgtggaggccaacgccgtgctgagcagcctgcagaccatccccgagttcgccgagaccctggagctgatcgagagcgaccccgtggcctggagcgacgtgaccagcttcgacatcagcgacgccgccgccagccccatcaagagcacccccgtgaagctgatgagaatccagcacaacgagggcgccatggagtgccagttcaacgtgagcctggtgctggagggcaagaagaacacctgcaacggcggcaacagcgaggccgtgcccctgaccagccccaacatcgccaagttcagcaccccccccgccatcctgagaaagaagagaaagatgagagtgggccacagccccggcagcgagctgagagacggcagcctgaacgacggcggcaacatggccctgaagcacacccccctgaagaccctgcccttcagccccagccagttcttcaacacctgccccggcaacgagcagctgaacatcgagaaccccagcttcaccagcacccccatctgcggccagaaggccctgatcaccacccccctgcacaaggagaccacccccaaggaccagaaggagaacgtgggcttcagaacccccaccatcagaagaagcatcctgggcaccacccccagaacccccacccccttcaagaacgccctggccgcccaggagaagaagtacggccccctgaagatcgtgagccagcccctggccttcctggaggaggacatcagagaggtgctgaaggaggagaccggcaccgacctgttcctgaaggaggaggacgagcccgcctacaagagctgcaagcaggagaacaccgccagcggcaagaaggtgagaaagagcctggtgctggacaactgggagaaggaggagagcggcacccagctgctgaccgaggacatcagcgacatgcagagcaactgcgagtgggagaccgtggtgtacggcaagaccgaggaccagctgatcatgaccgagcaggccagaagatacctgagcacctacaccgccaccagcagcaccagcagagccctgatcctgtag

SEQ ID NO: 56057 - DNA, 2079 bp, Artificial Sequence
  derived and/or modified sequence
atggccaagcgatcccggtcagaggacgaggatgacgatctgcaatatgcggatcatgattacgaggttcctcagcaaaaaggactcaagaagctgtggaatcgggtgaaatggacgagagatgaggatgataaactcaaaaaactagttgaacagcacggaaccgatgactggactcttatcgcctcacatctgcaaaatcggagcgattttcagtgccagcatcggtggcagaaggtgctcaaccccgaattgatcaaagggccatggactaaggaagaagaccagcgtgtgattgaactggtgcagaaatatgggccaaaaagatggagcctgatcgcaaaacacctgaagggaaggataggtaagcaatgcagagaaaggtggcacaaccatctcaatccagaggttaaaaagtcaagttggaccgaagaagaagataggataatttatgaagcccataagaggttagggaacaggtgggccgagatcgccaaactcttacccggcagaacagataacagcatcaagaaccattggaacagtaccatgcgaagaaaggtggaacaggaaggctaccttcaggacggcataaaatcagaaaggtcttccagcaaactgcagcataaaccgtgcgcagccatggaccacatgcaaacacagaatcagttttacatcccagtgcagatccctgggtaccaatatgtttccccggaagggaattgtatcgagcatgtccagcccacttccgccttcattcagcagccatttatcgacgaggaccccgacaaagagaagaaaatcaaagaattagagatgctgctcatgagcgcagagaacgaggttagacggaagaggatcccctctcagccagggagtttttcttcatggagcgggtccttcctgatggacgataacatgtctaacactctgaacagcctggatgaacatacgagcgagttctactccatggatgagaatcaacctgtttccgcacagcagaacagccctaccaaattcctcgctgtggaggcgaacgctgtgctgtcgtcgctgcaaactatcccagagttcgcagaaacattagagctgattgagagcgaccccgttgcatggagcgatgtgacaagctttgatatttctgacgccgccgccagccccataaagagcactcccgttaagttgatgcgcatacagcataacgagggcgcaatggaatgccagttcaatgtgagcctggtgcttgagggtaaaaagaatacatgtaacggcgggaatagcgaggctgttccgctgacatctcctaacatcgcaaagttctccaccccaccagccattctaaggaaaaaaagaaagatgcgcgtggggcactcaccaggcagcgaactgcgtgatggctctttgaacgacggcggcaatatggccctgaagcatactcccctaaagacacttcctttctctccaagtcagttctttaacacttgtcccggtaacgagcagcttaatatcgagaacccatcctttacaagtacacctatctgcggccagaaagctctgatcacaacccccctccataaggaaactacaccaaaggatcagaaggaaaatgtcggttttcgaacaccaaccatccgaagaagcattcttggcaccactccaagaactccaactccattcaaaaacgccttagctgcacaggagaagaaatacggaccccttaagattgtttcgcaacctctcgcattcctcgaggaggacatacgcgaggtcttgaaggaagagaccggcaccgatttgtttctcaaagaggaggatgaaccagcctataagtcctgcaaacaagaaaacaccgcctcgggaaaaaaggtgcggaagtctctggtgttagataattgggagaaggaggaatccggtacccaacttttgacagaggatattagcgatatgcagtcgaattgcgaatgggagactgtggtctacggcaaaactgaagatcagctgatcatgactgaacaggcgcgccgctatttgtctacttacaccgctacctcatcaactagtagagccctgattctgtag

SEQ ID NO: 56058 - DNA, 2079 bp, Artificial Sequence
  derived and/or modified sequence
atggccaagaggagccgctcagaagatgaagatgatgacctgcagtatgctgaccatgactatgaggtgccccagcagaagggcctgaagaagctgtggaacagagtgaagtggaccagagatgaagatgacaagctgaagaagctggtggagcagcacggcacagatgactggaccctgattgccagccacctgcagaacagaagtgacttccagtgccagcaccgctggcagaaggtgctgaaccctgagctgatcaagggcccctggaccaaggaggaggaccagagggtgattgagctggtgcagaagtatggccccaagcgctggagcctgattgccaagcacctgaagggcagaattggcaagcagtgccgggagcgctggcacaaccacctgaaccctgaggtgaagaagagctcctggacagaggaggaggaccgcatcatctatgaggcccacaagaggctgggcaaccgctgggccgagatcgccaagctgctgcccggccgcacagacaacagcatcaagaaccactggaacagcaccatgaggaggaaggtggagcaggagggctacctgcaggacggcatcaagtctgagaggagcagcagcaagctgcagcacaagccctgtgccgccatggaccacatgcagacccagaaccagttctacatccctgtgcagatccctggctaccagtatgtgtccccagagggcaactgcattgaacatgtgcagcccaccagcgccttcatccagcagcccttcattgatgaggaccctgacaaggagaagaagatcaaggagctggagatgctgctgatgtctgcagaaaatgaggtgcggaggaagaggatccccagccagcccggcagcttcagctcctggagcggcagcttcctgatggatgacaacatgagcaacaccctgaacagcctggatgagcacaccagcgagttctacagcatggatgagaaccagcctgtgtctgcccagcagaacagccccaccaagttcctggccgtggaggccaatgctgtgctgagcagcctgcagaccatccctgagtttgctgagaccctggagctgattgaaagtgaccctgtggcctggagcgatgtgaccagctttgacatcagtgatgctgctgccagccccatcaagagcacccctgtgaagctgatgaggatccagcacaatgaaggagccatggagtgccagttcaacgtgtccctggtgctggagggcaagaagaacacctgcaatggaggcaacagcgaggccgtgcccctgaccagccccaacatcgccaagttcagcaccccaccagccatcctgaggaagaagaggaagatgagggtgggccacagccctggcagcgagctgagagatggcagcctgaatgatggcggcaacatggccctgaagcacacccccctgaagaccctgcccttcagccccagccagttcttcaacacctgccctggaaatgagcagctgaacatcgagaaccccagcttcaccagcacccccatctgtggccagaaggccctgatcaccacccccctgcacaaggagaccacccccaaggaccagaaggaaaatgtgggcttccgcacccccaccatcagaagaagcatcctgggcaccacccccaggacccccacccccttcaagaatgccctggccgcccaggagaagaagtatggccccctgaagatcgtgtcccagcccctggccttcctggaggaggacatccgggaggtgctgaaggaggagactggaacagacctcttcctgaaggaggaggatgagcccgcctacaagagctgcaagcaggagaacacagccagcggcaagaaggtgaggaagagcctggtgctggacaactgggagaaggaggagagcggcacccagctgctgacagaggacatcagtgacatgcagagcaactgtgagtgggagaccgtggtgtatggcaagacagaggaccagctgatcatgacagagcaggcccggcgctacctgagcacctacacagccaccagcagcaccagccgggccctgatcctgtag

SEQ ID NO: 56059 - DNA, 2079 bp, Artificial Sequence
  derived and/or modified sequence
atggccaagcggagccggagcgaggacgaggacgacgacctgcagtacgcggaccacgattacgaggtcccccagcaaaagggtctgaagaaactctggaaccgtgtgaagtggactcgggatgaggacgacaagctaaagaagctggtagagcagcacggcactgacgactggacgctgattgcctcacatcttcagaacagaagcgatttccagtgtcagcaccggtggcagaaggtgttgaacccagagcttattaaaggcccatggactaaggaggaggaccagcgtgttattgaactcgttcagaaatacggccccaaaaggtggtcccttatcgccaaacatcttaaaggtcgaattggcaaacaatgccgggagcgctggcacaaccatctgaaccccgaggtcaaaaaaagttcctggacagaagaagaagataggataatctatgaggctcataaaaggctcggcaaccgttgggcggaaatagccaagttacttcccgggagaaccgacaacagtattaagaatcactggaattcaactatgaggcggaaggttgaacaggagggctacctgcaggatgggatcaagagcgaacggtctagttccaagttgcagcacaagccctgtgctgccatggaccacatgcaaactcaaaaccaattttatatccccgttcagataccagggtatcagtacgtgtcaccggaggggaactgcatcgaacacgtgcagccaacaagcgctttcatccagcaaccattcatcgatgaagatcctgacaaagaaaaaaaaattaaggaactggagatgctgctcatgtcggcagagaacgaagtccgcaggaaacggattccttctcagccaggcagtttcagctcatggagtggttcctttttaatggatgacaacatgtcaaatactctgaacagcctggatgaacatactagcgagttctacagcatggacgagaaccagcccgtttccgcacagcagaacagtcctactaaattcctggccgttgaggccaatgccgtgctaagctctctgcagaccataccagagtttgccgagaccctggagttgatagagagcgacccagtggcctggtcagacgtcacatccttcgacatcagcgacgccgcagctagtcccattaagtctacacccgtgaagcttatgcgaatccagcataacgaaggagccatggaatgccagttcaacgtgtcattagtgctggaagggaagaaaaatacatgtaacgggggaaacagcgaggctgtgccactcaccagcccgaacatcgctaagttctcgacccctcccgctatactccgaaaaaagagaaaaatgagagtgggtcactctcctggctccgagcttcgcgacggatcactgaacgacggtggtaacatggccctgaaacacacccctcttaagacattacccttttcaccatctcagtttttcaacacatgcccgggcaatgagcagcttaatatcgagaatccctcatttacgagcacacctatttgcggccaaaaagcactcattacaacacctctgcacaaggagacgacaccgaaagatcagaaggagaatgtgggcttcagaaccccaacgatacgccgcagcatcctgggaacaacccctcgcacacctacaccctttaagaatgctcttgccgcacaggaaaaaaagtacggaccgttgaaaatcgtgtcccaaccacttgctttcctggaggaggacatacgggaggtgctgaaagaggagactggcacagacctgtttctgaaggaagaagacgagcccgcatacaagagctgcaagcaggagaatacagccagcggcaagaaagtgcgaaaaagtttagtactggataactgggaaaaagaggagtccggtacgcagctgctaacagaagatatatccgatatgcagtcgaattgcgaatgggaaaccgttgtatatgggaaaactgaggatcagctcatcatgacggaacaggccaggagatatctgtcaacctacaccgcaacttctagtacaagccgggccctgatactctag

SEQ ID NO: 56060 - DNA, 2079 bp, Artificial Sequence
  derived and/or modified sequence
atggctaagaggagtaggagtgaagatgaggatgacgatctacagtatgccgaccacgactatgaagtgcctcagcagaaaggactgaagaagctctggaatagagtaaagtggacaagagacgaagacgacaaactcaagaagctcgtggagcagcatggaactgatgactggacacttattgcctcccatctgcaaaatagatcagattttcagtgccagcaccggtggcagaaggtgttaaacccagagcttattaagggtccctggactaaggaagaagaccagagggtgatcgaactggtccagaagtacgggcctaagagatggagtttaattgccaagcacctcaagggaaggattggtaaacagtgtcgagaacggtggcacaatcacctgaatccagaggtgaagaaatcgtcttggactgaggaggaggatcgcatcatctacgaggcgcataagagactgggcaaccggtgggcagaaatcgccaagttgctgcctggcaggaccgacaactctattaagaaccactggaactcaacaatgcggaggaaagtagagcaagaaggctacctgcaggacgggattaaatcggagcgctctagctcaaagctccagcacaaaccgtgtgcggctatggaccatatgcagacccagaatcagttctacatacccgtgcagattccgggatatcagtacgtttcccctgagggaaattgcatcgagcacgtccagcccacctcagcttttattcaacaaccttttatcgacgaggatccagataaggagaagaaaatcaaagagctcgagatgcttctgatgtccgcagaaaacgaggtgaggcggaagaggattcctagccaacctggaagttttagttcctggtccggcagtttcctcatggatgataacatgtccaatacgttgaatagccttgatgagcacacgtcagaattctactcaatggacgagaatcagccggtctccgcccagcagaactctcctacgaagttcctggcagttgaagctaacgctgtgctgtccagcctgcaaaccatacccgagttcgccgagacactggagctgatcgaatcagaccccgtggcatggtcagatgttacctcatttgatatttccgatgccgcagccagccccatcaagtccactccggtgaagttaatgcgaatccagcacaacgagggagccatggagtgtcagtttaacgtgtctctcgtgctggagggcaaaaagaatacttgcaacgggggtaattccgaagctgtgcctcttactagccctaatatcgccaagttcagcacccctcccgcaatcctgaggaagaagagaaagatgcgggtgggacactcacccggttcagaattgcgggatggatccttgaatgacgggggtaatatggctctgaaacataccccccttaaaacattacctttttctccaagtcagttctttaacacttgtcccggaaatgaacaactcaacattgagaatccttctttcacctccacacccatctgcggccaaaaggctcttatcaccacacccctacataaagagaccactcctaaggatcagaaagaaaacgtgggcttccgcacccctaccatcagacggagtattctgggaactacaccccgaacacccacccctttcaagaacgcactcgccgctcaagaaaagaaatacggcccactcaagatcgtgtctcaacctctggccttcctggaagaggatattagggaggtattaaaagaggagacagggaccgacctgtttttgaaggaagaggatgagccggcttataagtcttgcaagcaggaaaataccgcctctgggaagaaagtccgcaagtcacttgttctggataactgggaaaaggaggaatctggcactcagctgctgactgaggacatctcggacatgcagagcaattgtgagtgggagaccgtcgtgtacggcaagactgaagaccagttgataatgactgagcaggcgaggagatacctgagcacttataccgcaacctcctcgacctcccgggctcttattctgtag

SEQ ID NO: 56061 - DNA, 2148 bp, Artificial Sequence
  derived and/or modified sequence
cattcgccggaggctggaggaggctgacccgcgtccccgcccagcctgctcctatgcggtacttgaaggatggcgaagaggtcgcgcagtgaggatgaggatgatgaccttcagtatgccgatcatgattatgaagtaccacaacaaaaaggactgaagaaactctggaacagagtaaaatggacaagggacgaggatgataaattaaagaagttggttgaacaacatggaactgatgattggactctaattgctagtcatcttcaaaatcgctctgattttcagtgccagcatcgatggcagaaagttttaaatcctgaattgataaagggtccttggactaaagaagaagatcagagggttattgaattagttcagaaatatgggccaaaaagatggtctttaattgcaaaacatttaaaaggaagaataggcaagcagtgtagagaaagatggcataatcatctgaatcctgaggtaaagaaatcttcctggacagaagaggaggacaggatcatctatgaagcacataagcggttgggaaatcgttgggcagaaattgccaaactacttccaggaaggactgataattctatcaaaaatcattggaattctactatgcgaagaaaagtggaacaggagggctatttacaagatggaataaaatcagaacgatcttcatctaaacttcaacacaaaccttgtgcagctatggatcatatgcaaacccagaatcagttttacatacctgttcagatccctgggtatcagtatgtgtcacctgaaggcaattgtatagaacatgttcagcctacttctgcctttattcagcaacccttcattgatgaagatcctgataaggaaaagaaaataaaggaacttgagatgcttcttatgtcagctgagaatgaagttagaagaaagcgaattccatcacagcctggaagtttttctagctggtctggtagtttcctcatggatgataacatgtctaatactctaaatagccttgacgagcacactagtgagttttacagtatggatgaaaatcagcctgtgtctgctcagcagaattcacccacaaagttcctggccgtggaggcaaacgctgtgttatcctctttgcagaccatcccagaatttgcagagactctagaacttattgaatctgatcctgtagcatggagtgacgttaccagttttgatatttctgatgctgctgcttctcctatcaaatccaccccagttaaattaatgagaattcagcacaatgaaggagccatggaatgccaatttaacgtcagtcttgtacttgaagggaaaaaaaacacttgtaatggtggcaacagtgaagctgttcctttaacatccccaaatatagccaagtttagcactccaccagccatcctcagaaagaagagaaaaatgcgagtgggtcattccccaggcagcgaacttagggatggctcattgaacgatggtggtaatatggcgctaaaacatacaccactgaaaacactaccattttctccttcacagtttttcaacacatgtcctggtaatgaacaacttaatatagaaaatccttcatttacatcaacccctatttgtgggcagaaagctctcattacaactcctcttcataaggaaacaactcccaaagatcaaaaggaaaatgtagggtttagaacacctactattagaagatctatactgggtaccacaccaagaactcctactccttttaagaatgcgcttgctgctcaggagaaaaaatatggacctcttaaaattgtgtcccagccacttgctttcttggaagaagatattcgggaagttttaaaagaagaaactggaacagacctattcctcaaagaggaagatgaacctgcttacaaaagctgcaaacaagagaataccgcttctgggaagaaagtcagaaaatcactagtcttagataattgggaaaaagaagaatcaggcactcaactgttgactgaagacatttcagacatgcagtcaaattgtgaatgggaaacagtggtttatgggaagacagaagaccaacttattatgactgaacaagcaagaagatatctgagtacttacacagctaccagtagtacttcaagagctctcatactgtaa

SEQ ID NO: 56062 - protein, 423 aa, Artificial Sequence
  derived and/or modified sequence
MFIMNEKWDTNSSENWHPIWNVNDTKHHLYSDINITYVNYYLHQPQVAAIFIISYFLIFFLCMMGNTVVCFIVMRNKHMHTVTNLFILNLAISDLLVGIFCMPITLLDNIIAGWPFGNTMCKISGLVQGISVAASVFTLVAIAVDRFQCVVYPFKPKLTIKTAFVIIMIIWVLAITIMSPSAVMLHVQEEKYYRVRLNSQNKTSPVYWCREDWPNQEMRKIYTTVLFANIYLAPLSLIVIMYGRIGISLFRAAVPHTGRKNQEQWHVVSRKKQKIIKMLLIVALLFILSWLPLWTLMMLSDYADLSPNELQIINIYIYPFAHWLAFGNSSVNPIIYGFFNENFRRGFQEAFQLQLCQKRAKPMEAYALKAKSHVLINTSNQLVQESTFQNPHGETLLYRKSAEKPQQELVMEELKETTNSSEI

SEQ ID NO: 56063 - DNA, 1272 bp, Artificial Sequence
  derived and/or modified sequence
atgttcatcatgaacgagaagtgggacaccaacagcagcgagaactggcaccccatctggaacgtgaacgacaccaagcaccacctgtacagcgacatcaacatcacctacgtgaactactacctgcaccagccccaggtggccgccatcttcatcatcagctacttcctgatcttcttcctgtgcatgatgggcaacaccgtggtgtgcttcatcgtgatgagaaacaagcacatgcacaccgtgaccaacctgttcatcctgaacctggccatcagcgacctgctggtgggcatcttctgcatgcccatcaccctgctggacaacatcatcgccggctggcccttcggcaacaccatgtgcaagatcagcggcctggtgcagggcatcagcgtggccgccagcgtgttcaccctggtggccatcgccgtggacagattccagtgcgtggtgtaccccttcaagcccaagctgaccatcaagaccgccttcgtgatcatcatgatcatctgggtgctggccatcaccatcatgagccccagcgccgtgatgctgcacgtgcaggaggagaagtactacagagtgagactgaacagccagaacaagaccagccccgtgtactggtgcagagaggactggcccaaccaggagatgagaaagatctacaccaccgtgctgttcgccaacatctacctggcccccctgagcctgatcgtgatcatgtacggcagaatcggcatcagcctgttcagagccgccgtgccccacaccggcagaaagaaccaggagcagtggcacgtggtgagcagaaagaagcagaagatcatcaagatgctgctgatcgtggccctgctgttcatcctgagctggctgcccctgtggaccctgatgatgctgagcgactacgccgacctgagccccaacgagctgcagatcatcaacatctacatctaccccttcgcccactggctggccttcggcaacagcagcgtgaaccccatcatctacggcttcttcaacgagaacttcagaagaggcttccaggaggccttccagctgcagctgtgccagaagagagccaagcccatggaggcctacgccctgaaggccaagagccacgtgctgatcaacaccagcaaccagctggtgcaggagagcaccttccagaacccccacggcgagaccctgctgtacagaaagagcgccgagaagccccagcaggagctggtgatggaggagctgaaggagaccaccaacagcagcgagatctag

SEQ ID NO: 56064 - DNA, 1272 bp, Artificial Sequence
  derived and/or modified sequence
atgttcattatgaatgaaaagtgggatactaacagctcagaaaactggcatccaatttggaatgtcaatgacaccaaacaccacttgtacagcgatattaacatcacttatgttaactactatctacaccagccccaggtcgccgctatctttattatcagttactttttaattttttttctgtgcatgatgggtaacacagtggtgtgcttcattgtcatgcgaaataaacacatgcacactgttactaatctgttcatactgaacctggccatttctgacctgcttgtcggcatcttttgcatgcctattactctgttggacaatatcattgcaggctggccttttggtaatacgatgtgcaagattagtggactggtgcagggcatctccgtggcagcctccgtgtttaccctcgtggccattgcagtggacaggtttcaatgcgtggtgtatccgttcaaacctaaactcactattaaaaccgcatttgtgatcatcatgatcatttgggtcctagccattaccataatgtctccctccgctgtcatgctgcatgtgcaggaggaaaagtactacagggtgcggttaaattcacagaacaagacatcgcccgtatattggtgcagggaggattggcctaaccaggaaatgcgcaagatctacaccacagtgttatttgctaatatttacctcgctcctctctcactgatagtgattatgtatggaaggattggtattagcctcttcagggcggccgtgccccacactggacggaagaatcaagaacagtggcatgtcgtgtcgcgcaaaaagcaaaaaatcataaaaatgctgctaatcgtggctctgctgttcattctgagctggctgccactatggactctcatgatgctaagtgattacgccgacctgagccctaatgagcttcaaattatcaatatctatatctacccgttcgcacattggttggcattcggcaattcaagtgtcaacccaatcatttacggcttcttcaacgagaactttcgccgcgggtttcaggaagcctttcagttacagctgtgtcaaaaaagagctaagcccatggaagcctatgctctgaaagccaaaagtcatgtactgataaatacatctaaccaactggtgcaagagtcgacctttcagaaccctcacggtgagacattgttgtacagaaagtccgccgaaaaaccccaacaggaactcgtgatggaggaactgaaagaaaccacaaatagttccgagatctag

SEQ ID NO: 56065 - DNA, 1272 bp, Artificial Sequence
  derived and/or modified sequence
atgttcatcatgaatgagaagtgggacaccaacagcagcgagaactggcaccccatctggaatgtgaatgacaccaagcaccacctgtacagcgacatcaacatcacctacgtgaactactacctgcaccagccccaggtggccgccatcttcatcatctcctacttcctgatcttcttcctgtgcatgatgggcaacacagtggtgtgcttcatcgtgatgaggaacaagcacatgcacacagtgaccaacctcttcatcctgaacctggccatcagtgacctgctggtgggcatcttctgcatgcccatcaccctgctggacaacatcatcgccggctggcccttcggcaacaccatgtgcaagatcagcggcctggtgcagggcatctctgtggccgcctctgtgttcaccctggtggccatcgctgtggaccgcttccagtgtgtggtgtaccccttcaagcccaagctgaccatcaagacagccttcgtcatcatcatgatcatctgggtgctggccatcaccatcatgagccccagcgctgtgatgctgcacgtgcaggaggagaagtactacagagtgcggctgaacagccagaacaagaccagccctgtgtactggtgccgggaggactggcccaaccaggagatgaggaagatctacaccaccgtgctgtttgccaacatctacctggcccccctgagcctcatcgtcatcatgtatggaagaattggcatcagcctcttccgggctgctgtgccccacactggaaggaagaaccaggagcagtggcacgtggtgtccaggaagaagcagaagatcatcaagatgctgctgattgtggccctgctcttcatcctgtcctggctgcccctgtggaccctgatgatgctgagtgactatgctgacctgagccccaatgagctgcagatcatcaacatctacatctacccctttgcccactggctggccttcggcaacagctctgtgaaccccatcatctacggcttcttcaatgaaaacttccggcggggcttccaggaggccttccagctgcagctgtgccagaagagggccaagcccatggaggcctatgccctgaaggccaagagccacgtgctgatcaacaccagcaaccagctggtgcaggagagcaccttccagaacccccacggggagaccctgctgtacaggaagtctgctgagaagccccagcaggagctggtgatggaggagctgaaggagaccaccaacagcagcgagatctag

SEQ ID NO: 56066 - DNA, 1559 bp, Artificial Sequence
  derived and/or modified sequence
tgcctctgcccacctcttctcttctgcttccatattacaggttcatcatgaatgagaaatgggacacaaactcttcagaaaactggcatcccatctggaatgtcaatgacacaaagcatcatctgtactcagatattaatattacctatgtgaactactatcttcaccagcctcaagtggcagcaatcttcattatttcctactttctgatcttctttttgtgcatgatgggaaatactgtggtttgctttattgtaatgaggaacaaacatatgcacacagtcactaatctcttcatcttaaacctggccataagtgatttactagttggcatattctgcatgcctataacactgctggacaatattatagcaggatggccatttggaaacacgatgtgcaagatcagtggattggtccagggaatatctgtcgcagcttcagtctttacgttagttgcaattgctgtagataggttccagtgtgtggtctacccttttaaaccaaagctcactatcaagacagcgtttgtcattattatgatcatctgggtcctagccatcaccattatgtctccatctgcagtaatgttacatgtgcaagaagaaaaatattaccgagtgagactcaactcccagaataaaaccagtccagtctactggtgccgggaagactggccaaatcaggaaatgaggaagatctacaccactgtgctgtttgccaacatctacctggctcccctctccctcattgtcatcatgtatggaaggattggaatttcactcttcagggctgcagttcctcacacaggcaggaagaaccaggagcagtggcacgtggtgtccaggaagaagcagaagatcattaagatgctcctgattgtggccctgctttttattctctcatggctgcccctgtggactctaatgatgctctcagactacgctgacctttctccaaatgaactgcagatcatcaacatctacatctacccttttgcacactggctggcattcggcaacagcagtgtcaatcccatcatttatggtttcttcaacgagaatttccgccgtggtttccaagaagctttccagctccagctctgccaaaaaagagcaaagcctatggaagcttatgccctaaaagctaaaagccatgtgctcataaacacatctaatcagcttgtccaggaatctacatttcaaaaccctcatggggaaaccttgctttataggaaaagtgctgaaaaaccccaacaggaattagtgatggaagaattaaaagaaactactaacagcagtgagatttaaaaagagctagtgtgataatcctaactctactacgcattatatatttaaatccattgctttttgtggctttgcacttcaaatttttcaaagaatgttctaaataaaacatttactgaaagccctctctggcaaaaaaattaaaaataaacaaaaatggtcataagatcataaacaatcttatgttgtataaaaatacgtagagtgacttagacatgtttgcatgaataaatatatttctagagaacagtt

SEQ ID NO: 56067 - DNA, 1866 bp, Artificial Sequence
  derived and/or modified sequence
cctcctgagtagctgggactacaggcgcccgccaccacgcctggctaatttttttgtatttttagtagggacggcgtttcactgtgttagccagatggtctccatctcccgacctcgtgatccacccacctcggcctcccaaagtgctgggattacaggcgtgagccaccgcgcccggccaatttcctttcttagttgcctctgcccacctcttctcttctgcttccatattacaggtctcctcagttgcgaaattaggatgttaattatagcttttgacatacaagaaacatcaaaaagattgaatgtcttaataagagtgaagcatgtagatcagtgactgctatgttcatcatgaatgagaaatgggacacaaactcttcagaaaactggcatcccatctggaatgtcaatgacacaaagcatcatctgtactcagatattaatattacctatgtgaactactatcttcaccagcctcaagtggcagcaatcttcattatttcctactttctgatcttctttttgtgcatgatgggaaatactgtggtttgctttattgtaatgaggaacaaacatatgcacacagtcactaatctcttcatcttaaacctggccataagtgatttactagttggcatattctgcatgcctataacactgctggacaatattatagcaggatggccatttggaaacacgatgtgcaagatcagtggattggtccagggaatatctgtcgcagcttcagtctttacgttagttgcaattgctgtagataggttccagtgtgtggtctacccttttaaaccaaagctcactatcaagacagcgtttgtcattattatgatcatctgggtcctagccatcaccattatgtctccatctgcagtaatgttacatgtgcaagaagaaaaatattaccgagtgagactcaactcccagaataaaaccagtccagtctactggtgccgggaagactggccaaatcaggaaatgaggaagatctacaccactgtgctgtttgccaacatctacctggctcccctctccctcattgtcatcatgtatggaaggattggaatttcactcttcagggctgcagttcctcacacaggcaggaagaaccaggagcagtggcacgtggtgtccaggaagaagcagaagatcattaagatgctcctgattgtggccctgctttttattctctcatggctgcccctgtggactctaatgatgctctcagactacgctgacctttctccaaatgaactgcagatcatcaacatctacatctacccttttgcacactggctggcattcggcaacagcagtgtcaatcccatcatttatggtttcttcaacgagaatttccgccgtggtttccaagaagctttccagctccagctctgccaaaaaagagcaaagcctatggaagcttatgccctaaaagctaaaagccatgtgctcataaacacatctaatcagcttgtccaggaatctacatttcaaaaccctcatggggaaaccttgctttataggaaaagtgctgaaaaaccccaacaggaattagtgatggaagaattaaaagaaactactaacagcagtgagatttaaaaagagctagtgtgataatcctaactctactacgcattatatatttaaatccattgctttttgtggctttgcacttcaaatttttcaaagaatgttctaaataaaacatttactgaaagccctctctggcaaaaaaattaaaaataaacaaaaatggtcataagatcataaacaatcttatgttgtataaaaatacgtagagtgacttagacatgtttgcatgaataaatatatttctagagaacagtt

SEQ ID NO: 56068 - DNA, 1272 bp, Artificial Sequence
  derived and/or modified sequence
atgttcatcatgaacgagaagtgggacaccaacagcagcgagaactggcatccaatctggaacgtcaacgacacgaagcatcatctgtattcagatatcaacattacctatgtcaactattatctgcaccaaccccaagttgccgccatctttatcatttcctatttcctcattttttttctctgcatgatgggcaataccgtcgtctgctttatcgtcatgagaaacaaacatatgcacaccgtgacaaacctgttcatccttaatttggcaatatctgacctgttggtgggaattttctgcatgccaatcaccctcctagacaatataatcgcaggctggcctttcggaaatacaatgtgtaaaatctctggactagtgcagggaatctccgttgcggcctctgtctttaccttagtggccattgcggttgatcggttccagtgtgtcgtgtacccattcaagcccaagctgaccataaagaccgcatttgtgatcattatgatcatctgggtgctggctattactatcatgagcccatcagccgtgatgctccacgtgcaggaagagaagtattacagggtgaggctgaattcacaaaataaaacctcaccagtttactggtgtcgtgaggactggcccaaccaagaaatgagaaaaatttatacgaccgttctgtttgccaacatttacctggcccccctgtcactgattgtgatcatgtatggccgcattgggatcagcctgttccgcgccgctgtgccgcacacagggcgcaaaaaccaggagcagtggcatgtcgtgagccgcaagaaacagaagatcataaagatgttacttatagttgcgctgctgtttatcctgtcatggctccccctctggacattaatgatgttatcagattacgctgacctgtcccccaatgaactgcagatcattaatatctacatctacccatttgcccattggctggccttcggaaattcttcagtgaaccccattatttacggcttttttaacgagaatttccgtcgggggtttcaggaagctttccagctacaattatgtcagaaaagggctaaaccaatggaggcttacgcattgaaggccaagagtcacgtgctgatcaacaccagtaatcagctggtgcaagaaagtacatttcagaacccccacggggagacactcctataccgtaaatccgccgagaaacctcagcaggagctagtaatggaggaactgaaagaaactaccaattcaagcgaaatctag

SEQ ID NO: 56069 - DNA, 1272 bp, Artificial Sequence
  derived and/or modified sequence
atgtttatcatgaatgaaaagtgggataccaatagttccgaaaattggcatcctatttggaatgtgaatgataccaaacaccatttatattctgacattaatataacatatgtcaactactatctgcaccaaccacaggtggcggcaatattcatcataagctactttctgatcttctttttgtgtatgatgggaaacaccgttgtctgcttcatagtaatgagaaataagcatatgcatactgtcacgaatcttttcattctcaacttagccatttccgacttgctggtcggaatcttctgcatgcccataactctgctcgataacatcattgccggatggcccttcggaaatacaatgtgtaaaatctctggtctagtccagggcatctctgttgcagcttccgtgtttactcttgtggctatcgctgtggataggtttcagtgtgtggtttatccatttaaacctaagctgactatcaaaaccgccttcgtgatcattatgattatctgggtgctagcaatcactatcatgtcgccgtctgctgtgatgttacatgtgcaggaagaaaagtactatcgtgtgaggctgaatagtcagaacaaaacttcccccgtatactggtgccgggaggattggccaaatcaggagatgaggaagatctacacgaccgtactttttgcgaatatctatctcgcgccactgagtttgatcgtcatcatgtacggaagaattggaatcagtttatttcgggcagctgtgcctcatacgggcaggaagaatcaagagcaatggcacgtggtgtcccggaagaagcagaaaattattaaaatgctgctgatcgtggctctgctctttatcctgtcctggctgccactgtggacgctcatgatgctttcagactacgcggatctctcccccaacgagctacagatcataaacatttatatctacccgttcgctcattggttggcgtttggtaattcaagtgttaatcccataatttatggtttcttcaatgagaatttcagacgaggatttcaagaggccttccaacttcagctatgccagaaaagagccaagcccatggaagcgtatgcccttaaggctaagagccacgtgctgattaacacgagtaatcagctcgtgcaggagtccacatttcagaatccccacggtgagaccctcctgtacagaaaatccgccgaaaaaccccagcaggagctggttatggaggagctcaaagaaactactaacagctcagagatatag

SEQ ID NO: 56070 - protein, 212 aa, Artificial Sequence
  derived and/or modified sequence
MVSRMVSTMLSGLLFWLASGWTPAFAYSPRTPDRVSEADIQRLLHGVMEQLGIARPRVEYPAHQAMNLVGPQSIEGGAHEGLQHLGPFGNIPNIVAELTGDNIPKDFSEDQGYPDPPNPCPVGKTADDGCLENTPDTAEFSREFQLHQHLFDPEHDYPGLGKWNKKLLYEKMKGGERRKRRSVNPYLQGQRLDNVVAKKSVPHFSDEDKDPE

SEQ ID NO: 56071 - DNA, 639 bp, Artificial Sequence
  derived and/or modified sequence
atggtgagccgcatggtgagcacaatgctgtctggcctcctcttttggttggccagcggttggacgcccgcatttgcatattcccccagaacccctgatcgggttagcgaggcagacatccagagactgctgcacggagttatggaacagctgggaattgcaagaccacgggtggaataccctgcgcaccaggcaatgaatctcgtagggccacagtccattgaaggcggagcccacgaggggttacagcacctcggcccatttggaaacattcctaatatagtcgccgagctgacaggcgacaatatacctaaagacttttctgaagaccaagggtaccctgatcccccaaacccatgccccgtgggtaaaaccgccgacgatgggtgcttagaaaatacaccagacacggccgaattttcccgcgagttccagctacaccagcacctgttcgatcctgaacatgactacccgggactgggaaagtggaacaagaaactactgtacgagaaaatgaaaggaggtgaacgcagaaagaggaggagtgtgaacccttacctgcaggggcaaagactggacaatgtggtggccaaaaagtctgtgccccacttcagcgatgaagataaggaccccgagtag

SEQ ID NO: 56072 - DNA, 639 bp, Artificial Sequence
  derived and/or modified sequence
atggtgtcacgtatggtcagtactatgttatccggtttactcttttggctagcgagcggctggacacctgcgttcgcctactcccctagaactcccgacagagtgagtgaagctgacatacagaggctgttgcacggcgtgatggagcaacttgggattgcccggccgagagtcgaatacccggcacaccaggccatgaacctggtcggtccccaatccatcgagggcggagcgcacgagggccttcagcatctcggcccttttggaaatatcccaaacatcgtggctgaacttacgggcgataacatccctaaggacttttccgaggatcaaggatatcccgacccaccaaatccctgccctgtcggaaagaccgcagacgacggttgtctcgagaacacccccgataccgcagaattctctagagaatttcagttgcaccaacacctcttcgatccagagcacgattaccccggtttggggaaatggaacaagaagcttctgtacgaaaaaatgaagggaggagagagaaggaagagacgatctgtaaatccttacctacaagggcaaaggctggataacgtggttgctaaaaagtctgttccgcacttctccgatgaggataaggacccagagtag

SEQ ID NO: 56073 - DNA, 639 bp, Artificial Sequence
  derived and/or modified sequence
atggtgagtcggatggtttctaccatgctgagtggattactcttctggctggcttcagggtggacccccgcctttgcttacagtccccggactccagaccgcgtctcagaagccgatatccagcgtttactacacggagttatggagcaactgggcattgctagacctagggttgagtatcccgcccaccaggccatgaatctggttggcccgcagagcattgaaggcggagcccacgaaggcctgcagcatcttggaccatttggaaacattcctaatatagtggccgaacttacaggtgataatattcccaaggatttcagcgaagatcaggggtatcctgaccctccaaacccgtgtcctgtgggcaagactgcagacgacggctgcttagagaatacacccgataccgcagaattttctcgcgagttccagcttcaccagcacctattcgaccccgaacatgattaccctggcctcggcaagtggaataagaaactactctatgaaaaaatgaagggaggcgaaagaagaaaaagaagaagcgtgaatccttacctccagggccagcgtctcgataatgtggttgccaagaagtccgtgccccatttctcagatgaagacaaagatcccgagtag

SEQ ID NO: 56074 - DNA, 1238 bp, Artificial Sequence
  derived and/or modified sequence
taagatgcggaggagggtgacgcactagctctccagttcgcccgttcctggcctgacccccaccaaggcccataccgcagtaggctcctcgggctgcccctcggttgacaatggtctccaggatggtctctaccatgctatctggcctactgttttggctggcatctggatggactccagcatttgcttacagcccccggacccctgaccgggtctcagaagcagatatccagaggctgcttcatggtgttatggagcaattgggcattgccaggccccgagtggaatatccagctcaccaggccatgaatcttgtgggcccccagagcattgaaggtggagctcatgaaggacttcagcatttgggtccttttggcaacatccccaacatcgtggcagagttgactggagacaacattcctaaggactttagtgaggatcaggggtacccagaccctccaaatccctgtcctgttggaaaaacagcagatgatggatgtctagaaaacacccctgacactgcagagttcagtcgagagttccagttgcaccagcatctctttgatccggaacatgactatccaggcttgggcaagtggaacaagaaactcctttacgagaagatgaagggaggagagagacgaaagcggaggagtgtcaatccatatctacaaggacagagactggataatgttgttgcaaagaagtctgtcccccatttttcagatgaggataaggatccagagtaaagagaagatgctagacgaaaacccacattacctgttaggcctcagcatggcttatgtgcacgtgtaaatggagtccctgtgaatgacagcatgtttcttacatagataattatggatacaaagcagctgtatgtagatagtgtattgtcttcacaccgatgattctgctttttgctaaattagaataagagcttttttgtttcttgggtttttaaaatgtgaatctgcaatgatcataaaaattaaaatgtgaatgtcaacaataaaaagcaagactatgaaaggctcagatttcttgcagtttaaaatggtgtctgaggttgtactattttggccaagtctgtagaaagctgtcatttgattttgattatgtagttcatccagcccttgggcattgttatacaccagtaaagaaggctgtactcaagaggaggagctgacacatttcacttggctgcgtcttaataaacatgaatgcaagcattggca

SEQ ID NO: 56075 - DNA, 639 bp, Artificial Sequence
  derived and/or modified sequence
atggtgagcagaatggtgagcaccatgctgagcggcctgctgttctggctggccagcggctggacccccgccttcgcctacagccccagaacccccgacagagtgagcgaggccgacatccagagactgctgcacggcgtgatggagcagctgggcatcgccagacccagagtggagtaccccgcccaccaggccatgaacctggtgggcccccagagcatcgagggcggcgcccacgagggcctgcagcacctgggccccttcggcaacatccccaacatcgtggccgagctgaccggcgacaacatccccaaggacttcagcgaggaccagggctaccccgacccccccaacccctgccccgtgggcaagaccgccgacgacggctgcctggagaacacccccgacaccgccgagttcagcagagagttccagctgcaccagcacctgttcgaccccgagcacgactaccccggcctgggcaagtggaacaagaagctgctgtacgagaagatgaagggcggcgagagaagaaagagaagaagcgtgaacccctacctgcagggccagagactggacaacgtggtggccaagaagagcgtgccccacttcagcgacgaggacaaggaccccgagtag

SEQ ID NO: 56076 - DNA, 639 bp, Artificial Sequence
  derived and/or modified sequence
atggtgtctcgcatggtgtcgaccatgctctccggattgctgttctggctggcttcaggatggacacctgctttcgcgtattcccctcggaccccagaccgggttagcgaagccgatatacagagacttctgcatggtgtaatggagcagctgggtatagcacgccctagggtcgaatatcctgcccaccaagccatgaatctagttggaccacagtccattgaaggcggcgctcacgagggtcttcaacatcttggccccttcggaaatattccaaatatagtagccgagctgactggtgacaatattcccaaagatttcagcgaggatcaggggtatcctgatcccccaaacccttgccccgttggtaagactgccgacgacggttgtttagagaatacgcctgataccgccgagttctctagagagtttcagctgcatcaacatctgttcgatccagagcacgattatcccggcctggggaaatggaacaagaaactcctctacgagaaaatgaaggggggcgagaggaggaaacggagatccgttaatccctatctgcagggtcagagattggacaatgtcgtggcgaagaagtctgtcccacacttcagcgacgaagacaaggacccagagtag

SEQ ID NO: 56077 - DNA, 639 bp, Artificial Sequence
  derived and/or modified sequence
atggtgtccaggatggtgtccaccatgctgagcggcctgctcttctggctggccagcggctggaccccagcctttgcctacagccccaggaccccagacagagtgtctgaggccgacatccagaggctgctgcatggagtgatggagcagctgggcatcgcccggccccgggtggagtacccagcccaccaggccatgaacctggtgggcccccagagcattgagggcggggcccacgagggcctgcagcacctgggccccttcggcaacatccccaacatcgtggccgagctgactggagacaacatccccaaggacttcagcgaggaccagggctacccagacccccccaacccctgccctgtgggcaagacagcagatgatggctgcctggagaacaccccagacacagctgagttcagccgggagttccagctgcaccagcacctgtttgatcctgagcatgactacccaggcctgggcaagtggaacaagaagctgctgtatgagaagatgaagggcggggagaggaggaagagaagatctgtgaacccctacctgcagggccagaggctggacaacgtggtggccaagaagtctgtgccccacttcagtgatgaggacaaggaccctgagtag

SEQ ID NO: 56078 - DNA, 639 bp, Artificial Sequence
  derived and/or modified sequence
atggtgagccggatggtgagcaccatgctgagcggcctgctgttctggttagctagtggctggacgcctgcctttgcctactcgccgagaaccccggacagagtatcagaagctgatattcaacgactgctgcacggggtgatggagcagctgggcattgctagaccccgggtcgagtacccggcccaccaagcgatgaatctggtggggccccagtcgatcgagggtggagctcacgagggcttacaacatctaggtcctttcggcaatatccccaatatcgtagccgagctgacaggtgacaacatcccaaaggacttctcagaggatcaaggttatcctgaccctcccaacccctgccctgtgggcaaaacggctgacgatggctgtctggagaacacccctgacacggccgaattttcccgcgagttccaactgcaccagcatttgttcgaccctgagcatgattaccccgggctggggaaatggaataagaaactcctctatgagaagatgaaaggcggtgaaagaagaaaaagacggagcgtcaacccttacctgcagggacagagactcgataacgtcgtagccaagaagtccgtgccacacttctccgacgaagacaaagatcctgaatag

SEQ ID NO: 56079 - RNA, 639 nt, Artificial Sequence
  derived and/or modified sequence
auggugucacguauggucaguacuauguuauccgguuuacucuuuuggcuagcgagcggcuggacaccugcguucgccuacuccccuagaacucccgacagagugagugaagcugacauacagaggcuguugcacggcgugauggagcaacuugggauugcccggccgagagucgaauacccggcacaccaggccaugaaccuggucgguccccaauccaucgagggcggagcgcacgagggccuucagcaucucggcccuuuuggaaauaucccaaacaucguggcugaacuuacgggcgauaacaucccuaaggacuuuuccgaggaucaaggauaucccgacccaccaaaucccugcccugucggaaagaccgcagacgacgguugucucgagaacacccccgauaccgcagaauucucuagagaauuucaguugcaccaacaccucuucgauccagagcacgauuaccccgguuuggggaaauggaacaagaagcuucuguacgaaaaaaugaagggaggagagagaaggaagagacgaucuguaaauccuuaccuacaagggcaaaggcuggauaacgugguugcuaaaaagucuguuccgcacuucuccgaugaggauaaggacccagaguag

SEQ ID NO: 56080 - RNA, 639 nt, Artificial Sequence
  derived and/or modified sequence
auggugagucggaugguuucuaccaugcugaguggauuacucuucuggcuggcuucaggguggacccccgccuuugcuuacaguccccggacuccagaccgcgucucagaagccgauauccagcguuuacuacacggaguuauggagcaacugggcauugcuagaccuaggguugaguaucccgcccaccaggccaugaaucugguuggcccgcagagcauugaaggcggagcccacgaaggccugcagcaucuuggaccauuuggaaacauuccuaauauaguggccgaacuuacaggugauaauauucccaaggauuucagcgaagaucagggguauccugacccuccaaacccguguccugugggcaagacugcagacgacggcugcuuagagaauacacccgauaccgcagaauuuucucgcgaguuccagcuucaccagcaccuauucgaccccgaacaugauuacccuggccucggcaaguggaauaagaaacuacucuaugaaaaaaugaagggaggcgaaagaagaaaaagaagaagcgugaauccuuaccuccagggccagcgucucgauaaugugguugccaagaaguccgugccccauuucucagaugaagacaaagaucccgaguag

SEQ ID NO: 56081 - protein, 1319 aa, Artificial Sequence
  derived and/or modified sequence
MDALNRNQIGPGCQTQTMVQKGPLDLIETGKGLKVQTDKPHLVSLGSGRLSTAITLLPLEEGRTVIGSAARDISLQGPGLAPEHCYIENLRGTLTLYPCGNACTIDGLPVRQPTRLTQGCMLCLGQSTFLRFNHPAEAKWMKSMIPAGGRAPGPPYSPVPAESESLVNGNHTPQTATRGPSACASHSSLVSSIEKDLQEIMDSLVLEEPGAAGKKPAATSPLSPMANGGRYLLSPPTSPGAMSVGSSYENTSPAFSPLSSPASSGSCASHSPSGQEPGPSVPPLVPARSSSYHLALQPPQSRPSGARSESPRLSRKGGHERPPSPGLRGLLTDSPAATVLAEARRATESPRLGGQLPVVAISLSEYPASGALSQPTSIPGSPKFQPPVPAPRNKIGTLQDRPPSPFREPPGSERVLTTSPSRQLVGRTFSDGLATRTLQPPESPRLGRRGLDSMRELPPLSPSLSRRALSPLPTRTTPDPKLNREVAESPRPRRWAAHGASPEDFSLTLGARGRRTRSPSPTLGESLAPHKGSFSGRLSPAYSLGSLTGASPCQSPCVQRKLSSGDLRVPVTRERKNSITEISDNEDDLLEYHRRQRQERLREQEMERLERQRLETILNLCAEYSRADGGPEAGELPSIGEATAALALAGRRPSRGLAGASGRSSEEPGVATQRLWESMERSDEENLKEECSSTESTQQEHEDAPSTKLQGEVLALEEERAQVLGHVEQLKVRVKELEQQLQESAREAEMERALLQGEREAERALLQKEQKAVDQLQEKLVALETGIQKERDKEAEALETETKLFEDLEFQQLERESRVEEERELAGQGLLRSKAELLRSIAKRKERLAILDSQAGQIRAQAVQESERLARDKNASLQLLQKEKEKLTVLERRYHSLTGGRPFPKTTSTLKEVYRSKMDGEATSPLPRTRSGPLPSSSGSSSSSSQLSVATLGRSPSPKSALLTQNGTGSLPRNLAATLQDIETKRQLALQQKGQQVIEEQRRRLAELKQKAAAEAQCQWDALHGAAPFPAGPSGFPPLMHHSILHHLPAGRERGEEGEHAYDTLSLESSDSMETSISTGGNSACSPDNMSSASGLDMGKIEEMEKMLKEAHAEKNRLMESREREMELRRQALEEERRRREQVERRLQSESARRQQLVEKEVKMREKQFSQARPLTRYLPIRKEDFDLKTHIESSGHGVDTCLHVVLSSKVCRGYLVKMGGKIKSWKKRWFVFDRLKRTLSYYVDKHETKLKGVIYFQAIEEVYYDHLRSAAKSPNPALTFCVKTHDRLYYMVAPSAEAMRIWMDVIVTGAEGYTQFMN

SEQ ID NO: 56082 - protein, 101 aa, Artificial Sequence
  derived and/or modified sequence
MGGKIKSWKKRWFVFDRLKRTLSYYVDKHETKLKGVIYFQAIEEVYYDHLRSAAKSPNPALTFCVKTHDRLYYMVAPSAEAMRIWMDVIVTGAEGYTQFMN

SEQ ID NO: 56083 - DNA, 3960 bp, Artificial Sequence
  derived and/or modified sequence
atggacgcccttaaccggaaccagattggaccaggctgtcagactcagacgatggtacagaagggcccgctcgatcttattgagactgggaagggactgaaggttcagaccgataaaccacacctggtcagcttggggtctggccgcttatccacggctattaccctcctccctctcgaggaggggagaactgtaataggaagtgccgcccgcgacatctcactgcagggaccgggactcgcgccagagcactgctacatcgagaatcttcgaggtactcttaccttgtacccctgcggcaacgcctgcacaattgacgggctgcccgtgcgtcaaccaacccgattgactcaaggctgtatgctctgcctcggccagtctacatttttgcggttcaaccaccccgctgaggctaaatggatgaagtccatgatcccagccgggggtcgcgcacctggacctccctattccccagtcccagctgaaagcgaatcattggttaatggtaaccataccccccagacggccaccaggggaccctcagcttgtgcatctcattcatcccttgttagtagtatcgaaaaagacctacaggagattatggactcccttgtgctagaggagcctggcgcagcaggtaagaagccagccgcgacatcacctttgtcaccgatggccaatggcggccgatacctgctcagcccacccacctcacccggggcgatgtcagtggggagcagctacgagaacactagccctgccttctcacccctgtcaagtcctgcaagcagtggcagctgcgcttcccacagcccctctggtcaagagcccggcccttcagtgcctcccctggttcccgctcggtctagctcctaccaccttgccctccagcccccccagtcaagacccagcggggcccgcagcgagtcaccacggctctctaggaaagggggacacgagaggcctccaagtcccggtctgcggggcctgttaaccgactcccctgccgctacggtcctcgcggaggccagaagggctacagagtccccaagactaggcgggcaactccctgtcgtggctatttccctgagcgagtatcctgctagtggcgccctttcacaaccgactagcatccctggaagccccaagtttcagccgccagtgccagcccccaggaataaaattggaaccctccaggataggccaccaagcccatttcgagagccccctgggtcagaaagggtgctcaccacttccccgtcaaggcaactggtgggacggaccttctctgatggattggctactagaacacttcagccccctgagagtcccagactgggccgtcgcggcctggacagcatgcgggagctgcctccactgtcaccatcattaagcagacgggccctgtcaccccttccaacccgtactacacctgatcccaagctgaatagagaagtggcggagtcaccacgaccgagaagatgggctgcccacggagctagtccggaagatttttctttgaccttgggggcgaggggccggagaaccagatccccttcaccaactctaggggaatccctggctccccacaaaggaagcttcagcggtagactgtcgcccgcatactcactgggcagcttgacaggggcttccccatgccagagtccatgtgtgcaacgcaaactttcctccggggatctgagggtcccagtcacacgtgaacggaaaaacagcatcaccgagataagcgacaatgaagatgacctgcttgagtaccaccggcggcagaggcaggagcgcttgcgcgaacaggagatggaaagactggagcgtcagcgcctagagactatcctgaacctgtgcgctgaatactcacgagccgatgggggaccagaggcaggggaactaccatccatcggagaggccacagctgccctcgcgctggccggtagaagacccagtaggggcctggcaggcgcaagtggtagatcttccgaggaaccaggcgtcgctacccagaggctctgggaaagtatggaacggtccgacgaagaaaacctcaaggaagagtgctcgtccacagagtccacccagcaggagcatgaagacgcaccctctaccaagcttcagggggaagtgctcgcactggaggaagagagagcccaggtgctgggccacgtggagcagttgaaagtccgtgttaaggagctggaacagcaattacaagagtccgcaagggaagcggagatggagagagccctcctccagggggaaagggaggctgagagagcactgcttcaaaaggaacagaaggctgtagaccagttgcaagaaaagttagtggcactggaaactggaattcagaaagagagagacaaagaggccgaggcgttagagactgagacaaaactattcgaagacctggagtttcaacagctggaacgtgaatctagggtggaagaggaacgggaactggcagggcagggtctcctgcggtccaaagctgagctgctgcggagcatcgccaagagaaaggagagactggctattctcgactcacaggccgggcagattagagcacaggcagtgcaggagtcagagcgcctagcacgtgacaagaatgcttccctgcagttgctgcaaaaggagaaagaaaaactgaccgtgcttgaaagacggtaccatagcctcacgggcggacggcccttcccaaaaaccacctccacgttgaaggaggtctatcggtccaagatggacggtgaggccacaagtcctcttccacgcacgaggagtggaccactgccatcttcctccggaagtagcagcagttcatcccagctgtcagtggccacactcggccgatcgccgtcccctaagagcgctctattaacacagaacgggaccgggtcactgcctcgcaaccttgccgcaacccttcaggatatcgaaactaaaaggcaacttgcactacagcagaagggccagcaggtaatcgaagaacagcgaagacgacttgcggaactaaagcagaaggccgctgccgaggcccagtgtcaatgggatgctctccacggcgcagcaccattcccagccggccccagtgggttcccaccactcatgcatcactccattctccaccacctccccgctgggcgcgagcggggggaggaaggtgagcacgcctatgatactctctccctggagtcttccgacagtatggagacgtctatttctacagggggtaattcagcctgctccccagacaatatgtcaagcgcctctggacttgacatgggaaaaatcgaggagatggagaagatgctgaaagaagcacatgctgagaaaaataggttgatggagagccgggagcgggagatggagctgcggcggcaggcactggaagaagagagacggaggcgcgagcaggtcgaacgccggctccaatcagaatcagctcggcgacagcagctggtcgagaaagaagtgaaaatgagggaaaagcaatttagtcaggccagaccactaacgaggtacctgcctattaggaaagaagattttgacttaaaaactcatattgagtctagtggacacggggtcgacacctgtttgcatgtggtcctctcttccaaggtctgtcgcggctatctagtgaagatgggggggaaaattaagtcatggaaaaaaaggtggttcgtgtttgaccggctaaaacgcaccctgagttattatgttgataagcacgagaccaaattgaagggtgttatctacttccaggcaatcgaagaggtctactacgatcacctgaggagcgccgcgaagtctcctaatcctgccctgacattctgcgtgaagacacacgataggctatactacatggtggcaccttctgcggaagccatgaggatctggatggacgtgatagttacaggcgccgaaggctatacccaatttatgaactag

SEQ ID NO: 56084 - DNA, 3960 bp, Artificial Sequence
  derived and/or modified sequence
atggatgccctgaacagaaaccagatcggccctggctgccagacccagaccatggtgcagaagggccccctggacctgattgaaacaggcaagggcctgaaggtgcagacagacaagccccacctggtgtccctgggcagcggccgcctgagcacagccatcaccctgctgcccctggaggagggccgcaccgtcatcggcagcgctgcccgggacatcagcctgcagggccctggcctggcccctgagcactgctacatcgagaacctgcggggcaccctgaccctgtacccctgtggaaatgcctgcaccattgatggcctgcctgtgcggcagcccacccggctgacccagggctgcatgctgtgcctgggccagagcaccttcctgcgcttcaaccaccctgctgaggccaagtggatgaagtccatgatcccagctgggggccgggcccctggccccccctacagccctgtgcctgctgagagcgagagcctggtgaatggaaaccacaccccccagacagccacccggggccccagcgcctgtgccagccacagcagcctggtgagcagcattgagaaggacctgcaggagatcatggacagcctggtgctggaggagcctggagctgctgggaagaagccagctgccaccagccccctgagccccatggccaatggaggccgctacctgctgagcccccccaccagccctggggccatgtctgtgggcagcagctatgagaacaccagccctgccttcagccccctgagcagccctgccagcagcggcagctgtgccagccacagccccagcggccaggagcccggccccagcgtgccccccctggtgcctgcccggagcagcagctaccacctggccctgcagcccccccagagccggcccagcggggcccggtctgagagcccccggctgagcaggaagggcggccacgagcggccccccagccctggcctgcggggcctgctgacagacagccctgctgccaccgtgctggccgaggcccggcgggccacagagagcccccggctgggcggccagctgcctgtggtggccatcagcctgtctgagtacccagccagcggggccctgagccagcccaccagcatccctggcagccccaagttccagccccctgtgcctgcccccaggaacaagattggcaccctgcaggaccggccccccagccccttccgggagcccccaggcagcgagcgggtgctgaccaccagccccagccggcagctggtgggccgcaccttcagtgatggcctggccaccaggaccctgcagcccccagagagcccccggctgggccggcggggcctggacagcatgagggagctgccccccctgagccccagcctgagccggcgggccctgagccccctgcccaccaggaccaccccagaccccaagctgaaccgggaggtggccgagagcccccggccccggcgctgggccgcccacggggccagccctgaggacttcagcctgaccctgggcgcccggggccgccgcaccaggagccccagccccaccctgggggagagcctggccccccacaagggcagcttcagcggccgcctgagccctgcctacagcctgggcagcctgaccggggccagcccctgccagagcccctgtgtgcagaggaagctgagcagcggggacctgcgggtgcctgtgacccgggagaggaagaacagcatcacagagatcagtgacaatgaagatgacctgctggagtaccaccggcggcagaggcaggagcggctgcgggagcaggagatggagcggctggagcggcagaggctggagaccatcctgaacctgtgtgccgagtacagcagagcagatggcggccctgaggccggggagctgcccagcattggagaggccacagctgccctggccctggccggcagaagacccagccggggcctggccggggccagcggccgcagcagcgaggagcccggggtggccacccagaggctgtgggagagcatggagaggagtgatgaggagaacctgaaggaggagtgcagcagcacagagagcacccagcaggagcatgaagatgcccccagcaccaagctgcagggcgaggtgctggccctggaggaggagcgggcccaggtgctgggccacgtggagcagctgaaggtgcgggtgaaggagctggagcagcagctgcaggagagcgcccgggaggccgagatggagcgggccctgctgcagggcgagcgggaggccgagcgggccctgctgcagaaggagcagaaggctgtggaccagctgcaggagaagctggtggccctggagaccggcatccagaaggagcgggacaaggaggccgaggccctggagacagagaccaagctgtttgaggacctggagttccagcagctggagcgggagagccgggtggaggaggagcgggagctggccggccagggcctgctgcggagcaaggccgagctgctgcggagcatcgccaagaggaaggagcggctggccatcctggacagccaggccggccagatccgggcccaggccgtgcaggagagcgagcggctggcccgggacaagaatgccagcctgcagctgctgcagaaggagaaggagaagctgactgtgctggagcggcgctaccacagcctgaccggcggccggcccttccccaagaccaccagcaccctgaaggaggtgtaccgcagcaagatggatggagaggccaccagccccctgcccaggaccaggagcggccccctgcccagcagcagcggcagcagcagcagcagcagccagctgtctgtggccaccctgggccgcagccccagccccaagagcgccctgctgacccagaatggcaccggcagcctgcccaggaacctggccgccaccctgcaggacatcgagaccaagaggcagctggccctgcagcagaagggccagcaggtgattgaggagcagaggcggcggctggccgagctgaagcagaaggctgctgctgaggcccagtgccagtgggatgccctgcacggggccgcccccttccctgctggccccagcggcttcccccccctgatgcaccacagcatcctgcaccacctgcctgctggccgggagcggggggaggagggggagcacgcctatgacaccctgagcctggagagcagtgacagcatggagaccagcatcagcactggaggcaacagcgcctgcagcccagacaacatgagcagcgccagcggcctggacatgggcaagattgaggagatggagaagatgctgaaggaggcccatgctgagaagaaccggctgatggagagccgggagcgggagatggagctgcggcggcaggccctggaggaggagaggagaagaagagagcaggtggagcggcggctgcagagcgagagcgcccggcggcagcagctggtggagaaggaggtgaagatgagggagaagcagttcagccaggcccggcccctgacccgctacctgcccatcaggaaggaggactttgacctgaagacccacatcgagagcagcggccatggagtggacacctgcctgcacgtggtgctgagcagcaaggtgtgccggggctacctggtgaagatgggcggcaagatcaagtcctggaagaagcgctggtttgtgtttgaccggctgaagaggaccctgagctactacgtggacaagcatgagaccaagctgaagggcgtcatctacttccaggccatcgaggaggtgtactatgaccacctgcggtctgctgccaagagccccaacccagccctgaccttctgtgtgaagacccatgaccggctgtactacatggtggcccccagcgctgaggccatgaggatctggatggatgtgattgtgactggagctgagggctacacccagttcatgaactag

SEQ ID NO: 56085 - DNA, 3960 bp, Artificial Sequence
  derived and/or modified sequence
atggacgccctgaaccggaaccagatcggccccggctgccagacccagacaatggtccaaaaagggccccttgacctcatcgaaacaggcaaaggtttaaaggtccagactgacaaaccccacctcgtttctttaggttccgggcgcctttctactgccattactttattgcccctcgaggaggggagaaccgtcatcggctcggccgccagagacatctccttacaaggaccaggtctggccccagaacattgttacatagaaaatctgcgagggacactcaccctttacccttgcggcaacgcctgcaccatcgacggcctgcctgtgaggcagcccacacggctaacgcaaggctgcatgctgtgcttaggccagtcaacgtttctcagatttaatcaccccgccgaggctaagtggatgaagagtatgatccccgcaggcggcagagctccgggacccccgtactcaccggtgccggctgaatctgagagcttagttaatggcaaccatacaccccagaccgccacgcggggccccagcgcctgcgcgagtcacagttctctcgtaagcagcattgagaaagatctccaagagattatggacagtctggttctcgaggaacccggcgccgcgggtaaaaagcccgccgccacttctccgctgtcacccatggccaacggcggacgctatctgctcagcccacctacctctcccggtgcgatgtctgtcggttccagttacgagaatacctctccagccttctcaccgctgagcagccccgcatcatctgggagttgtgcttcccactctccaagcggtcaggaaccgggcccctcagtccctccattggtgcccgcaagatcctcatcttaccacctggccttacagcccccccagagcagacccagcggcgcacgctctgagagtccccgcttgagccgtaagggaggccacgaaagacctccatcccccggtcttcgggggcttcttacagatagtccagctgcgactgtgctcgctgaggccaggcgggctaccgagagtccgcggctgggaggacagttgcccgtggtagctatttccctgtctgagtacccagccagcggagctctctcccagccaacgtccatccctggcagcccaaagttccagcctcccgtgcccgctccacggaataaaatcgggactttgcaagatagaccaccatcgccattccgtgagcccccagggagtgagcgtgtgctcacgacctctcctagccggcagcttgtgggtcgtacgtttagtgacgggcttgcaacccgaacgctgcagccacccgaatccccccgactcggcaggaggggcctcgatagcatgagggaattgcctcccctcagccccagcctctcacggagggccctgtctccattgcctacccgtactaccccggatccaaagttaaacagggaagtggccgagagccctaggccccgccgttgggctgctcatggggcctcccccgaggatttcagcctgacccttggggcacgcggcagacgtacccgcagtccctccccgaccttgggagaatcactggccccccataagggcagctttagcgggcggctctcaccagcctattccctgggctccctcacaggggcctcaccctgccagtcgccttgcgtccagcggaagctgtcatccggggatttgcgtgtcccggtgacaagggagaggaagaactcgatcaccgagatctccgacaacgaggacgacctgctggagtaccataggcggcagcggcaggaacgcctgcgggaacaggagatggaacgacttgaacgccagaggctggagaccattcttaacttgtgcgctgagtactctagggctgatggggggcctgaagcaggcgaattgccgagcattggcgaagcgaccgctgctctggctttagctggccggcgaccaagccgtgggctcgccggtgcatcaggacgaagtagtgaagagccaggcgtcgctacacagcgcctgtgggaatccatggagaggagtgacgaagaaaacctgaaggaagaatgttcctcgacagaatcgacgcagcaggaacacgaggatgctccctcaacaaaactgcagggggaggtgctggccctggaggaagagcgggcccaggtgttaggacacgtcgagcagctcaaagtgagagtgaaagaattagaacagcagctacaggaatccgccagagaagcagagatggaacgtgccttgctgcaaggagagcgcgaagccgaaagagcactgctgcagaaagagcagaaagctgtggatcaactccaggagaagctggtggcgctggaaacaggaattcaaaaggagagggacaaggaggccgaagcgctcgagacagagacgaagctgtttgaagaccttgagttccagcagttggagcgagagagcagagtagaggaggagagagagttagccggccagggactgctccggtctaaagccgagctcctgcgctcgatcgccaagagaaaggagcgccttgctatcctggattctcaagcaggacagattcgcgcacaggcagtgcaagagagcgagagactggccagggataagaatgcttcactgcagttactgcagaaggaaaaggaaaagttgacagtgctggaacgtcgctaccacagtctgaccggaggccggccttttcctaagactacaagcacacttaaagaagtgtacaggagtaaaatggacggtgaggcaacttctccactcccacgcaccaggtcaggcccactgccttcctctagtgggtctagctctagttccagccagctctcagtggcaaccctcggtcggtcccctagtcctaagtctgctctcctaacccagaatggcaccgggtccctcccaagaaacctggccgcaaccttacaggacattgagactaagagacagctggctcttcagcagaaaggtcaacaggttatcgaagaacagcgcaggcggctggccgaattaaagcagaaagcggcagctgaggcccagtgccagtgggatgcgttgcacggtgcagctccattccctgcgggtcctagcgggtttcctccattaatgcaccactccattctccatcatctgccagccggcagggagcgcggtgaagagggggaacatgcgtacgatacactgtcccttgagtcctctgatagcatggagactagcatcagcactgggggtaacagtgcttgttctcctgacaatatgagttccgcctctggactggacatgggaaaaatagaggagatggagaagatgctgaaagaggcgcatgctgaaaagaacaggctcatggagtcccgtgagcgggagatggagctgcgcaggcaggccctggaagaggagaggaggaggcgggaacaggtggagcgccggcttcagtctgagagtgcaaggcggcagcagctggtcgagaaggaagtgaaaatgagggagaagcagttcagccaggcacggcctcttactaggtacctcccaattaggaaagaagactttgatttaaagacgcacattgaatcaagtgggcatggggtggacacctgtctacatgtagttctgagctccaaggtctgccgcggctacttagtaaagatgggtggcaagataaaaagctggaagaagaggtggtttgtcttcgaccggctcaagcggaccctgtcttattatgtggacaagcacgaaactaagctcaagggagttatttacttccaggcaatcgaggaagtgtactacgatcatcttcgcagtgccgcaaaaagtccaaatccagcacttaccttttgtgtcaagacccacgatcggttgtattacatggtagcaccaagtgcagaagccatgagaatttggatggatgtgatcgttaccggggcagagggatacacacagtttatgaattag

SEQ ID NO: 56086 - DNA, 4783 bp, Artificial Sequence
  derived and/or modified sequence
aggccaccgcgaccgagccgagccaggctaagggaccagtgtctccctgccccccccccacctctaggagctctggagccttaggaccatggacgctctcaataggaaccaaataggccctggatgccagacccagaccatggtgcagaaaggacccttggacctgatcgagacaggcaaagggctgaaagtgcaaacggacaaaccccacctggtgagcctgggcagtgggcgactcagcacagccatcaccctcctgccgctggaggaagggaggacggtgattggctctgcagccagagacatctcactacagggcccaggcctggctccagagcactgctacatcgagaacctgcggggcaccctcaccctctacccctgtggcaatgcctgcactattgatgggctccctgtccggcagcctacccggctcactcagggctgcatgttgtgcctgggtcagtccaccttccttcgctttaaccacccggctgaagccaagtggatgaaaagcatgattccagcagggggccgagcccctgggcccccctacagccctgttcctgcagaatcagaaagtctggtaaatgggaaccacaccccacagactgcaacacggggaccctctgcctgtgccagccacagttccctggtgagctctattgagaaggacctgcaagagatcatggactcactggtgctagaggagcctggagctgctggcaagaagcctgccgcaacctctccactgtcaccgatggctaatggtgggcgctacctgctgtctcccccaaccagccccggccatgtctgtgggctccagctatgagaacacctctccagccttctctccactctcttcaccagccagcagtggaagctgtgccagtcactcacccagtgggcaagagccaggaccttctgtgcccccgctggtacctgcccgttcctccagctaccatctggccctacagcccccacagtcccgcccaagtggtgctcgctccgagagtcctcggctgagcaggaaagggggccatgagaggcctcccagccctggcctccggggtctgctgacagacagccctgcagctactgtcttggcggaggcccggagagccactgagagcccccggctgggtgggcagctgcctgtggtggccatcagcctgagtgaatacccagcttctggtgctctcagtcaacccaccagcattcctggcagccccaagtttcagcctccagtccctgctccccgaaacaagattggcacactccaggaccgccctcccagccctttccgtgagcctccaggcagtgagcgggtgctaacaaccagcccctcacgccaactggtgggccgaacattttcagatgggttagccacccgtaccctgcagcctcctgagagtccccgcctgggccggcggggcctggacagtatgcgagaactaccccccttaagtccatctctgtcccggcgagctctctccccgctgcccacccggaccaccccagatcccaagctaaacagggaagtggcagagagtcctcggccccggcgctgggcagcccatggggcttcaccagaggacttctccctgacgctgggggcacggggccgtaggacacggagcccctcacccacactgggtgagtctctggcaccccacaagggcagcttcagtggcaggctgagcccagcctacagtctgggctctcttactggggcttcaccctgccagagtccctgtgtccagaggaagctctccagcggggacttgcgggtgcctgtcacaagggagcggaaaaatagcatcacagagatcagtgacaatgaggacgacctcctggagtaccaccggcgacagcgccaagagcggctccgggagcaggagatggagaggctggaacgccagcgcctggagaccatcctgaacctgtgtgccgaatacagccgggctgatgggggacctgaggctggggagcttcccagcattggggaggccaccgcagcattggcactggcaggccggaggccctcacgaggccttgcaggggcctctgggcggagcagcgaggagcctggcgttgccacccaacgcctatgggagagtatggagcgctcagatgaggaaaatctcaaggaggagtgcagcagcactgagagcacccagcaggagcacgaagatgcacctagcaccaagctccagggagaggtgctagccctggaagaagagcgggctcaggtgctggggcacgtggagcagctcaaggtccgtgtgaaggagctagagcagcagctgcaggagtcagcccgagaggccgaaatggagcgggcactgctgcagggagagagggaggcagagcgggcactgctgcagaaggagcagaaggcagtggatcagctgcaggagaagctggtggccttggagacaggcatccagaaggagagggacaaggaggcagaggccctggagactgagacaaagctctttgaggacttggagttccagcagttggagcgggagagccgcgtggaggaggagcgcgagctggccggccaggggctgctccggagcaaggctgagctgctccgcagcatcgccaagaggaaggagcgcctggccatcctggacagtcaggctgggcagatccgggctcaggccgtgcaggaatcagaacgcctggcccgggacaagaatgcctccttacagctgctgcaaaaggagaaggagaagctgactgtgctggaaaggagataccactcactcacagggggcaggcctttcccgaagaccacatcgaccctcaaagaggtttaccgctccaagatggatggcgaggccaccagcccccttccccggacccgcagcggccccctcccctcctcctctggctcttcctcctcctcctcccagctcagcgtggctaccctggggcgtagcccctccccaaagagcgctctactcacccagaatggcacgggcagccttcctcgcaacctggcagccacactgcaggacatcgagaccaagcgccaactagctctgcagcagaagggacaacaagtgattgaagagcagctggtcgagaaggaggtcaagatgcgggagaaacaattttcccaggcacgacccctgacccgctacctgccaatccggaaggaggactttgacctgaagacacatattgagtcatcgggccatggtgttgatacctgcctgcacgtggtgctcagcagcaaggtctgccgtggctacttggtcaagatgggcggcaagattaaatcatggaagaagcgctggtttgtcttcgaccggctcaagcgcaccctttcctattatgtggacaagcatgagacgaagctgaagggagtcatctatttccaggccattgaggaagtgtactacgaccacctgcgcagtgcagccaagagcccgaacccagccctcaccttctgcgtaaagacccatgaccggctgtactacatggtggccccatctgcagaggccatgcgtatctggatggatgtcattgtcacaggggctgagggctacactcagttcatgaactaactgccgtgggcctcctggcagagcacaactggggcttttgtataagaagactttaatattctgtaaggagcttggtcctgtgagtttctgggctctggcctcctgaagaaccagccagaagaagaaaagtagaggtggctttgctgcctcctgggagcccagaacttgcagtaaccctttagggtcctgccccaggcccagccagggctgaggagctgtcacagagagggcctcagctctgacctgacacctgctctccccagcctgttttctcttttctaaaagacaaattatggtaccataagctgccaaagatcccctcctgcctcagacccctttgccaggggctttgggggctgagcagagccacatccagagtggggtaatagctcaggcggcccgcttcccatttctcaaaccccgctctgccccattgttctcctttcccttatactttttattaccttgctcaagggccagagatctcaagtgtcaaccttgaggtcccagctccatcccctagttgcagactcatcaccatggttaccatagtgactgcttcattgccatggttacatactaattgctgcagctctgtggcccagcccactgcttcagctgtgggccatctgagggtacgtgccatcatctctccagcccaggcccctgggcatctcatgctggggggaagggactgaatacctttttccttccccctgcctgtgtcttcagccctgatgcacaggctgccagccccccagtccagccctctcccttccactggtgccttgcttagagccagaagggatgaagccgggggatctatggaacagaggaggagcgatgcagttgggagaggaagctagaagggttatggttggagttctgtacagtgttgagtttccgacagggaaagaggattcctccaatgctcctagagagaaagcctgagcaggagatgatgcagcagaggggaagggccctgtggtgccgccgcccttccttcagcctccgaagggtgatggaaatggagagtggaggaccaggcctccagctgtctggcctcgcccttcacgccttaacactaagcccacctcccctgctctccttcccagcattgagcccttggttgcctgggcccaggctgggggttttcagtatttgtaagcatttcagcagaacaataaagcctttggactacg

SEQ ID NO: 56087 - DNA, 3960 bp, Artificial Sequence
  derived and/or modified sequence
atggacgcacttaatcgaaaccaaatcggccctggctgccaaacacaaacaatggttcagaaaggcccactggacctgattgagacgggcaaaggcctgaaggtgcagaccgataaaccacatctcgtgagcttagggtccgggaggttgtctaccgccatcaccttacttcctctcgaggagggcagaactgtcattggcagtgccgctcgcgatatcagtcttcagggtcccggtttagctcctgagcactgctatattgagaatttgcgcggtacactcaccctctacccatgcggaaatgcctgtacaatcgacggactaccagtccgtcaacctactaggctaactcaagggtgtatgctatgtctgggacagagtactttcctccgtttcaaccatccagcagaagcgaaatggatgaagtccatgatacctgccggaggacgcgcacctggacctccttattcacctgtgcctgcagaatccgaatccttagtcaatggcaaccacaccccacaaacggctacccgcggacctagtgcctgtgcgagtcactcaagcctggttagcagtatcgagaaggatttgcaggaaattatggatagcctggtacttgaagagccaggcgcagctgggaagaagccggcagcgacttctcccctgtcaccgatggctaacggtgggaggtatctgctcagtccccctacgagcccaggggctatgagcgtcgggagctcctatgaaaacaccagtcctgctttcagtcccttgtcctcacctgcaagcagcgggagctgtgctagccactcaccctcaggccaagaacctggtccttctgttccacctctcgttccggcacgctcgtcctcataccatcttgctctccagcctccgcagtcacggccttcgggggcacggtcggagtctccgagattgagccgcaagggcggacacgaacgtccaccctctccaggactgagagggcttctgacggactccccagccgctacagttttggcagaggctagaagggctacagagtcgccacggctgggcggacagttgcccgtggtggccatctccctaagcgagtacccggcaagtggagccttatcacagcccacctctattcccggttctcccaaattccagcccccagtgccagcgcctcgaaacaaaattggcacacttcaggaccggcctccatctccctttcgcgagcctcccggaagtgaacgcgttctgaccaccagccccagtcgacagctcgttggcagaactttctcagacgggttagctactcgcacgcttcagcccccagagtcaccaaggcttggacgcagaggcttggactccatgcgcgagttgccccctcttagcccttccctcagtagaagagccctcagtccacttccgacacgtacaactccagatcctaagttgaatcgggaagtggctgagtcacctcgccctcgcagatgggccgcacacggggcttctcccgaagatttttcattgacactgggcgcacgtggaaggagaacgcggagcccgtcccctacactgggcgagagcctcgctcctcacaaagggtcattctccggaagactgtcacctgcctactccctaggttctctgacaggcgcaagcccatgccaatctccatgtgtccagcgcaaactgtcctcaggggatttacgtgtgcctgtcacaagggagaggaaaaatagtatcaccgagatttccgacaacgaagatgatcttctggagtaccatcgtcggcagcgacaggaaaggttgagagagcaggagatggagcggttagaaagacagcgccttgaaacgattttgaacctctgcgctgagtatagccgggcagatgggggaccagaggcaggcgaattgccttccattggtgaggctaccgcagctttagcactggcagggagacggccttcacggggactagccggagctagtggtagatcttctgaagagcctggagtggccacacagcggctctgggaatctatggaacgatctgacgaagagaacctcaaggaggagtgttcctcgaccgagagtacccaacaggagcacgaggacgcgccaagcacgaagctgcagggggaggtcctggcgttggaagaagaacgggcacaagtattaggccacgtggaacagctgaaagttcgagtgaaagagctggaacagcagttgcaagagtccgcccgagaagcagagatggagcgagcgctgctgcagggggaacgagaggcggagagggctctgctgcagaaagaacagaaagccgttgatcagctgcaggaaaagcttgtggcgttggagactgggatccagaaagagcgcgacaaggaggccgaagccttggagaccgagactaagctgttcgaggatcttgaattccaacagcttgagagagagagcagagttgaagaggagagggagctggccggtcagggcctgctccggtctaaagccgagcttctgcggtccattgctaagcgcaaggagagactggccattctggactctcaggccggtcagatccgagcccaggcggtgcaggaatcggaacggcttgcaagggacaagaacgcttcgctgcagctgctgcagaaagagaaggagaaactgacggttctggagagaagataccatagcctgactggtgggcgacctttcccaaagactacctctacgcttaaggaggtctacaggagtaagatggacggtgaggccacttcccctctgcctcggacacgctccggccctttgccctcctccagcggtagcagctcctcttcgtctcaactaagtgtagccaccctcggaagaagtccctcccctaagagtgcactgctgactcagaacggcacaggaagtctgcccagaaacttggccgctaccctgcaagatatcgaaacaaaacggcaactggctctgcagcagaagggtcaacaggtcattgaggagcagcgaagacgattagctgagctgaagcaaaaggccgctgccgaggcccaatgccagtgggatgcactgcatggagcagcaccgtttcctgcaggaccttctggcttcccacctctgatgcaccacagcatcctccatcatctgcctgcaggaagagaacggggagaagagggggaacatgcctacgacactctgtctctggagagcagcgactctatggagaccagcatttccactggcggtaattccgcgtgttccccagacaatatgtcttccgcttccggtcttgacatgggcaaaatcgaagaaatggagaaaatgctgaaagaagctcacgccgagaaaaatagactcatggagtcaagagaaagggaaatggaactccgaaggcaggccctagaagaagaacgaagaagaagagaacaagtggaacgtagattacagtccgaaagtgccagaagacaacaactggttgaaaaagaggtgaagatgcgggaaaaacagtttagccaggcaaggcccctgacgcgttacctccccattcgaaaggaggattttgacctgaaaacacacattgagagctcaggacatggggtggatacctgtcttcacgttgtgctttcatctaaagtgtgtagggggtacctcgtaaaaatggggggaaaaatcaagtcttggaagaaacgttggtttgtattcgatagactgaaaagaactttatcttactatgtggataagcacgagactaagcttaagggcgtgatttacttccaagccattgaggaagtgtattacgatcatctaagaagcgcagccaaatcccctaaccccgctcttactttttgcgtgaaaacccacgaccggttatactatatggtggcgcctagtgccgaggccatgcgtatatggatggatgtaatcgttactggagctgaggggtacacccaatttatgaattag

SEQ ID NO: 56088 - DNA, 3960 bp, Artificial Sequence
  derived and/or modified sequence
atggacgccctgaacagaaaccagatcggccccggctgccagacccagaccatggtgcagaagggccccctggacctgatcgagaccggcaagggcctgaaggtgcagaccgacaagccccacctggtgagcctgggcagcggcagactgagcaccgccatcaccctgctgcccctggaggagggcagaaccgtgatcggcagcgccgccagagacatcagcctgcagggccccggcctggcccccgagcactgctacatcgagaacctgagaggcaccctgaccctgtacccctgcggcaacgcctgcaccatcgacggcctgcccgtgagacagcccaccagactgacccagggctgcatgctgtgcctgggccagagcaccttcctgagattcaaccaccccgccgaggccaagtggatgaagagcatgatccccgccggcggcagagcccccggccccccctacagccccgtgcccgccgagagcgagagcctggtgaacggcaaccacaccccccagaccgccaccagaggccccagcgcctgcgccagccacagcagcctggtgagcagcatcgagaaggacctgcaggagatcatggacagcctggtgctggaggagcccggcgccgccggcaagaagcccgccgccaccagccccctgagccccatggccaacggcggcagatacctgctgagcccccccaccagccccggcgccatgagcgtgggcagcagctacgagaacaccagccccgccttcagccccctgagcagccccgccagcagcggcagctgcgccagccacagccccagcggccaggagcccggccccagcgtgccccccctggtgcccgccagaagcagcagctaccacctggccctgcagcccccccagagcagacccagcggcgccagaagcgagagccccagactgagcagaaagggcggccacgagagaccccccagccccggcctgagaggcctgctgaccgacagccccgccgccaccgtgctggccgaggccagaagagccaccgagagccccagactgggcggccagctgcccgtggtggccatcagcctgagcgagtaccccgccagcggcgccctgagccagcccaccagcatccccggcagccccaagttccagccccccgtgcccgcccccagaaacaagatcggcaccctgcaggacagaccccccagccccttcagagagccccccggcagcgagagagtgctgaccaccagccccagcagacagctggtgggcagaaccttcagcgacggcctggccaccagaaccctgcagccccccgagagccccagactgggcagaagaggcctggacagcatgagagagctgccccccctgagccccagcctgagcagaagagccctgagccccctgcccaccagaaccacccccgaccccaagctgaacagagaggtggccgagagccccagacccagaagatgggccgcccacggcgccagccccgaggacttcagcctgaccctgggcgccagaggcagaagaaccagaagccccagccccaccctgggcgagagcctggccccccacaagggcagcttcagcggcagactgagccccgcctacagcctgggcagcctgaccggcgccagcccctgccagagcccctgcgtgcagagaaagctgagcagcggcgacctgagagtgcccgtgaccagagagagaaagaacagcatcaccgagatcagcgacaacgaggacgacctgctggagtaccacagaagacagagacaggagagactgagagagcaggagatggagagactggagagacagagactggagaccatcctgaacctgtgcgccgagtacagcagagccgacggcggccccgaggccggcgagctgcccagcatcggcgaggccaccgccgccctggccctggccggcagaagacccagcagaggcctggccggcgccagcggcagaagcagcgaggagcccggcgtggccacccagagactgtgggagagcatggagagaagcgacgaggagaacctgaaggaggagtgcagcagcaccgagagcacccagcaggagcacgaggacgcccccagcaccaagctgcagggcgaggtgctggccctggaggaggagagagcccaggtgctgggccacgtggagcagctgaaggtgagagtgaaggagctggagcagcagctgcaggagagcgccagagaggccgagatggagagagccctgctgcagggcgagagagaggccgagagagccctgctgcagaaggagcagaaggccgtggaccagctgcaggagaagctggtggccctggagaccggcatccagaaggagagagacaaggaggccgaggccctggagaccgagaccaagctgttcgaggacctggagttccagcagctggagagagagagcagagtggaggaggagagagagctggccggccagggcctgctgagaagcaaggccgagctgctgagaagcatcgccaagagaaaggagagactggccatcctggacagccaggccggccagatcagagcccaggccgtgcaggagagcgagagactggccagagacaagaacgccagcctgcagctgctgcagaaggagaaggagaagctgaccgtgctggagagaagataccacagcctgaccggcggcagacccttccccaagaccaccagcaccctgaaggaggtgtacagaagcaagatggacggcgaggccaccagccccctgcccagaaccagaagcggccccctgcccagcagcagcggcagcagcagcagcagcagccagctgagcgtggccaccctgggcagaagccccagccccaagagcgccctgctgacccagaacggcaccggcagcctgcccagaaacctggccgccaccctgcaggacatcgagaccaagagacagctggccctgcagcagaagggccagcaggtgatcgaggagcagagaagaagactggccgagctgaagcagaaggccgccgccgaggcccagtgccagtgggacgccctgcacggcgccgcccccttccccgccggccccagcggcttcccccccctgatgcaccacagcatcctgcaccacctgcccgccggcagagagagaggcgaggagggcgagcacgcctacgacaccctgagcctggagagcagcgacagcatggagaccagcatcagcaccggcggcaacagcgcctgcagccccgacaacatgagcagcgccagcggcctggacatgggcaagatcgaggagatggagaagatgctgaaggaggcccacgccgagaagaacagactgatggagagcagagagagagagatggagctgagaagacaggccctggaggaggagagaagaagaagagagcaggtggagagaagactgcagagcgagagcgccagaagacagcagctggtggagaaggaggtgaagatgagagagaagcagttcagccaggccagacccctgaccagatacctgcccatcagaaaggaggacttcgacctgaagacccacatcgagagcagcggccacggcgtggacacctgcctgcacgtggtgctgagcagcaaggtgtgcagaggctacctggtgaagatgggcggcaagatcaagagctggaagaagagatggttcgtgttcgacagactgaagagaaccctgagctactacgtggacaagcacgagaccaagctgaagggcgtgatctacttccaggccatcgaggaggtgtactacgaccacctgagaagcgccgccaagagccccaaccccgccctgaccttctgcgtgaagacccacgacagactgtactacatggtggcccccagcgccgaggccatgagaatctggatggacgtgatcgtgaccggcgccgagggctacacccagttcatgaactag

SEQ ID NO: 56089 - protein, 706 aa, Artificial Sequence
  derived and/or modified sequence
MVQSRLTATSASQDSPASGLQTPLQSGQPFKFSILEICDRIKEEFQFLQAQYHSLKLECEKLASEKTEMQRHYVMYYEMSYGLNIEMHKQAEIVKRLSGICAQIIPFLTQEHQQQVLQAVERAKQVTVGELNSLIGQQQLQPLSHHAPPVPLTPRPAGLVGGSATGLLALSGALAAQAQLAAAVKEDRAGVEAEGSRVERAPSRSASPSPPESLVEEERPSGPGGGGKQRADEKEPSGPYESDEDKSDYNLVVDEDQPSEPPSPATTPCGKVPICIPARRDLVDSPASLASSLGSPLPRAKELILNDLPASTPASKSCDSSPPQDASTPGPSSASHLCQLAAKPAPSTDSVALRSPLTLSSPFTTSFSLGSHSTLNGDLSVPSSYVSLHLSPQVSSSVVYGRSPVMAFESHPHLRGSSVSSSLPSIPGGKPAYSFHVSADGQMQPVPFPSDALVGAGIPRHARQLHTLAHGEVVCAVTISGSTQHVYTGGKGCVKVWDVGQPGAKTPVAQLDCLNRDNYIRSCKLLPDGRSLIVGGEASTLSIWDLAAPTPRIKAELTSSAPACYALAVSPDAKVCFSCCSDGNIVVWDLQNQTMVRQFQGHTDGASCIDISDYGTRLWTGGLDNTVRCWDLREGRQLQQHDFSSQIFSLGHCPNQDWLAVGMESSNVEILHVRKPEKYQLHLHESCVLSLKFASCVQGVVLSPEL

SEQ ID NO: 56090 - protein, 686 aa, Artificial Sequence
  derived and/or modified sequence
QTPLQSGQPFKFSILEICDRIKEEFQFLQAQYHSLKLECEKLASEKTEMQRHYVMYYEMSYGLNIEMHKQAEIVKRLSGICAQIIPFLTQEHQQQVLQAVERAKQVTVGELNSLIGQQQLQPLSHHAPPVPLTPRPAGLVGGSATGLLALSGALAAQAQLAAAVKEDRAGVEAEGSRVERAPSRSASPSPPESLVEEERPSGPGGGGKQRADEKEPSGPYESDEDKSDYNLVVDEDQPSEPPSPATTPCGKVPICIPARRDLVDSPASLASSLGSPLPRAKELILNDLPASTPASKSCDSSPPQDASTPGPSSASHLCQLAAKPAPSTDSVALRSPLTLSSPFTTSFSLGSHSTLNGDLSVPSSYVSLHLSPQVSSSVVYGRSPVMAFESHPHLRGSSVSSSLPSIPGGKPAYSFHVSADGQMQPVPFPSDALVGAGIPRHARQLHTLAHGEVVCAVTISGSTQHVYTGGKGCVKVWDVGQPGAKTPVAQLDCLNRDNYIRSCKLLPDGRSLIVGGEASTLSIWDLAAPTPRIKAELTSSAPACYALAVSPDAKVCFSCCSDGNIVVWDLQNQTMVRQFQGHTDGASCIDISDYGTRLWTGGLDNTVRCWDLREGRQLQQHDFSSQIFSLGHCPNQDWLAVGMESSNVEILHVRKPEKYQLHLHESCVLSLKFASCVQGVVLSPEL

SEQ ID NO: 56091 - DNA, 2121 bp, Artificial Sequence
  derived and/or modified sequence
atggtgcagagcagactgaccgccaccagcgccagccaggacagccccgccagcggcctgcagacccccctgcagagcggccagcccttcaagttcagcatcctggagatctgcgacagaatcaaggaggagttccagttcctgcaggcccagtaccacagcctgaagctggagtgcgagaagctggccagcgagaagaccgagatgcagagacactacgtgatgtactacgagatgagctacggcctgaacatcgagatgcacaagcaggccgagatcgtgaagagactgagcggcatctgcgcccagatcatccccttcctgacccaggagcaccagcagcaggtgctgcaggccgtggagagagccaagcaggtgaccgtgggcgagctgaacagcctgatcggccagcagcagctgcagcccctgagccaccacgccccccccgtgcccctgacccccagacccgccggcctggtgggcggcagcgccaccggcctgctggccctgagcggcgccctggccgcccaggcccagctggccgccgccgtgaaggaggacagagccggcgtggaggccgagggcagcagagtggagagagcccccagcagaagcgccagccccagcccccccgagagcctggtggaggaggagagacccagcggccccggcggcggcggcaagcagagagccgacgagaaggagcccagcggcccctacgagagcgacgaggacaagagcgactacaacctggtggtggacgaggaccagcccagcgagccccccagccccgccaccaccccctgcggcaaggtgcccatctgcatccccgccagaagagacctggtggacagccccgccagcctggccagcagcctgggcagccccctgcccagagccaaggagctgatcctgaacgacctgcccgccagcacccccgccagcaagagctgcgacagcagccccccccaggacgccagcacccccggccccagcagcgccagccacctgtgccagctggccgccaagcccgcccccagcaccgacagcgtggccctgagaagccccctgaccctgagcagccccttcaccaccagcttcagcctgggcagccacagcaccctgaacggcgacctgagcgtgcccagcagctacgtgagcctgcacctgagcccccaggtgagcagcagcgtggtgtacggcagaagccccgtgatggccttcgagagccacccccacctgagaggcagcagcgtgagcagcagcctgcccagcatccccggcggcaagcccgcctacagcttccacgtgagcgccgacggccagatgcagcccgtgcccttccccagcgacgccctggtgggcgccggcatccccagacacgccagacagctgcacaccctggcccacggcgaggtggtgtgcgccgtgaccatcagcggcagcacccagcacgtgtacaccggcggcaagggctgcgtgaaggtgtgggacgtgggccagcccggcgccaagacccccgtggcccagctggactgcctgaacagagacaactacatcagaagctgcaagctgctgcccgacggcagaagcctgatcgtgggcggcgaggccagcaccctgagcatctgggacctggccgcccccacccccagaatcaaggccgagctgaccagcagcgcccccgcctgctacgccctggccgtgagccccgacgccaaggtgtgcttcagctgctgcagcgacggcaacatcgtggtgtgggacctgcagaaccagaccatggtgagacagttccagggccacaccgacggcgccagctgcatcgacatcagcgactacggcaccagactgtggaccggcggcctggacaacaccgtgagatgctgggacctgagagagggcagacagctgcagcagcacgacttcagcagccagatcttcagcctgggccactgccccaaccaggactggctggccgtgggcatggagagcagcaacgtggagatcctgcacgtgagaaagcccgagaagtaccagctgcacctgcacgagagctgcgtgctgagcctgaagttcgccagctgcgtgcagggcgtggtgctgagccccgagctgtag

SEQ ID NO: 56092 - DNA, 2061 bp, Artificial Sequence
  derived and/or modified sequence
cagacccccctgcagagcggccagcccttcaagttcagcatcctggagatctgcgacagaatcaaggaggagttccagttcctgcaggcccagtaccacagcctgaagctggagtgcgagaagctggccagcgagaagaccgagatgcagagacactacgtgatgtactacgagatgagctacggcctgaacatcgagatgcacaagcaggccgagatcgtgaagagactgagcggcatctgcgcccagatcatccccttcctgacccaggagcaccagcagcaggtgctgcaggccgtggagagagccaagcaggtgaccgtgggcgagctgaacagcctgatcggccagcagcagctgcagcccctgagccaccacgccccccccgtgcccctgacccccagacccgccggcctggtgggcggcagcgccaccggcctgctggccctgagcggcgccctggccgcccaggcccagctggccgccgccgtgaaggaggacagagccggcgtggaggccgagggcagcagagtggagagagcccccagcagaagcgccagccccagcccccccgagagcctggtggaggaggagagacccagcggccccggcggcggcggcaagcagagagccgacgagaaggagcccagcggcccctacgagagcgacgaggacaagagcgactacaacctggtggtggacgaggaccagcccagcgagccccccagccccgccaccaccccctgcggcaaggtgcccatctgcatccccgccagaagagacctggtggacagccccgccagcctggccagcagcctgggcagccccctgcccagagccaaggagctgatcctgaacgacctgcccgccagcacccccgccagcaagagctgcgacagcagccccccccaggacgccagcacccccggccccagcagcgccagccacctgtgccagctggccgccaagcccgcccccagcaccgacagcgtggccctgagaagccccctgaccctgagcagccccttcaccaccagcttcagcctgggcagccacagcaccctgaacggcgacctgagcgtgcccagcagctacgtgagcctgcacctgagcccccaggtgagcagcagcgtggtgtacggcagaagccccgtgatggccttcgagagccacccccacctgagaggcagcagcgtgagcagcagcctgcccagcatccccggcggcaagcccgcctacagcttccacgtgagcgccgacggccagatgcagcccgtgcccttccccagcgacgccctggtgggcgccggcatccccagacacgccagacagctgcacaccctggcccacggcgaggtggtgtgcgccgtgaccatcagcggcagcacccagcacgtgtacaccggcggcaagggctgcgtgaaggtgtgggacgtgggccagcccggcgccaagacccccgtggcccagctggactgcctgaacagagacaactacatcagaagctgcaagctgctgcccgacggcagaagcctgatcgtgggcggcgaggccagcaccctgagcatctgggacctggccgcccccacccccagaatcaaggccgagctgaccagcagcgcccccgcctgctacgccctggccgtgagccccgacgccaaggtgtgcttcagctgctgcagcgacggcaacatcgtggtgtgggacctgcagaaccagaccatggtgagacagttccagggccacaccgacggcgccagctgcatcgacatcagcgactacggcaccagactgtggaccggcggcctggacaacaccgtgagatgctgggacctgagagagggcagacagctgcagcagcacgacttcagcagccagatcttcagcctgggccactgccccaaccaggactggctggccgtgggcatggagagcagcaacgtggagatcctgcacgtgagaaagcccgagaagtaccagctgcacctgcacgagagctgcgtgctgagcctgaagttcgccagctgcgtgcagggcgtggtgctgagccccgagctgtag

SEQ ID NO: 56093 - DNA, 2121 bp, Artificial Sequence
  derived and/or modified sequence
atggtccaatcgcgactgactgcaacatccgcctcacaggattctcctgcctccgggctccagactcccctgcagtcgggacagcctttcaagttctcaattcttgagatatgtgatagaattaaggaggagttccaattcctgcaggcacagtatcacagtttgaaactggaatgcgaaaaactggcgtctgaaaaaacggaaatgcaacgacactatgtgatgtattacgagatgtcctacgggctcaacatcgagatgcataaacaagcagaaattgtcaagcgtctaagtggaatctgcgctcaaataataccctttttgacccaggagcaccagcagcaggtactccaggccgtagaaagagctaagcaggtaaccgtcggagaactaaacagtttgatcggccagcagcagctgcaaccccttagccaccatgctccaccagtcccgctcaccccgaggccggccggccttgtcggtggctccgcaacggggctcctggccctctctggcgcacttgctgctcaagctcaactggccgccgccgtgaaagaagatcgagcaggggtggaggctgaaggatcccgtgtggagcgtgctccatctcgcagcgcctccccatctccacccgaaagtctggtagaagaggaacggcccagcggacccgggggaggaggcaaacagagggcagacgaaaaggaacctagcggtccatacgaatcagatgaggataaaagcgattacaatcttgtggtggatgaagaccagcctagcgagccgccatctcccgccacaacaccctgcgggaaggtccctatttgcatccctgccaggagggacctggtcgactcccctgcaagcctcgctagctcgcttggcagccccctaccacgcgcaaaggaacttatattgaacgaccttcctgcctcgacccccgctagcaagtcatgtgactcttccccgcctcaggacgctagtacacctggtccctctagtgcttcacacttatgccaactggctgctaaacctgcgccttctactgattcagtggccctgcgctccccattgacactgtcaagcccgtttaccactagcttctcactgggtagccacagcacattgaatggcgaccttagcgtgccctcatcgtacgtgtccttacacctgtctccccaagtgtccagtagcgtggtttatggccgctctccggtcatggcgttcgagtctcacccgcatctgcgcgggagcagtgtctcctcgagtctgccttcaataccgggaggcaaacctgcttacagcttccacgtaagcgctgatggccagatgcagcccgtgccttttcccagcgacgctttggtgggggccggaatcccccgccacgctaggcagctccataccttggcgcacggcgaagttgtgtgtgctgtgaccatatcaggaagcacacagcacgtgtacactggtggaaaaggctgcgtgaaagtctgggacgttggtcagcccggagccaagacacctgtggcacaactcgattgcctcaatagagacaactatattaggagttgtaagcttctgcccgatggccgttcactcattgtgggaggcgaagcctctacactctccatatgggatctggcagcgcccacacctcgcattaaggcggagctgacctctagcgccccagcatgttatgccctggctgtcagcccagatgctaaagtttgcttttcctgttgtagtgacggaaatattgtcgtgtgggatctgcagaatcagaccatggttcgccagttccaggggcataccgacggggcttcgtgcatcgacatcagtgattacgggacacggctgtggaccggagggctggataatacggttcggtgctgggacttgcgggaggggagacaactgcagcagcatgacttttcatctcaaatattctccctcggccactgcccaaaccaagattggctggccgtcggcatggaatcctccaatgttgaaatcctgcatgttaggaagccggagaagtaccagcttcatttacacgagagttgtgtgctaagtttgaagttcgccagctgtgtgcagggcgtcgtgctgtctccagagctgtag

SEQ ID NO: 56094 - DNA, 2121 bp, Artificial Sequence
  derived and/or modified sequence
atggttcaatctagacttactgcaaccagcgcttcccaagacagtcctgcctcaggcctgcagacacctttgcagtctgggcagccctttaagtttagcattctggagatctgcgaccgcattaaggaggagtttcagtttctgcaggcccagtatcattccttaaaactggaatgtgagaaattggcttctgagaaaaccgagatgcagaggcactacgtcatgtactacgaaatgtcgtacggtctgaatattgaaatgcataaacaggccgaaattgttaaacgactcagtggaatttgcgctcagatcatccccttcttgacccaggagcaccagcagcaggtcctgcaggccgttgagcgcgctaagcaggtcaccgtgggcgaacttaattcattgataggtcagcagcagcttcagccactgagccaccacgctcctccagtgcccctgacaccgaggccggctgggctggtcggaggctctgcgaccgggcttctcgctctgtccggggcgctggcagcccaggcccagctggcagcggccgtgaaagaggacagggctggcgtggaggccgaaggctctcgggtggaacgggcaccgagcagatcggcgtccccgtcgcctcctgaaagcttagtagaagaggaacgccctagcggccctggaggaggtggcaaacaaagggcggacgagaaggaaccatctggaccttacgagtcagacgaagacaagagtgactacaaccttgtcgtagatgaggatcaacctagcgagccgccatcgcctgccacaactccatgtgggaaagttcctatctgcataccggcaaggagagacctggtggattcccccgcctctcttgctagcagcctcgggagtccactcccacgagcaaaagaattgatcctgaatgacttaccagcaagcactcctgcaagcaaatcgtgcgactcctcacccccacaggatgcttctacccctgggcccagcagcgcttctcacctgtgccagctcgccgccaagcccgccccaagtacagatagcgtggcactgaggtcccccttaacactttcttccccattcacaacatccttctctctgggaagccacagcacactcaatggcgatctttccgtgccctcctcttatgttagcctgcacctcagcccccaggtcagtagcagcgtcgtgtacggtcgctcacccgtcatggcttttgagtcacatccccaccttcgagggtcttctgtgtcttcgagcctcccgtccatccctggaggcaaacccgcctacagctttcacgttagcgccgacggtcagatgcagccagtgcccttcccaagtgatgcactagtcggagccggtatcccgcggcatgcccgccagttgcacaccctggcgcatggtgaagtcgtatgcgcagtgacaatcagcgggagtactcagcacgtatacactggcggcaagggttgcgtcaaagtctgggacgtggggcagccaggagccaagactcctgtagcccagttagactgtcttaaccgagacaattacatcagatcctgtaagctgctgccagatggaagatcactgatagtgggcggagaagcttctacactctccatatgggacctagcggcacctactccgcggataaaggccgaactcacctcgtcagccccggcgtgttatgccctggccgttagccccgatgctaaggtttgtttctcgtgttgcagtgacggcaatatcgttgtctgggatctgcagaatcagaccatggtgagacagtttcaagggcataccgacggggcgtcttgcatcgatattagcgattacggtactcgattgtggactggcggactggataacaccgtccgatgctgggacctgcgggagggtcggcaactgcagcagcacgacttctcatcccaaattttttcactgggtcattgccctaatcaggactggctcgccgtggggatggaatctagcaatgttgaaatcctgcatgtgcgcaaacctgagaaataccagttacacttgcatgagtcttgcgttctgtctctgaagttcgcctcttgcgtccaaggcgtggtactgtcacccgaactgtag

SEQ ID NO: 56095 - DNA, 2061 bp, Artificial Sequence
  derived and/or modified sequence
caaacccctctgcaatccggtcagccctttaaattctctatcttggaaatctgtgatcggataaaggaggagttccagtttctacaggcccagtaccacagccttaaactggaatgcgaaaagctggccagcgaaaaaaccgagatgcagcgtcattatgtgatgtactacgagatgagctatggcctgaacatcgagatgcacaaacaagccgaaatcgtcaaaagactctctggaatctgcgctcaaattatcccatttctcacccaggagcatcaacagcaggttttgcaggcggtggaacgcgccaagcaggtaactgtcggagagctaaattcgctgataggccagcaacagttgcagcccctctcccatcatgctcccccagtgcctctgacaccccggccggctggactagtggggggttcagccaccggtttactcgccctgtctggggcccttgctgcacaggctcagctcgccgccgctgtgaaagaggatagggcaggcgtggaggctgaaggtagtcgagtcgagcgagctccgtcccgctcagcttcgccatccccccctgaaagtttggtggaggaggaacggccgtctggccccggaggcggcgggaaacagcgcgctgacgagaaggaaccgagtggcccctacgagtctgatgaagataagagcgactacaacctggttgtggatgaggatcagcctagtgagccaccctcaccagccaccaccccctgtggaaaagtccccatttgcatcccagcgcgccgcgacttggtggactctccagctagtctcgcgtcctcccttggttctcctcttccgcgggcaaaagaattaatcctgaatgatctgccagcgtccactcctgcaagtaagtcatgtgattctagccctcctcaggatgcaagtacccccggtccctcctccgcctctcacctttgtcagctcgcagctaaacccgcaccgtctacagatagcgtagctctcagatccccactgaccctctcctctcctttcacaacaagctttagcctggggtcacactctacactcaatggcgacctgagcgttccgtcgtcttatgtttctctgcacctaagtccacaagtgtcaagctcagtcgtgtatggccgttctcctgtgatggcctttgaaagtcacccacacttgcgaggcagcagcgtttccagcagtcttcccagcattcctggtggaaaaccagcctactcgtttcatgtctccgcagatggtcaaatgcaaccagtaccattccctagcgacgctctcgtgggggccggaattcctcggcacgcaagacaactgcacactttggcccatggagaggtagtgtgcgcggtaaccatttccggtagtactcagcatgtctacactggggggaaggggtgcgttaaggtttgggacgtggggcagccaggggccaaaaccccagtcgctcagttggactgtcttaaccgagataattatattcgaagctgcaaactgctgccagatggcaggagtctcattgttggcggcgaggcatccaccctcagtatttgggatttagccgcccctactcctcgcataaaagcagagttgacaagctctgctccagcatgctatgcactagcagtctcaccagatgcgaaagtgtgcttcagttgctgctctgacggcaacatagtcgtttgggatctacagaatcaaaccatggttagacaattccaggggcacactgacggggcgtcttgtatagatatctcagattacggcaccaggctatggacaggggggttagataatacagtgcgttgttgggacttacgtgaggggcgccagctgcagcagcacgacttctcctcccaaattttctcgcttgggcattgtcccaaccaggactggctagcagtggggatggaaagtagtaatgtggagatcttacacgtccggaaacccgaaaagtaccagttgcacctgcatgagtcctgcgtgctgagcttgaaattcgcgagttgcgtgcagggagtggtgctctcccctgagctctag

SEQ ID NO: 56096 - DNA, 2121 bp, Artificial Sequence
  derived and/or modified sequence
atggtgcagagccggctgacagccaccagcgccagccaggacagccctgccagcggcctgcagacccccctgcagagcggccagcccttcaagttcagcatcctggagatctgtgaccgcatcaaggaggagttccagttcctgcaggcccagtaccacagcctgaagctggagtgtgagaagctggccagcgagaagacagagatgcagaggcactacgtgatgtactatgagatgtcctatggcctgaacatcgagatgcacaagcaggccgagatcgtgaagaggctgagcggcatctgtgcccagatcatccccttcctgacccaggagcaccagcagcaggtgctgcaggccgtggagcgggccaagcaggtgacagtgggggagctgaacagcctgattggccagcagcagctgcagcccctgagccaccacgcccctcctgtgcccctgacccccaggcctgctggcctggtgggcggcagcgccaccggcctgctggccctgagcggggccctggccgcccaggcccagctggccgctgctgtgaaggaggacagagctggggtggaggccgagggcagccgggtggagcgggcccccagccgcagcgccagccccagccccccagagagcctggtggaggaggagcggcccagcggccctgggggcggcggcaagcagagagcagatgagaaggagcccagcggcccctatgaaagtgatgaggacaagagtgactacaacctggtggtggatgaggaccagcccagcgagccccccagccctgccaccaccccctgtgggaaggtgcccatctgcatcccagcccggcgggacctggtggacagccctgccagcctggccagcagcctgggcagccccctgccccgggccaaggagctgatcctgaatgacctgcctgccagcaccccagccagcaagagctgtgacagcagccccccccaggatgccagcaccccaggccccagcagcgccagccacctgtgccagctggccgccaagccagcccccagcacagacagcgtggccctgcggagccccctgaccctgagcagccccttcaccaccagcttcagcctgggcagccacagcaccctgaatggagacctgtctgtgcccagcagctatgtgtccctgcacctgagcccccaggtgagcagctctgtggtgtatggccgcagccctgtgatggcctttgagagccacccccacctgcggggcagctctgtgagcagcagcctgcccagcatccctgggggcaagccagcctacagcttccacgtgtctgcagatggccagatgcagcctgtgcccttccccagtgatgccctggtgggcgccggcatccccaggcatgcccggcagctgcacaccctggcccacggggaggtggtgtgtgctgtgaccatcagcggcagcacccagcacgtgtacacaggaggcaagggctgtgtgaaggtgtgggatgtgggccagcccggggccaagacccctgtggcccagctggactgcctgaacagagacaactacatccgcagctgcaagctgctgcctgatggccgcagcctgattgtgggcggggaggccagcaccctgagcatctgggacctggccgcccccaccccccgcatcaaggccgagctgaccagcagcgccccagcctgctacgccctggccgtgtccccagatgccaaggtgtgcttcagctgctgcagtgatggcaacatcgtggtgtgggacctgcagaaccagaccatggtgcggcagttccagggccacacagatggagccagctgcatcgacatcagtgactatggcacccggctgtggacaggaggcctggacaacacagtgcgctgctgggacctgcgggagggccggcagctgcagcagcacgacttcagcagccagatcttcagcctgggccactgccccaaccaggactggctggccgtgggcatggagagcagcaatgtggagatcctgcacgtgaggaagccagagaagtaccagctgcacctgcacgagagctgtgtgctgagcctgaagtttgccagctgtgtgcagggcgtggtgctgagccctgagctgtag

SEQ ID NO: 56097 - DNA, 2061 bp, Artificial Sequence
  derived and/or modified sequence
cagacccccctgcagagcggccagcccttcaagttcagcatcctggagatctgtgaccgcatcaaggaggagttccagttcctgcaggcccagtaccacagcctgaagctggagtgtgagaagctggccagcgagaagacagagatgcagaggcactacgtgatgtactatgagatgtcctatggcctgaacatcgagatgcacaagcaggccgagatcgtgaagaggctgagcggcatctgtgcccagatcatccccttcctgacccaggagcaccagcagcaggtgctgcaggccgtggagcgggccaagcaggtgacagtgggggagctgaacagcctgattggccagcagcagctgcagcccctgagccaccacgcccctcctgtgcccctgacccccaggcctgctggcctggtgggcggcagcgccaccggcctgctggccctgagcggggccctggccgcccaggcccagctggccgctgctgtgaaggaggacagagctggggtggaggccgagggcagccgggtggagcgggcccccagccgcagcgccagccccagccccccagagagcctggtggaggaggagcggcccagcggccctgggggcggcggcaagcagagagcagatgagaaggagcccagcggcccctatgaaagtgatgaggacaagagtgactacaacctggtggtggatgaggaccagcccagcgagccccccagccctgccaccaccccctgtgggaaggtgcccatctgcatcccagcccggcgggacctggtggacagccctgccagcctggccagcagcctgggcagccccctgccccgggccaaggagctgatcctgaatgacctgcctgccagcaccccagccagcaagagctgtgacagcagccccccccaggatgccagcaccccaggccccagcagcgccagccacctgtgccagctggccgccaagccagcccccagcacagacagcgtggccctgcggagccccctgaccctgagcagccccttcaccaccagcttcagcctgggcagccacagcaccctgaatggagacctgtctgtgcccagcagctatgtgtccctgcacctgagcccccaggtgagcagctctgtggtgtatggccgcagccctgtgatggcctttgagagccacccccacctgcggggcagctctgtgagcagcagcctgcccagcatccctgggggcaagccagcctacagcttccacgtgtctgcagatggccagatgcagcctgtgcccttccccagtgatgccctggtgggcgccggcatccccaggcatgcccggcagctgcacaccctggcccacggggaggtggtgtgtgctgtgaccatcagcggcagcacccagcacgtgtacacaggaggcaagggctgtgtgaaggtgtgggatgtgggccagcccggggccaagacccctgtggcccagctggactgcctgaacagagacaactacatccgcagctgcaagctgctgcctgatggccgcagcctgattgtgggcggggaggccagcaccctgagcatctgggacctggccgcccccaccccccgcatcaaggccgagctgaccagcagcgccccagcctgctacgccctggccgtgtccccagatgccaaggtgtgcttcagctgctgcagtgatggcaacatcgtggtgtgggacctgcagaaccagaccatggtgcggcagttccagggccacacagatggagccagctgcatcgacatcagtgactatggcacccggctgtggacaggaggcctggacaacacagtgcgctgctgggacctgcgggagggccggcagctgcagcagcacgacttcagcagccagatcttcagcctgggccactgccccaaccaggactggctggccgtgggcatggagagcagcaatgtggagatcctgcacgtgaggaagccagagaagtaccagctgcacctgcacgagagctgtgtgctgagcctgaagtttgccagctgtgtgcagggcgtggtgctgagccctgagctgtag

SEQ ID NO: 56098 - DNA, 2121 bp, Artificial Sequence
  derived and/or modified sequence
atggtgcagagccggctgaccgccaccagcgccagccaggacagccccgcatcaggcctgcagacccctctccagagtgggcagcccttcaagtttagtatcctcgagatttgtgacaggattaaagaagaatttcagttcctgcaagctcagtaccattcactgaagctggagtgtgagaagctcgccagtgagaagaccgaaatgcaacggcactacgtcatgtactacgaaatgagctacggactcaatatcgaaatgcacaagcaggccgagattgtgaaaagactgagcggtatctgcgctcagattatcccgttcctcactcaggagcaccagcaacaggtgcttcaggcagtcgagagggcaaagcaagtcacggttggagaacttaatagtctgattggccagcagcaactccagcctttatcgcaccacgcacccccagtcccactcactccacgacccgctggcctggtcgggggtagcgctactggactcttggccctgtcaggcgcactggctgcccaggcccaactggccgctgccgtgaaagaggaccgagccggcgttgaagccgagggctcgcgcgttgaacgggccccctcgaggtctgccagtccttctccaccggagagcctagtggaagaagaaagacccagcggacctgggggaggggggaagcagagggctgatgagaaggaaccaagtggtccttatgagagtgatgaagataaaagcgactacaatctcgtcgtggacgaggatcagccatcagagccaccctcccccgccaccacgccatgcggaaaggtcccgatttgcatccccgctaggcgggacttggtggattctccggcgtccctcgccagctcgctcggatctcctcttccccgggcaaaggaactgatcctgaacgatctgccagctagtactcccgccagtaagtcatgtgacagctctcccccacaagatgcctcgactccaggcccaagctccgcctctcacctttgccagctggccgcaaaaccagccccatcaactgactctgtagccttacgcagtcccctgacactgtccagtccctttacgacatcattttcactgggaagccacagcaccctgaatggtgatctcagcgttccttcttcttatgtttcacttcatctgtcacctcaggtctcctcttcagtggtctatggacggtctccagtgatggcctttgagtctcatcctcacctccgaggaagctccgtgagctcaagcctgcccagcatcccggggggcaaaccagcttattcttttcacgtatctgccgacggtcaaatgcagcccgtgcccttccccagcgatgcattagttggcgccgggattccccgacatgctcgccagctgcatacactggcccacggagaagttgtgtgtgcggtgacaatctctggcagtacccaacatgtgtacaccgggggaaaagggtgtgtgaaggtttgggacgtcgggcagcctggtgccaagactccagtggcccaactggattgtctgaaccgcgataattatatcagatcttgcaagctgcttcccgatggacgctcgttgattgtgggaggggaagcttccaccctgtccatctgggatctggcagctccaacaccaaggattaaagcggagctaactagtagcgcccccgcgtgctacgctctggccgtttcccccgatgcaaaggtgtgttttagttgctgcagtgatggaaacattgtcgtgtgggacctgcagaaccagaccatggttagacagttccagggacacactgacggcgcctcatgcatagacataagtgattacgggacaagactttggaccggcggcctggataatacagtgaggtgttgggatctgcgagaaggtcgccaactacaacagcacgatttctcctcacaaatcttttctttagggcactgtccaaaccaggactggctggccgtcgggatggagtcgagtaatgttgagatccttcacgttaggaaaccagagaaataccagctgcacttgcacgagagctgcgttctcagccttaaattcgcttcatgcgtccagggtgtcgtgctttcccccgaactctag

SEQ ID NO: 56099 - DNA, 2121 bp, Artificial Sequence
  derived and/or modified sequence
atggtgcagagccggctgaccgccaccagcgccagccaggacagccccgcatcgggcctgcaaacacccctgcagtccgggcagccttttaagttcagcatactggaaatatgcgacagaataaaggaggaatttcagtttctgcaggcgcagtaccatagcctgaagctcgaatgtgaaaaactggcttcggaaaagactgaaatgcaaagacactatgttatgtactatgagatgagttatggactgaatatcgaaatgcacaagcaggctgagatcgtgaagcgcctgtctggcatttgtgctcaaataattcctttcctgactcaggaacaccagcaacaagtgctgcaggctgtggagcgtgctaagcaggtgacagtcggggagctgaatagtctaatagggcagcaacagttgcagcctctctcacaccacgcgccccccgtgccgctcactccaaggcccgcagggctggttggcggctctgcaaccgggttattggccctcagtggcgcactggccgctcaggctcagctggcagccgcagttaaggaagaccgggctggggtcgaggccgagggctcaagagtcgaaagggctccttcccggagcgctagtcccagtccaccagagtctctcgtggaagaggaacgaccctcggggcctgggggtgggggaaagcagagggccgacgagaaggaacccagcggaccatatgagtcggacgaagataaatccgactataacctggtggtagacgaagaccagcccagtgagccaccatcccctgcaaccacaccgtgcgggaaagttcctatttgcatcccagctcgtcgagatcttgtcgatagccctgcctctcttgcttcctctctgggctcccctcttccgagagctaaagaactcatcctgaatgatctgcccgctagtacacccgcctcgaagagttgcgatagttctcccccccaggacgcttctacacctggcccgagttctgcttcacacctatgccaactagcagctaagccagctcccagtactgatagtgtggcactacgcagccccctcacactgagctctcccttcaccacttccttctccctgggatcacatagcacattaaacggagacttgagtgtaccatccagttacgtgtcccttcacttatccccacaggtgagttctagtgtggtgtacggaagaagccccgtgatggcatttgagtctcatcctcatctgcggggctcgagcgtgagttcctcactaccttcaattcctgggggcaaacccgcttattctttccatgtcagcgcagacgggcaaatgcagcctgtccctttcccatccgacgcactcgtgggggcaggcataccacgccatgcccgacaattgcacactttggcccatggagaggtggtttgtgccgtaaccatctcaggtagcacccaacatgtctacaccggtggcaaaggctgcgtgaaggtttgggacgtggggcagccaggcgcgaagacgccggtcgctcagttggactgcttgaaccgcgacaattacatccgatcttgtaagctactgccagatggcagaagcctgattgtgggcggcgaggcttcaaccctgtcgatttgggacctggccgcccctacacctagaattaaggctgagctcacaagcagcgcacctgcgtgttacgcattggctgtgtcacctgatgcaaaggtctgtttcagttgctgttctgacgggaatattgtggtgtgggatttacagaatcagacgatggtgagacagtttcaggggcatactgacggagccagttgcattgacatcagcgactatggcacacgactgtggaccggaggactggataatacagtgaggtgctgggatctaagggagggcagacagctacagcagcatgatttttctagccagattttttcattgggtcactgccctaatcaggactggctggcagtcggcatggaaagcagtaacgttgagatactgcacgtccgcaagccggaaaagtatcagctgcatctgcacgagagctgcgtgctatcgttgaagttcgcctcttgcgtccagggagtggtcctgtcccctgagctgtag

SEQ ID NO: 56100 - DNA, 2061 bp, Artificial Sequence
  derived and/or modified sequence
cagacccccctgcagagcggccagcccttcaagttcagcatcctggaaatctgcgaccggattaaagaggagttccagttcttgcaggctcagtatcatagccttaaattggaatgcgaaaaactggcttctgagaagacagaaatgcaacgtcattacgtcatgtactacgagatgtcttatggactgaacatcgaaatgcacaaacaggccgaaatcgttaagcgcctttcaggcatatgcgcccagataattcctttcttgacccaggaacatcagcagcaggtcctccaggctgttgagagggcgaagcaggtcaccgtgggagagctgaatagtctgattggacagcagcagttacagcccctgagccatcacgctccccccgtgcctctgactcccaggcctgcaggcctggtcggaggtagcgcaactgggttacttgctctcagtggcgccctcgctgctcaggcccagcttgcagctgcggtgaaggaggatagagctggcgtggaagccgagggttcacgggtcgagagggctccatcacggagcgccagtccttctccaccagagagcctggtggaggaggagcgcccttcagggcccggcggcggcggtaagcagcgtgccgacgagaaggaaccttcaggcccctacgagtcagatgaggataaatcagattataacctggttgtggatgaagaccaacctagcgaacctcctagcccagccactactccatgcggcaaagtccccatctgtatccctgctaggagggatctggtcgattcgccagcctcccttgccagttcgttaggttctccactccccagagctaaggagctgatcttaaacgatcttcctgcgagtaccccagcctccaagtcctgtgactcctctccgccacaggatgctagtacccctggcccctcctccgcttctcatctttgccagttagcagccaaacccgccccgtctaccgatagcgtggcattgaggagcccactgaccttgtcttctccatttactacaagctttagccttggatcccactctacactgaatggcgacttatccgtgcccagtagctatgtgagcttgcatctgtcccctcaggtgtcatcctcagtcgtgtacggccgcagcccggttatggcattcgaaagtcatcctcatttacgcggaagctcagtgtcctcctctctgcccagtattcctgggggaaaacccgcttattctttccatgtgagcgccgatggtcaaatgcagcctgtgccattcccctccgacgctctggtaggcgctgggatcccacgtcacgccaggcagctccacacactcgcccacggggaggtggtttgcgcagtaaccatatccggcagcacacaacatgtgtatacagggggaaagggctgcgttaaggtgtgggacgtgggccagcctggggccaaaaccccagttgcacaactcgactgcctgaatcgcgacaattacatccgcagttgcaagctactcccagacggtcggtctctgattgtgggtggagaggccagcactcttagcatctgggatctcgctgctcccactccgagaattaaggcggaactcactagctccgctcctgcctgctacgcactcgccgtctcccccgacgctaaggtgtgttttagctgttgttccgatggcaacatcgtagtatgggacttgcagaatcaaacaatggtgcgtcagtttcagggccataccgacggggcaagctgcatcgatatcagcgactatggcactcggctgtggaccggcggcctcgataatacggttcgttgctgggacctgcgggaaggtcggcaactgcaacagcatgatttctccagccaaattttctccctcggacactgtccaaaccaggactggctggccgttggcatggaatcaagcaacgtcgagatattgcacgtccgcaagcctgaaaagtatcagctgcatctccacgaatcctgcgttttaagtctgaaatttgccagttgtgtccaaggcgtggtactctcccccgaactgtag

SEQ ID NO: 56101 - DNA, 2121 bp, Artificial Sequence
  derived and/or modified sequence
atggtccaatcccgcctgactgccacttcggcctcccaggactctccggctagtggcctccagaccccactgcagtctggtcagccattcaagttcagtatcctcgaaatctgtgatagaattaaagaggagtttcagttcttacaggcacagtaccattcccttaaactggaatgcgagaaactcgcgtctgaaaagaccgagatgcagaggcattatgtaatgtattacgagatgtcctatggactgaatattgaaatgcataagcaggcagaaatcgtgaaacggttgagcggtatttgcgctcagatcattccttttttgactcaggaacaccaacagcaggtcctgcaggccgtcgagagagcgaaacaagtaacggtcggagagctcaacagcctgattggacagcagcaactgcagcccctttcacaccatgctcccccagtgcctcttaccccccgaccagccggacttgtgggcggatcagcaacaggactgctggcccttagcggggctctagctgctcaagcgcagctggctgcggcagtaaaagaggatagagccggagttgaggcagaaggtagccgggtggagcgagccccaagcaggtcagcttcgccatctccccctgagtccctggtagaggaagagcggccttcgggcccaggaggcggaggcaagcaacgagcagatgaaaaagaaccctctggaccttacgaaagtgacgaggataaatccgactacaatctcgttgtggatgaagatcagcctagtgagccaccaagcccggctaccaccccttgtggtaaggtccctatttgtatccctgcgagacgggacctggtcgactcccccgctagcctggcctcctcactcggatcaccgcttccgagggcaaaggaattgatcctgaacgatctgccagcaagcacaccagctagcaagtcctgtgattccagcccacctcaggacgccagtacacctggtccctccagcgctagccacctgtgtcagcttgccgctaaacccgcaccctcaactgactccgtagccctccggagcccactcaccctgagctccccttttaccacctccttctcgttggggtcacacagcactctcaatggcgatctatccgttcccagctcatacgttagtcttcacctgagcccccaagtgtcaagttccgtcgtgtatggccgttcccccgtcatggcctttgaatcgcacccccatctaaggggatctagtgtgtcctcttctttgccctccatccccggtgggaagcccgcttactccttccatgtatctgccgacgggcagatgcagcctgtgccttttccatccgacgcccttgtcggggcaggcattcccaggcacgctcgtcagttgcataccctggcccacggtgaggtcgtatgtgcagtcactatctccgggtctactcagcacgtgtacacgggcggtaaaggatgtgtgaaggtctgggatgtgggacagcctggcgctaagactcctgtcgcccaactggactgcctgaaccgagataactacattcgctcttgcaagctgctccctgacggacggtctctaatcgtgggtggcgaggcttccaccctgagtatttgggacctggcagcccctactccgaggataaaagctgagctgactagtagtgctcctgcttgctacgccctggctgtgtctcccgacgccaaggtgtgtttttcttgctgtagtgacgggaatattgtcgtgtgggatttacagaaccaaacgatggtcagacaatttcaaggccataccgatggagccagctgcattgacatctcagactacggtacccgcctctggaccggcggactggataacacggtgaggtgctgggatcttagggaaggacgccagcttcaacagcacgacttcagtagccagatcttcagtctgggtcattgtccaaaccaggattggctggccgtgggtatggagtctagtaacgttgaaatccttcacgtccgcaagcctgaaaaataccagctgcacctgcatgagtcctgtgtgctgtctttgaagtttgcgtcatgcgtccagggagtcgtcttgagtcctgaactgtag

SEQ ID NO: 56102 - DNA, 2121 bp, Artificial Sequence
  derived and/or modified sequence
atggtgcagagccgtcttaccgccacctccgcttcacaggactcacccgctagcgggctgcaaaccccactccagtctggtcagcccttcaagttttccatcttagagatttgcgaccggatcaaagaggagttccaatttttgcaggcacagtaccactccttgaaactcgagtgcgagaagctggcaagcgagaagactgagatgcagaggcattacgtgatgtactacgaaatgagctatggcttaaatatcgagatgcataagcaggctgaaatcgtgaagagactgtctgggatttgcgcccagataattccatttctgacccaggaacaccagcagcaagtgctgcaagcggtcgagagggctaaacaagtcaccgtgggagagctgaatagtttaatcggacagcagcaactgcagcccctgagtcaccacgctccgcctgtgcccctgacccccaggccggcaggactggtgggcggatcagcgaccggactgttggccttgtctggcgcactcgctgcacaggctcagctcgccgcagctgtgaaagaggatagagctggggtcgaagccgaaggtagccgggttgagcgagctccttcacgatctgctagtccatctccccctgagtcgcttgtggaagaagagcgacctagtggacctggcggagggggtaagcagagagctgatgagaaagagcccagtggaccgtatgaatctgacgaggataagtccgactataaccttgtggttgatgaggaccagccctccgagccaccttcccctgccacaactccttgcggcaaggtgcctatttgcattcccgctcgtcgtgacctggtcgattcccccgcttctctggcatcatcactgggctctcctctcccacgcgctaaagagttgatcttgaacgatctgccagcatcaacccccgctagtaagtcatgcgatagctccccccctcaggatgcatctacgcccggtccaagcagcgcaagccatctatgccagctggctgccaagccggcaccaagcactgactctgtggcccttcgtagccccctgaccctgtcctcgccgtttacaactagtttttcccttgggtcacactctacgcttaacggtgacctgtccgtgccatccagttatgtgagcctgcatctttcaccccaggtgtcatctagcgtcgtatacgggaggagccccgttatggccttcgaatcacatccacacctgcgcggaagttccgtatcttcgtccctaccaagcattccagggggtaagccagcatacagcttccacgtcagcgccgatggccagatgcagcctgtccctttcccatcggatgcactagtgggagcagggatcccccgtcacgcacgccaactgcacacacttgcccacggagaggtggtgtgcgcagttacgatctcaggatctacacagcatgtctacaccggaggcaaggggtgtgttaaagtctgggatgtgggccagccaggggctaaaacgccggtcgctcagctggattgtctgaacagggataattatatccggtcttgtaaactcttaccagatggccgaagtttaatcgttggcggtgaagcctcaacactgtctatctgggacctggcggcacctacccctcgtataaaggccgagctgacatcaagtgcaccagcatgctatgccctggccgtgtccccagacgcaaaggtgtgtttctcgtgttgttctgatgggaatatagtggtatgggacctccaaaatcagactatggtacggcagtttcaagggcacactgatggtgcctcgtgcattgatattagcgattacggaaccaggctatggaccggcggtctggataacaccgttcgttgctgggacctgcgtgaggggaggcaactccagcagcacgatttcagcagccagattttcagccttgggcattgcccaaatcaggactggttggcagtgggtatggagtcctccaatgttgaaatcctccacgtgcgcaagccagaaaagtaccagctgcatttgcacgagtcgtgcgtgctatcactaaagtttgccagctgcgtccagggagtcgtactgtcccctgagctctag

SEQ ID NO: 56103 - DNA, 2061 bp, Artificial Sequence
  derived and/or modified sequence
caaacaccactgcagtcagggcagccctttaagttctccatcctcgagatctgcgacagaattaaagaggagttccagttcctacaggctcagtatcactctctaaaattggagtgcgaaaagctggcctctgagaagacggagatgcagcggcattacgttatgtattacgagatgtcctatggactgaacatcgagatgcataagcaagcagaaatcgttaagcgcctgagcgggatctgcgctcagatcattccattcctcacccaagagcaccagcagcaggtgttgcaggccgtcgagagggctaagcaggtgacggtcggcgaactgaatagcctaattgggcagcaacagcttcagcccctctcacaccatgccccacctgtgcccctcacaccccgtccggcaggccttgtcggtggtagcgcaactgggttgctggcactgtctggcgcactagcagcacaggcccagctcgccgcagcggtcaaggaggatcgggctggggtggaagccgaggggtcacgtgtcgagcgggcacccagccgcagcgcctcgccctcccccccagagtccctcgtcgaagaagaaaggcccagcggtcccggtggcggaggtaagcaacgggcagatgagaaggaaccctccgggccttacgagagtgatgaagataagagcgattacaacctggtggtggacgaagatcagcccagcgagcctccgtccccggctactaccccctgtggcaaagttcctatttgcattccggcaagaagggacctggtcgatagtccagccagtcttgcatcctcattagggagccctctgcccagggctaaggaacttatcctcaacgacctgccagcatcaacccccgcatcaaaatcctgcgactctagcccaccccaagatgcttccacacccggtccatcctcggcctctcacctctgccaactggccgctaagcctgcaccctcaacggactctgtggccctgcgatctcctttgaccctgtcctccccatttaccaccagtttctccctcgggagccattccacattaaatggcgacctttccgttccatcctcgtatgtgagcctccacctatccccccaggtttcctcgtccgtcgtttacggtcgttcacccgtgatggcattcgaaagccacccacatctgcgaggttcatccgtcagttcttcattacccagcattcctggcggaaagcccgcttacagcttccacgtgtccgcagatggtcaaatgcagcctgtgccctttcccagcgatgccctggtaggagccggtatcccacgccacgccaggcagctgcatactttggcccacggcgaagtggtctgcgctgttacaatttcagggagcactcaacacgtgtacacaggtggaaaaggctgcgtcaaggtctgggatgtcgggcagcccggagctaagacccccgtcgcccagctcgactgtctcaacagggataactacattcggtcctgtaagctgctgccagatggccgttctttaatcgttgggggtgaggccagtactctttccatctgggatctggctgcccctacacctcggatcaaggctgagttgacatcttccgccccagcttgctatgccctcgccgtatcccctgatgcgaaggtctgtttctcctgttgctcagatggcaacatcgtggtttgggatctccagaatcaaacaatggtgagacagttccaggggcataccgacggggcatcttgcatagatatcagcgactacggcaccaggttgtggactgggggtctggacaacacagttagatgctgggacctgagggaggggaggcagctgcaacagcacgattttagctcacagattttctctctcgggcactgtcctaatcaggattggctcgcggtggggatggaatcttcgaatgtcgagattttgcatgtacggaagccagaaaagtaccagcttcatttacatgagagctgtgttttgtccttgaagttcgcatcatgtgtgcagggagtcgtgctcagccctgagctatag

SEQ ID NO: 56104 - DNA, 2483 bp, Artificial Sequence
  derived and/or modified sequence
gaaaattgtactgagaattagaacttctgcaagggctcaagagtgtcagctagtaataataataataacaatagctgaagtgcaatggtgcaatcacggctcactgcaacctccgcctcccaagattctcctgcttcaggattacagaccccgctccagtccggccagcccttcaagttctcgatcttggagatctgcgaccgcatcaaagaagaattccagtttcttcaggctcaataccacagcctcaagctagaatgtgagaagctggccagcgagaagacggaaatgcagcgacattatgtcatgtattatgagatgtcgtacgggctcaacattgaaatgcataagcaggcggagattgtgaagcgtctgagcggtatctgcgctcagattatccccttcctgacccaggagcatcagcagcaggtgctccaggccgtagaacgcgccaagcaggtcaccgtgggggagctgaacagcctcatcgggcagcagcagctccagccgctgtcccaccacgcaccccctgtgcccctcaccccccgcccagccgggctggtgggcggcagtgctacggggctgcttgctctgtctggagccctggctgcccaggctcagctggcggcggctgtcaaggaggaccgtgcgggcgtggaggccgaggggtccagagtggagagagccccgagcaggagtgcatctccctcgccccctgagagtctcgtggaggaggagcgaccgagtggccctggtggtggcgggaagcagagagcagatgagaaggagccatcaggaccttatgaaagcgacgaagacaagagtgattacaatctggtggtggacgaggaccaaccctcagagccccccagcccggctaccaccccctgcggaaaggtacccatctgcattcctgcccgtcgggacctggtggacagtccagcctccttggcctctagccttggctcaccgctgcctagagccaaggagctcatcctgaatgaccttcccgccagcactcctgcctccaaatcctgtgactcctccccgccccaggacgcttccacccccgggcccagctcggccagtcacctctgccagcttgctgccaagccagcaccttccacggacagcgtcgccctgaggagccccctgactctgtccagtcccttcaccacgtccttcagcctgggctcccacagcactctcaacggagacctctccgtgcccagctcctacgtcagcctccacctgtccccccaggtcagcagctctgtggtgtacggacgctcccccgtgatggcatttgagtctcatccccatctccgagggtcatccgtctcttcctccctacccagcatccctgggggaaagccggcctactccttccacgtgtctgcggacgggcagatgcagccggttcccttcccctcggatgcactggtaggcgcgggcatcccgcggcacgcccggcagctgcacacgctggcccatggcgaggtggtctgcgcggtcaccatcagcggctccacacagcatgtgtacacgggcggcaagggctgtgtgaaggtgtgggacgtgggccagcctggggccaagacgcccgtggcccagctcgactgcctgaaccgagacaactacattcgttcctgcaagttgctgccggatggccggagtctgatcgtgggcggtgaggccagcaccttgtccatttgggacctggcggcgcccaccccccgtatcaaggccgagctgacttcctcagccccagcctgctacgccctggccgtcagccccgacgccaaggtttgcttctcctgctgcagcgatggcaacattgtggtctgggacctgcagaatcagactatggtcaggcagttccagggccacacggacggcgccagctgcattgatatttccgattacggcactcggctctggacagggggcctggacaacacggtgcgctgctgggacctgcgggagggccgccagctgcagcagcatgacttcagctcccagattttctccctgggccactgccctaaccaggactggctggcggtcggaatggagagtagcaacgtggagatcctgcacgtccgcaagccggagaaataccagctgcacctccacgagagctgcgtgctgtccctgaagtttgcctcctgcgtccaaggagtcgtcctcagtcctgagttgtgacatctccagaaataacaaatacatcgtgacaggctcgggggacaagaaggccaccgtgtatgaggtggtctactgagacatgaccccccttcctgtacccgaagtccagactcccaggggaatcagcagccaggacagacatcctagcagccgcctcccagccctgcctaggaaccgtacatcccatctgctctctggccaacggcttcacaccttcccctgctgcatgtgggggccgatgggcaggggacctcggtggaaataaaatgtatctatca

SEQ ID NO: 56105 - DNA, 2121 bp, Artificial Sequence
  derived and/or modified sequence
atggtgcaatcacggctcactgcaacctccgcctcccaagattctcctgcttcaggattacagaccccgctccagtccggccagcccttcaagttctcgatcttggagatctgcgaccgcatcaaagaagaattccagtttcttcaggctcaataccacagcctcaagctagaatgtgagaagctggccagcgagaagacggaaatgcagcgacattatgtcatgtattatgagatgtcgtacgggctcaacattgaaatgcataagcaggcggagattgtgaagcgtctgagcggtatctgcgctcagattatccccttcctgacccaggagcatcagcagcaggtgctccaggccgtagaacgcgccaagcaggtcaccgtgggggagctgaacagcctcatcgggcagcagcagctccagccgctgtcccaccacgcaccccctgtgcccctcaccccccgcccagccgggctggtgggcggcagtgctacggggctgcttgctctgtctggagccctggctgcccaggctcagctggcggcggctgtcaaggaggaccgtgcgggcgtggaggccgaggggtccagagtggagagagccccgagcaggagtgcatctccctcgccccctgagagtctcgtggaggaggagcgaccgagtggccctggtggtggcgggaagcagagagcagatgagaaggagccatcaggaccttatgaaagcgacgaagacaagagtgattacaatctggtggtggacgaggaccaaccctcagagccccccagcccggctaccaccccctgcggaaaggtacccatctgcattcctgcccgtcgggacctggtggacagtccagcctccttggcctctagccttggctcaccgctgcctagagccaaggagctcatcctgaatgaccttcccgccagcactcctgcctccaaatcctgtgactcctccccgccccaggacgcttccacccccgggcccagctcggccagtcacctctgccagcttgctgccaagccagcaccttccacggacagcgtcgccctgaggagccccctgactctgtccagtcccttcaccacgtccttcagcctgggctcccacagcactctcaacggagacctctccgtgcccagctcctacgtcagcctccacctgtccccccaggtcagcagctctgtggtgtacggacgctcccccgtgatggcatttgagtctcatccccatctccgagggtcatccgtctcttcctccctacccagcatccctgggggaaagccggcctactccttccacgtgtctgcggacgggcagatgcagccggttcccttcccctcggatgcactggtaggcgcgggcatcccgcggcacgcccggcagctgcacacgctggcccatggcgaggtggtctgcgcggtcaccatcagcggctccacacagcatgtgtacacgggcggcaagggctgtgtgaaggtgtgggacgtgggccagcctggggccaagacgcccgtggcccagctcgactgcctgaaccgagacaactacattcgttcctgcaagttgctgccggatggccggagtctgatcgtgggcggtgaggccagcaccttgtccatttgggacctggcggcgcccaccccccgtatcaaggccgagctgacttcctcagccccagcctgctacgccctggccgtcagccccgacgccaaggtttgcttctcctgctgcagcgatggcaacattgtggtctgggacctgcagaatcagactatggtcaggcagttccagggccacacggacggcgccagctgcattgatatttccgattacggcactcggctctggacagggggcctggacaacacggtgcgctgctgggacctgcgggagggccgccagctgcagcagcatgacttcagctcccagattttctccctgggccactgccctaaccaggactggctggcggtcggaatggagagtagcaacgtggagatcctgcacgtccgcaagccggagaaataccagctgcacctccacgagagctgcgtgctgtccctgaagtttgcctcctgcgtccaaggagtcgtcctcagtcctgagttgtga

SEQ ID NO: 56106 - DNA, 2346 bp, Artificial Sequence
  derived and/or modified sequence
cagaccccgctccagtccggccagcccttcaagttctcgatcttggagatctgcgaccgcatcaaagaagaattccagtttcttcaggctcaataccacagcctcaagctagaatgtgagaagctggccagcgagaagacggaaatgcagcgacattatgtcatgtattatgagatgtcgtacgggctcaacattgaaatgcataagcaggcggagattgtgaagcgtctgagcggtatctgcgctcagattatccccttcctgacccaggagcatcagcagcaggtgctccaggccgtagaacgcgccaagcaggtcaccgtgggggagctgaacagcctcatcgggcagcagcagctccagccgctgtcccaccacgcaccccctgtgcccctcaccccccgcccagccgggctggtgggcggcagtgctacggggctgcttgctctgtctggagccctggctgcccaggctcagctggcggcggctgtcaaggaggaccgtgcgggcgtggaggccgaggggtccagagtggagagagccccgagcaggagtgcatctccctcgccccctgagagtctcgtggaggaggagcgaccgagtggccctggtggtggcgggaagcagagagcagatgagaaggagccatcaggaccttatgaaagcgacgaagacaagagtgattacaatctggtggtggacgaggaccaaccctcagagccccccagcccggctaccaccccctgcggaaaggtacccatctgcattcctgcccgtcgggacctggtggacagtccagcctccttggcctctagccttggctcaccgctgcctagagccaaggagctcatcctgaatgaccttcccgccagcactcctgcctccaaatcctgtgactcctccccgccccaggacgcttccacccccgggcccagctcggccagtcacctctgccagcttgctgccaagccagcaccttccacggacagcgtcgccctgaggagccccctgactctgtccagtcccttcaccacgtccttcagcctgggctcccacagcactctcaacggagacctctccgtgcccagctcctacgtcagcctccacctgtccccccaggtcagcagctctgtggtgtacggacgctcccccgtgatggcatttgagtctcatccccatctccgagggtcatccgtctcttcctccctacccagcatccctgggggaaagccggcctactccttccacgtgtctgcggacgggcagatgcagccggttcccttcccctcggatgcactggtaggcgcgggcatcccgcggcacgcccggcagctgcacacgctggcccatggcgaggtggtctgcgcggtcaccatcagcggctccacacagcatgtgtacacgggcggcaagggctgtgtgaaggtgtgggacgtgggccagcctggggccaagacgcccgtggcccagctcgactgcctgaaccgagacaactacattcgttcctgcaagttgctgccggatggccggagtctgatcgtgggcggtgaggccagcaccttgtccatttgggacctggcggcgcccaccccccgtatcaaggccgagctgacttcctcagccccagcctgctacgccctggccgtcagccccgacgccaaggtttgcttctcctgctgcagcgatggcaacattgtggtctgggacctgcagaatcagactatggtcaggcagttccagggccacacggacggcgccagctgcattgatatttccgattacggcactcggctctggacagggggcctggacaacacggtgcgctgctgggacctgcgggagggccgccagctgcagcagcatgacttcagctcccagattttctccctgggccactgccctaaccaggactggctggcggtcggaatggagagtagcaacgtggagatcctgcacgtccgcaagccggagaaataccagctgcacctccacgagagctgcgtgctgtccctgaagtttgcctcctgcgtccaaggagtcgtcctcagtcctgagttgtgacatctccagaaataacaaatacatcgtgacaggctcgggggacaagaaggccaccgtgtatgaggtggtctactgagacatgaccccccttcctgtacccgaagtccagactcccaggggaatcagcagccaggacagacatcctagcagccgcctcccagccctgcctaggaaccgtacatcccatctgctctctggccaacggcttcacaccttcccctgctgcatgtgggggccgatgggcaggggacctcggtggaaataaaatgtatctatcacatccgc

SEQ ID NO: 56107 - protein, 621 aa, Artificial Sequence
  derived and/or modified sequence
MQRHYVMYYEMSYGLNIEMHKQAEIVKRLSGICAQIIPFLTQEHQQQVLQAVERAKQVTVGELNSLIGSASPSPPESLVEEERPSGPGGGGKQRADEKEPSGPYESDEDKSDYNLVVDEDQPSEPPSPATTPCGKVPICIPARRDLVDSPASLASSLGSPLPRAKELILNDLPASTPASKSCDSSPPQDASTPGPSSASHLCQLAAKPAPSTDSVALRSPLTLSSPFTTSFSLGSHSTLNGDLSVPSSYVSLHLSPQVSSSVVYGRSPVMAFESHPHLRGSSVSSSLPSIPGGKPAYSFHVSADGQMQPVPFPSDALVGAGIPRHARQLHTLAHGEVVCAVTISGSTQHVYTGGKGCVKVWDVGQPGAKTPVAQLDCLNRDNYIRSCKLLPDGRSLIVGGEASTLSIWDLAAPTPRIKAELTSSAPACYALAVSPDAKVCFSCCSDGNIVVWDLQNQTMVRQFQGHTDGASCIDISDYGTRLWTGGLDNTVRCWDLREGRQLQQHDFSSQIFSLGHCPNQDWLAVGMESSNVEILHVRKPEKYQLHLHESCVLSLKFASCGRWFVSTGKDNLLNAWRTPYGASIFQSKESSSVLSCDISRNNKYIVTGSGDKKATVYEVVY

SEQ ID NO: 56108 - DNA, 879 bp, Artificial Sequence
  derived and/or modified sequence
ctggcccacggcgaggtggtgtgcgccgtgaccatcagcggcagcacccagcacgtgtacaccggcggcaagggctgcgtgaaggtgtgggacgtggacggcgccgtgttcgccggccagagaggcggcgcccaccagcccatcagaaacagagacaactacatcagaagctgcaagctgctgcccgacggcagaagcctgatcgtgggcggcgaggccagcaccctgagcatctgggacctggccgcccccacccccagaatcaaggccgagctgaccagcagcgcccccgcctgctacgccctggccgtgagccccgacgccaaggtgtgcttcagctgctgcagcgacggcaacatcgtggtgtgggacctgcagaaccagaccatggtgagacagttccagggccacaccgacggcgccagctgcatcgacatcagcgactacggcaccagactgtggaccggcggcctggacaacaccgtgagatgctgggacctgagagagggcagacagctgcagcagcacgacttcagcagccagatcttcagcctgggccactgccccaaccaggactggctggccgtgggcatggagagcagcaacgtggagatcctgcacgtgagaaagcccgagaagtaccagctgcacctgcacgagagctgcgtgctgagcctgaagttcgccagctgcggcagatggttcgtgagcaccggcaaggacaacctgctgaacgcctggagaaccccctacggcgccagcatcttccagagcaaggagagcagcagcgtgctgagctgcgacatcagcagaaacaacaagtacatcgtgaccggcagcggcgacaagaaggccaccgtgtacgaggtggtgtactag

SEQ ID NO: 56109 - DNA, 1866 bp, Artificial Sequence
  derived and/or modified sequence
atgcagagacactacgtgatgtactacgagatgagctacggcctgaacatcgagatgcacaagcaggccgagatcgtgaagagactgagcggcatctgcgcccagatcatccccttcctgacccaggagcaccagcagcaggtgctgcaggccgtggagagagccaagcaggtgaccgtgggcgagctgaacagcctgatcggcagcgccagccccagcccccccgagagcctggtggaggaggagagacccagcggccccggcggcggcggcaagcagagagccgacgagaaggagcccagcggcccctacgagagcgacgaggacaagagcgactacaacctggtggtggacgaggaccagcccagcgagccccccagccccgccaccaccccctgcggcaaggtgcccatctgcatccccgccagaagagacctggtggacagccccgccagcctggccagcagcctgggcagccccctgcccagagccaaggagctgatcctgaacgacctgcccgccagcacccccgccagcaagagctgcgacagcagccccccccaggacgccagcacccccggccccagcagcgccagccacctgtgccagctggccgccaagcccgcccccagcaccgacagcgtggccctgagaagccccctgaccctgagcagccccttcaccaccagcttcagcctgggcagccacagcaccctgaacggcgacctgagcgtgcccagcagctacgtgagcctgcacctgagcccccaggtgagcagcagcgtggtgtacggcagaagccccgtgatggccttcgagagccacccccacctgagaggcagcagcgtgagcagcagcctgcccagcatccccggcggcaagcccgcctacagcttccacgtgagcgccgacggccagatgcagcccgtgcccttccccagcgacgccctggtgggcgccggcatccccagacacgccagacagctgcacaccctggcccacggcgaggtggtgtgcgccgtgaccatcagcggcagcacccagcacgtgtacaccggcggcaagggctgcgtgaaggtgtgggacgtgggccagcccggcgccaagacccccgtggcccagctggactgcctgaacagagacaactacatcagaagctgcaagctgctgcccgacggcagaagcctgatcgtgggcggcgaggccagcaccctgagcatctgggacctggccgcccccacccccagaatcaaggccgagctgaccagcagcgcccccgcctgctacgccctggccgtgagccccgacgccaaggtgtgcttcagctgctgcagcgacggcaacatcgtggtgtgggacctgcagaaccagaccatggtgagacagttccagggccacaccgacggcgccagctgcatcgacatcagcgactacggcaccagactgtggaccggcggcctggacaacaccgtgagatgctgggacctgagagagggcagacagctgcagcagcacgacttcagcagccagatcttcagcctgggccactgccccaaccaggactggctggccgtgggcatggagagcagcaacgtggagatcctgcacgtgagaaagcccgagaagtaccagctgcacctgcacgagagctgcgtgctgagcctgaagttcgccagctgcggcagatggttcgtgagcaccggcaaggacaacctgctgaacgcctggagaaccccctacggcgccagcatcttccagagcaaggagagcagcagcgtgctgagctgcgacatcagcagaaacaacaagtacatcgtgaccggcagcggcgacaagaaggccaccgtgtacgaggtggtgtactag

SEQ ID NO: 56110 - DNA, 1233 bp, Artificial Sequence
  derived and/or modified sequence
atgaccttcccccccgccctgctgccccccaaccccgtgaccccccccagacccagaaccctgcccccccccggccccgccagacccgtgaccagcgccagcctgctgcccagccagcacctgcccagaaccgccagcgtgagcagcagcgtggtgtacggcagaagccccgtgatggccttcgagagccacccccacctgagaggcagcagcgtgagcagcagcctgcccagcatccccggcggcaagcccgcctacagcttccacgtgagcgccgacggccagatgcagcccgtgcccttccccagcgacgccctggtgggcgccggcatccccagacacgccagacagctgcacaccctggcccacggcgaggtggtgtgcgccgtgaccatcagcggcagcacccagcacgtgtacaccggcggcaagggctgcgtgaaggtgtgggacgtgggccagcccggcgccaagacccccgtggcccagctggactgcctgaacagagacaactacatcagaagctgcaagctgctgcccgacggcagaagcctgatcgtgggcggcgaggccagcaccctgagcatctgggacctggccgcccccacccccagaatcaaggccgagctgaccagcagcgcccccgcctgctacgccctggccgtgagccccgacgccaaggtgtgcttcagctgctgcagcgacggcaacatcgtggtgtgggacctgcagaaccagaccatggtgagacagttccagggccacaccgacggcgccagctgcatcgacatcagcgactacggcaccagactgtggaccggcggcctggacaacaccgtgagatgctgggacctgagagagggcagacagctgcagcagcacgacttcagcagccagatcttcagcctgggccactgccccaaccaggactggctggccgtgggcatggagagcagcaacgtggagatcctgcacgtgagaaagcccgagaagtaccagctgcacctgcacgagagctgcgtgctgagcctgaagttcgccagctgcggcagatggttcgtgagcaccggcaaggacaacctgctgaacgcctggagaaccccctacggcgccagcatcttccagagcaaggagagcagcagcgtgctgagctgcgacatcagcagaaacaacaagtacatcgtgaccggcagcggcgacaagaaggccaccgtgtacgaggtggtgtactag

SEQ ID NO: 56111 - DNA, 879 bp, Artificial Sequence
  derived and/or modified sequence
cttgcccacggcgaggtggtttgcgccgtaaccattagtggctccacccagcacgtgtataccggagggaagggctgcgtgaaggtgtgggatgtagatggtgcagtgttcgcagggcagcggggaggggcacaccagcctatacgtaatagggacaactatatccgctcttgtaagctgttacccgatgggcgttcactgatagtggggggtgaagccagcactctgtcaatctgggacctggccgcccccactcctcgaataaaggccgagcttacatctagcgcccccgcgtgttacgctcttgctgtaagtcctgacgctaaagtttgcttctcatgctgcagcgacggcaatatagtggtctgggatctgcagaatcagaccatggtaagacaattccaaggacacacagacggtgcctcgtgtatcgacattagcgattacggaaccaggctgtggaccggcgggctagataacacagttcgatgctgggatctgagggagggccgtcaactgcagcaacatgatttcagctcccagatattcagcctgggtcattgtcctaaccaggattggctggccgtcggtatggaatcgagcaatgttgagattctccatgtcagaaagcccgaaaaatatcagctgcatctgcatgaatcttgcgtgctgtcattgaagtttgcttcatgcggtcggtggttcgtcagtactggcaaggataatctactgaacgcctggcggacgccttacggtgccagtatcttccagtctaaggagtcttcatctgtcctgtcctgcgacatttcccgcaacaataagtacatcgtgaccggctctggagataaaaaagcaaccgtctacgaagtggtgtattag

SEQ ID NO: 56112 - DNA, 1866 bp, Artificial Sequence
  derived and/or modified sequence
atgcagagacattatgtaatgtattatgagatgtcctacggactgaatatcgagatgcataaacaggcagaaattgtgaagcggctcagcggcatctgcgctcaaattatcccgttccttacgcaagagcatcagcagcaagtgcttcaggccgttgaaagagccaagcaggtcacagtgggcgagctcaactctctgatagggtctgcatccccctcaccgcccgagagcctggtcgaggaggagaggccatccggaccaggcggcggtggaaaacaacgggctgatgagaaggagccatcgggaccgtacgaaagcgacgaagacaagagcgactataatctggttgttgacgaggaccagccaagcgagccgcctagccccgctacaactccatgcgggaaagttcctatttgtattcccgcaaggcgcgacctggtcgacagccccgcttccttagcctccagtctggggagtccactgccccgggccaaggaattgatcctaaacgacctccccgcatctactcccgcctctaagtcttgtgattcttctcctccacaggacgccagcaccccaggtccttcgtcagcaagccacctttgccagctcgctgccaagcccgccccaagcactgatagcgtagcactccggagcccgctgaccctgtcttcccccttcacaacaagtttctccctgggtagccactctacacttaacggcgatttgagcgtgcccagctcttacgttagcttgcatctttcaccccaagtttccagcagcgttgtctatggtcggtcccccgtaatggcatttgagtcacatccacacctacggggctcctcagtcagctctagcctgccatccatcccgggtggcaagccggcttattccttccatgtttctgcggacgggcagatgcagcctgttccattccccagcgatgcacttgtcggagccgggattccacgccacgccaggcagctccacaccctggcacatggcgaagtggtatgcgcagtcaccattagtgggtccacccaacatgtgtatacgggcggtaaaggctgcgttaaagtgtgggatgtcgggcagcccggggctaagacaccagtggcccaactcgactgcctgaatagggataattatatccgcagttgcaaactgctaccggatgggaggagtctgatagttggaggagaggcttctacccttagcatttgggatcttgcagccccgacaccaaggattaaagcagaactcactagctctgcacccgcctgttacgccttagcagtgtctccggacgctaaagtgtgctttagttgctgctccgacggcaatattgtagtgtgggatcttcagaatcagacaatggttaggcaattccaggggcacacagatggggcatcgtgtatcgacattagcgattatggcacaaggctgtggactggcggcctggataatactgtcagatgttgggatctacgtgaaggaagacaacttcaacagcacgatttttcctcgcagatattctctctaggacactgccccaatcaggactggctcgcagtagggatggagagctcgaatgtagaaatcctgcatgtgcgcaagcccgagaagtatcagttgcacttgcacgagtcgtgcgtcctctcgctgaaatttgcgagttgcgggcggtggttcgtttctaccggcaaagataatctcttgaacgcctggcggaccccgtatggggcgtccattttccagtctaaggaaagcagctcagtactctcatgcgacatatcacgtaataacaaatacatcgtcacaggcagcggcgataagaaagcaactgtttatgaggtcgtatactag

SEQ ID NO: 56113 - DNA, 1233 bp, Artificial Sequence
  derived and/or modified sequence
atgaccttcccccctgcactgttaccccccaatccagtaactcctccgagaccaagaaccttgccacccccaggcccggcacgacccgtgacctctgcaagtctgctaccaagccagcacctaccccgtaccgctagcgtctcttcttcagtggtctacggaagatcgccggtgatggcctttgagagtcacccgcatttgcgcggctctagcgtcagctccagcctgccttccattcccggagggaagcccgcatacagcttccatgtgtctgccgacggccagatgcagccagttccattccctagtgatgccttggttggagccgggatccctagacacgcaaggcagctgcatactctggcgcatggagaggtcgtttgtgcagtcactatctccggcagcacccaacatgtgtatacgggaggtaaaggttgcgtgaaggtttgggacgtcgggcagcccggcgccaaaacacccgtagcacagctggattgcctgaacagggataactatatcagaagctgcaaacttttgcctgatggacggagtttaatcgtcgggggggaggctagtacactgtctatatgggatctagcagctccaacgccccgcatcaaggccgaattgacatccagcgcacccgcatgctatgcattggccgtgagcccagacgcaaaggtatgtttctcatgctgttcagacggtaatatagtcgtctgggatctgcaaaatcagacaatggtgcggcagtttcagggccacactgacggggcctcatgcatcgacatctcagattacgggacgcggctttggaccggaggccttgacaacaccgtacgatgttgggacctgagagaggggcggcagctgcagcagcacgacttctcttctcagattttctcgctggggcactgtcctaatcaggattggctggctgtcggcatggaatcatccaatgtcgagatcctgcatgtgaggaaacccgaaaagtatcagctacatttacacgaatcttgcgttctgagcctgaagttcgcttcatgtggacgatggttcgtgagcacaggcaaagacaatcttctgaatgcctggaggacaccatatggcgcctccatcttccagagtaaagagtcctccagtgtgctgtcatgcgacattagccgcaacaacaagtacattgttaccggatcaggggataaaaaggccaccgtgtacgaggttgtgtactag

SEQ ID NO: 56114 - DNA, 1866 bp, Artificial Sequence
  derived and/or modified sequence
atgcagcgccactacgtgatgtattatgaaatgtcttatggactgaacatcgagatgcacaaacaggccgagatagtgaagcgcctgtcagggatttgcgcccagatcatcccgttccttacccaagagcatcaacagcaggtccttcaggccgtggaacgggccaaacaggtgactgtgggtgaactaaattccctgatcggatctgcgtctccgtctccaccagagagcttggtcgaagaggaaagaccctcagggccaggcgggggtgggaaacagcgagccgacgagaaagagccctccgggccatatgaaagtgacgaagacaaaagtgattacaacctggtcgtggatgaggatcaaccaagtgagcctccaagccccgctacgaccccatgtggcaaggtgcccatatgcattccagccaggagggatctcgtggactcccccgccagcctagctagctcattgggcagtcccctccctcgggccaaggagcttattctgaatgatctgcccgcttcaacacccgcatccaagagttgcgatagctcacccccacaagatgcttctaccccaggccccagttcagccagtcacctttgccaactggcagcaaaaccagccccatctactgactccgtggctctcagatcaccactgactctgagttctcctttcacaacatcttttagcttgggttcacacagtactttgaatggtgatttgtccgtcccatcaagctatgtgagtctgcatttgtctccacaggtgagtagcagtgttgtgtacgggaggtctcccgtgatggcatttgaatcccaccctcacctgaggggttcctctgtgagctcttcgctcccgtctatccccggtggcaagccagcatacagctttcatgtgagcgccgatggacagatgcaacctgtcccattcccttctgatgccctggtgggcgcaggaatacctagacatgcacgccagcttcatacactggctcatggagaagtcgtgtgcgccgtgaccatctctggaagtactcagcatgtctataccgggggcaagggatgcgtcaaggtctgggacgttggacagccaggagctaaaactccagtggcccagttggattgtttaaaccgggataactacatccgatcctgtaaactactccccgacggtcggagtttaattgtgggcggggaagcgtctacactcagtatttgggatctcgcggctcccactccgcggatcaaagctgagctgacatcttccgctcctgcttgctatgcactggctgtatctcctgatgccaaagtctgcttttcttgctgttccgacggcaatatcgtggtgtgggatctgcagaatcaaacgatggtgagacagttccaaggacacactgacggggcttcatgtatcgacatatctgattatggcactcggttatggaccggagggctggacaacacagtccgctgttgggacttgcgtgaaggacggcaattacagcagcatgatttttcctcacagattttctctttgggacactgccctaatcaggattggttagctgtcggaatggagagttccaacgtggaaattttacacgtacgtaaacctgaaaagtatcagttgcatctgcatgagagttgtgtgcttagtcttaagttcgccagctgtggacggtggttcgtgtctacagggaaagacaacctgttaaacgcttggaggactccttacggtgcttctatcttccagtccaaggagagcagctctgtgctgtcatgtgacattagtagaaacaacaaatatatcgtgaccgggtccggggataagaaggccaccgtgtatgaggtggtttattag

SEQ ID NO: 56115 - DNA, 879 bp, Artificial Sequence
  derived and/or modified sequence
ctggcccatggagaggtggtgtgtgctgtgaccatcagcggcagcacccagcacgtgtacacaggaggcaagggctgtgtgaaggtgtgggatgtggatggagctgtgtttgctggccagaggggcggggcccaccagcccatccggaacagagacaactacatccgcagctgcaagctgctgcctgatggccgcagcctcatcgtgggcggggaggccagcaccctgagcatctgggacctggccgcccccaccccccgcatcaaggccgagctgaccagcagcgccccagcctgctacgccctggccgtgtccccagatgccaaggtgtgcttcagctgctgcagtgatggcaacatcgtggtgtgggacctgcagaaccagaccatggtgcggcagttccagggccacacagatggagccagctgcatcgacatcagtgactatggcacccggctgtggacaggaggcctggacaacacagtgcgctgctgggacctgcgggagggccggcagctgcagcagcacgacttcagcagccagatcttcagcctgggccactgccccaaccaggactggctggccgtgggcatggagagcagcaatgtggagatcctgcacgtgaggaagccagagaagtaccagctgcacctgcacgagagctgtgtgctgagcctgaagtttgccagctgtggccgctggtttgtgtccacaggcaaggacaacctgctgaatgcctggaggaccccctatggagccagcatcttccagagcaaggagagcagctctgtgctgagctgtgacatcagcaggaacaacaagtacatcgtgacaggcagcggggacaagaaggccaccgtgtatgaggtggtgtactag

SEQ ID NO: 56116 - DNA, 1866 bp, Artificial Sequence
  derived and/or modified sequence
atgcagaggcactacgtgatgtactatgagatgtcctatggcctgaacatcgagatgcacaagcaggccgagatcgtgaagaggctgagcggcatctgtgcccagatcatccccttcctgacccaggagcaccagcagcaggtgctgcaggccgtggagcgggccaagcaggtgacagtgggggagctgaacagcctgattggcagcgccagccccagccccccagagagcctggtggaggaggagcggcccagcggccctgggggcggcggcaagcagagagcagatgagaaggagcccagcggcccctatgaaagtgatgaggacaagagtgactacaacctggtggtggatgaggaccagcccagcgagccccccagccctgccaccaccccctgtgggaaggtgcccatctgcatcccagcccggcgggacctggtggacagccctgccagcctggccagcagcctgggcagccccctgccccgggccaaggagctgatcctgaatgacctgcctgccagcaccccagccagcaagagctgtgacagcagccccccccaggatgccagcaccccaggccccagcagcgccagccacctgtgccagctggccgccaagccagcccccagcacagacagcgtggccctgcggagccccctgaccctgagcagccccttcaccaccagcttcagcctgggcagccacagcaccctgaatggagacctgtctgtgcccagcagctatgtgtccctgcacctgagcccccaggtgagcagctctgtggtgtatggccgcagccctgtgatggcctttgagagccacccccacctgcggggcagctctgtgagcagcagcctgcccagcatccctgggggcaagccagcctacagcttccacgtgtctgcagatggccagatgcagcctgtgcccttccccagtgatgccctggtgggcgccggcatccccaggcatgcccggcagctgcacaccctggcccacggggaggtggtgtgtgctgtgaccatcagcggcagcacccagcacgtgtacacaggaggcaagggctgtgtgaaggtgtgggatgtgggccagcccggggccaagacccctgtggcccagctggactgcctgaacagagacaactacatccgcagctgcaagctgctgcctgatggccgcagcctgattgtgggcggggaggccagcaccctgagcatctgggacctggccgcccccaccccccgcatcaaggccgagctgaccagcagcgccccagcctgctacgccctggccgtgtccccagatgccaaggtgtgcttcagctgctgcagtgatggcaacatcgtggtgtgggacctgcagaaccagaccatggtgcggcagttccagggccacacagatggagccagctgcatcgacatcagtgactatggcacccggctgtggacaggaggcctggacaacacagtgcgctgctgggacctgcgggagggccggcagctgcagcagcacgacttcagcagccagatcttcagcctgggccactgccccaaccaggactggctggccgtgggcatggagagcagcaatgtggagatcctgcacgtgaggaagccagagaagtaccagctgcacctgcacgagagctgtgtgctgagcctgaagtttgccagctgtggccgctggtttgtgtccacaggcaaggacaacctgctgaatgcctggaggaccccctacggggccagcatcttccagagcaaggagagcagctctgtgctgagctgtgacatcagcaggaacaacaagtacatcgtgactggaagtggggacaagaaggccaccgtgtatgaggtggtgtactag

SEQ ID NO: 56117 - DNA, 1233 bp, Artificial Sequence
  derived and/or modified sequence
atgaccttccccccagccctgctgccccccaaccctgtgaccccaccccggcccaggaccctgcccccacctggccctgcccggcctgtgaccagcgccagcctgctgcccagccagcacctgcccaggacagcctctgtgagcagctctgtggtgtatggccgcagccctgtgatggcctttgagagccacccccacctgcggggcagctctgtgagcagcagcctgcccagcatccctgggggcaagccagcctacagcttccacgtgtctgcagatggccagatgcagcctgtgcccttccccagtgatgccctggtgggcgccggcatccccaggcatgcccggcagctgcacaccctggcccatggagaggtggtgtgtgctgtgaccatcagcggcagcacccagcacgtgtacacaggaggcaagggctgtgtgaaggtgtgggatgtgggccagcccggggccaagacccctgtggcccagctggactgcctgaacagagacaactacatccgcagctgcaagctgctgcctgatggccgcagcctcatcgtgggcggggaggccagcaccctgagcatctgggacctggccgcccccaccccccgcatcaaggccgagctgaccagcagcgccccagcctgctacgccctggccgtgtccccagatgccaaggtgtgcttcagctgctgcagtgatggcaacatcgtggtgtgggacctgcagaaccagaccatggtgcggcagttccagggccacacagatggagccagctgcatcgacatcagtgactatggcacccggctgtggacaggaggcctggacaacacagtgcgctgctgggacctgcgggagggccggcagctgcagcagcacgacttcagcagccagatcttcagcctgggccactgccccaaccaggactggctggccgtgggcatggagagcagcaatgtggagatcctgcacgtgaggaagccagagaagtaccagctgcacctgcacgagagctgtgtgctgagcctgaagtttgccagctgtggccgctggtttgtgtccacaggcaaggacaacctgctgaatgcctggaggaccccctatggagccagcatcttccagagcaaggagagcagctctgtgctgagctgtgacatcagcaggaacaacaagtacatcgtgacaggcagcggggacaagaaggccaccgtgtatgaggtggtgtactag

SEQ ID NO: 56118 - DNA, 879 bp, Artificial Sequence
  derived and/or modified sequence
ctggcccacggcgaggtggtgtgcgccgtgaccatcagcggcagcacgcagcacgtatatactgggggcaagggctgtgtcaaggtctgggatgtggatggtgctgtgtttgccggccagcgaggcggtgcacatcagcctatcagaaatagggacaactatatacgaagctgcaaacttctgccagacggacgttcactcatcgtgggcggggaggcttctaccctgagcatctgggaccttgccgctcccacgcccaggataaaagctgagctgacctcctccgcgcccgcctgttacgcactggccgtatcaccagatgcaaaggtatgtttcagttgttgtagcgacggtaatatcgtagtgtgggacttgcaaaaccagactatggtcaggcagtttcaagggcataccgacggagcttcctgcattgatatttcggattacggcacaaggctctggactgggggcttggataatacagtgcggtgttgggacctgcgggagggtcgtcaactgcaacagcatgacttctcatcacagattttctccctgggtcactgtcccaatcaggattggctggccgtgggaatggaaagcagcaacgttgaaatcttacatgttcgtaagcctgagaaataccagctccacctgcatgagtcttgcgtgctctctctgaaattcgcttcttgcggtaggtggttcgtgagcaccggcaaagacaacctcctaaatgcgtggagaacaccctacggcgcaagcatttttcagagcaaagaatcatcctcagtcctttcatgcgacataagtagaaacaataagtacattgtgaccgggagcggcgataagaaggcaactgtgtacgaggtggtctattag

SEQ ID NO: 56119 - DNA, 1866 bp, Artificial Sequence
  derived and/or modified sequence
atgcagcggcactacgtgatgtactacgagatgagctacggcctgaatattgaaatgcataagcaagccgaaattgttaaaagattaagcggcatttgcgcgcagatcattccatttctgacacaggaacaccagcaacaggtcctgcaagcggttgagagggccaagcaggtgacagtgggtgagcttaattcattgattgggagcgcctccccaagtccgcccgagagtctggtggaggaggaacgtccttctggccccggcggagggggaaagcagagagccgatgaaaaagagcctagtgggccatatgaaagcgacgaggataaatccgattacaatcttgtggtagatgaggaccaaccgtccgagccaccttcccctgccactacaccctgtggcaaggtgcccatatgtatccctgcccgccgcgaccttgtcgacagccctgccagcttggctagttcgcttgggtccccactcccacgagccaaggagttgatactgaacgatcttccggcttctactcccgctagcaagagctgtgatagctcacccccacaggacgcgagcacccccggaccaagcagcgcatcacacctctgccagcttgctgcgaagccggccccttctacggatagcgtggccctgcgtagcccgctcaccctctcgtccccattcaccacctctttcagtctcggttctcacagcacccttaacggagatttgtcagtcccctcctcctacgtgagtcttcacctgtcacctcaggtgtcaagcagcgtggtctatgggcgaagccctgtcatggcattcgaaagccacccccatcttaggggtagtagcgtcagcagtagtctgccatccataccaggcggtaaaccagcttactcgtttcatgtgtctgccgacgggcagatgcaaccagtgcctttcccctccgacgctcttgtaggggctggcatccctaggcacgcccgtcaactgcatactctcgcacacggcgaagttgtttgtgccgtaaccatctctgggtcaacccaacacgtatacaccggcggcaagggatgcgtaaaggtgtgggatgtcgggcaaccaggggcaaaaactccagtggcacagctggactgtctgaatagggacaattatattagaagctgtaagctgctgcccgacggtcgctccctgattgttggcggagaggcaagcactctgtcgatctgggacttggcggccccgacgcctcgcatcaaagccgagctgactagttccgctcctgcttgttatgccctcgccgtgtccccagacgcgaaggtgtgttttagctgctgctccgatgggaacattgttgtatgggatctgcagaaccagaccatggtccggcagtttcaaggccatactgacggggcatcctgtatcgacatttcagactacggtacgaggctatggactggcggtcttgataacacagtcaggtgctgggacctgagagaagggcggcaactccagcagcatgatttttcttcacaaatcttttccctagggcactgtcccaatcaagactggctagcagtggggatggaatcaagcaacgtcgaaattctgcacgtgaggaaacctgaaaagtaccagcttcacctccatgaaagctgcgtgctgtccttaaaatttgcgagttgtggccgctggtttgtatcaaccggaaaggataacctgcttaacgcgtggcggactccatacggggccagtatcttccagagtaaggagtcttcctccgtgctgtcatgcgatatttctagaaataacaaatacatagtcaccggctcgggtgataaaaaagcaacagtgtacgaggtggtatattag

SEQ ID NO: 56120 - DNA, 1233 bp, Artificial Sequence
  derived and/or modified sequence
atgaccttcccccccgccctgctgccccccaaccccgtgacccccccccggcctcgcacgctgcctcccccgggccctgcacggcccgtaacaagcgcttccttattaccaagtcagcacctcccacgaacagctagtgtgtcatcatctgtcgtgtatgggcgctcccccgttatggcctttgagtcacatcctcatctgcgtggctcgtctgtatctagcagcctacctagcatcccaggcgggaagcccgcctatagctttcacgtgtccgcagatggccagatgcagccggttccatttcctagtgatgcgctggtgggtgctggcattcctagacacgctcgccagctgcataccctagcccatggtgaagtggtctgtgcagtcactatttcagggagcactcagcatgtctacaccggaggcaaaggctgtgttaaggtttgggacgtgggacaacctggtgccaagaccccagtggcccagctggactgcttgaatcgggacaactacatcaggagctgcaagttgcttcccgacggccggagtctaatcgtgggcggcgaggccagcactctgagcatttgggacctggcagccccaacaccgcgcatcaaggcagaattgactagctcagcccccgcctgttacgctctggccgtgagccccgatgcaaaggtctgcttcagctgctgttctgacggcaatattgtggtgtgggacttgcagaaccagactatggtgagacaatttcaggggcacaccgatggcgccagctgcatcgacatttctgattacggaacccgactgtggacaggaggacttgacaacacagttcgatgctgggatctcagagaagggaggcaactacagcagcacgatttctccagccagatattttctctaggacattgtcctaaccaggattggctcgccgtgggtatggaatccagcaacgtagaaattttgcacgtgcggaaacccgagaagtatcagctgcacttacacgagtcttgcgtcctgagtctgaaattcgccagctgtgggaggtggttcgtctctacaggtaaggacaacctcctgaacgcctggagaacaccttatggggcttcaatctttcagagcaaagaatcaagctccgtgctgagttgcgatattagccggaataataagtacattgtcacaggttctggtgataagaaagccacagtatacgaggtggtctattag

SEQ ID NO: 56121 - DNA, 1866 bp, Artificial Sequence
  derived and/or modified sequence
atgcagcggcactacgtgatgtactacgagatgagctacggcctgaacatcgagatgcataaacaggcagaaatcgtgaagcgcctaagtggaatttgtgctcaaatcatcccattcttaactcaggagcatcaacaacaggtcctccaggcagtcgagcgggccaaacaggtcaccgtgggggagttgaatagcctgattggcagcgctagcccttccccaccggaaagcctcgtagaggaagaaagaccaagcgggcctgggggggggggaaaacaaagggccgacgagaaggagcccagtggtccttacgagtcagatgaggataagtctgattacaatcttgtggtggatgaagaccagcctagcgagccaccctctccagccacgactccgtgtggaaaagttcccatctgcatccctgctcggcgagacctagttgatagccctgccagcttggctagcagcctcggctcacctctgccccgagccaaggagcttattctgaacgacctgccggccagtacaccagcgtctaagagttgcgattctagcccgccacaggacgcatctactccaggacccagctctgccagtcacctgtgtcagctagccgctaaaccagctccatccaccgattctgtcgctctcaggtctccacttacccttagctctccttttacaacctctttctctctgggctctcacagtactctgaatggagacctgtcagtgccgtcttcatacgtgagtctccacctctccccacaggtctcaagctcggtagtgtatggccgcagtcctgtgatggcctttgaaagtcatccacatttgagaggctcatctgtgtcttcgtctctcccatccattccagggggaaaacctgcctattctttccatgtttcagccgatggtcagatgcagcctgtgccttttccgtccgacgcgctcgtcggcgctggcattccccgccacgcccgccagttgcacaccctggcgcacggcgaggtggtctgtgccgtgacaatttcagggagcacccagcacgtctatacaggaggcaagggatgcgtcaaagtgtgggatgtggggcaacccggcgccaagacacccgtcgcacagctggactgccttaatagagataactatatccgcagctgtaagctgcttcctgatgggcgctctctgatcgtcggcggtgaagcatcgactctctccatttgggacctcgccgcccccacacctcgcatcaaagcggagcttacaagctccgccccagcttgctacgccctggcagtttcccctgatgctaaagtgtgttttagttgctgttccgatggaaacattgttgtatgggacctgcagaatcagactatggtgagacagtttcaggggcacaccgatggggcctcgtgcatagatataagcgattacgggacccggctgtggacgggcggcttggacaacactgttcgttgttgggatctgagagaaggaagacagctccagcagcacgacttctcatctcaaatattctcccttggccactgccccaaccaagactggcttgccgtcggtatggaatcgtcgaacgttgaaatcttgcacgtgcgcaaacccgagaaataccagttacacctgcacgaatcctgtgtcctgtccctgaaattcgctagctgcggtagatggttcgtatccacaggaaaagacaatctgcttaacgcctggaggacaccttacggcgctagcatatttcagtcaaaagaatccagctccgtactcagctgcgacatttcccgcaataacaagtatattgtgaccgggtcgggggacaaaaaggccacagtctacgaggtggtttactag

SEQ ID NO: 56122 - DNA, 879 bp, Artificial Sequence
  derived and/or modified sequence
ctggcacatggagaagtcgtgtgtgctgtgactatcagcggctccacacaacatgtatacacagggggaaaaggctgtgtgaaagtctgggatgtagacggcgctgttttcgcaggccagcgcggaggggctcaccaaccgattcgcaatagggacaactacatccggtcttgtaaattactacccgacggaagatctttgatcgtggggggtgaggcgagcacgctatccatctgggatttggccgctcccacccctcgaatcaaagccgagctaacgtcttccgctcccgcttgttatgctctggccgtatcaccagacgctaaggtctgcttttcctgctgttcagacggtaatatcgtcgtctgggacctgcagaaccagactatggttcggcaattccaaggacacacggatggcgcttcctgcatagacatcagtgactacggtacgcgtctgtggacaggcggacttgataacaccgtccgatgttgggacctgcgggaaggacggcagctccaacaacatgactttagttcccagatcttctctctcggccactgcccaaatcaggactggctagccgtcgggatggaaagttcaaatgtggagatcctgcatgtacgcaagccggagaaatatcaactacacttgcacgaatcttgcgtgttatccctaaagttcgcctcctgcggacggtggtttgtgtccactgggaaggacaatctgctgaatgcctggaggactccctatggagcatccatcttccagtccaaagaaagcagcagtgtcctttcctgtgacatcagtagaaacaacaagtacatcgttaccggatccggcgataaaaaagccacagtgtatgaggtagtgtattag

SEQ ID NO: 56123 - DNA, 1866 bp, Artificial Sequence
  derived and/or modified sequence
atgcagcgacactacgttatgtactacgagatgtcatacggcctgaacatcgaaatgcacaagcaggcagagatagtgaaacgtctttctggcatttgcgcccaaattatcccgttcctaacacaggagcaccagcagcaggtcctgcaagcagtagagcgagcaaagcaggtgaccgtcggagagctgaattctcttattgggtctgcttccccttctccaccggaaagccttgtggaagaagagcgtccttccgggcctggaggaggaggcaagcagagggctgatgagaaggagcctagcggaccttacgagagcgacgaggacaagtccgactataatctggtggttgatgaagatcagccatcagaaccccctagccccgcaaccacaccctgcggcaaggttcctatctgcatacctgcgaggcgagacctggttgattctccggcttctctggcctcatctctcggctcccctcttcctcgcgctaaagaattaattctcaacgatttgccggcttcgaccccagcctcgaagtcctgtgacagttccccaccccaggacgcctcaaccccaggaccttcctccgcttcacacctctgccaactagcggctaagccagcacccagcacagactcggtggctcttaggagccctctgaccttgagcagtccatttactactagtttctccctcggcagtcattcaactttgaacggggacttgtcagtaccatcatcctacgtgagcctgcacttatctccccaggttagctcaagtgtggtgtacggacggtcacctgtcatggctttcgaaagccatccccatttacgcggttcttctgtatctagcagcctgccctctattcctggaggcaagcccgcatacagtttccacgtttctgccgatggccaaatgcagccagtcccgtttccttctgacgctctggtcggagcgggaattcccagacatgcgcgtcagctccatacgctggcacatggagaagttgtctgcgctgtgacaatttccggatccacacaacacgtttataccggcggaaaaggctgcgtcaaggtctgggatgtggggcaacccggagctaaaacaccagtggcccaactcgactgtttgaaccgggataattatatccggagctgcaaactgcttcctgatggtaggagcttgattgttggaggcgaggcatccactctttccatctgggatctggcagcgcctactcctcgcatcaaagccgaactcacatcaagcgctccggcatgctatgccttggccgtatcacctgacgccaaggtgtgcttttcatgttgtagtgatgggaatatcgtcgtttgggacctacagaatcagactatggtgcgtcaattccagggacatacagacggcgcttcctgcattgatatctcagattatggaactagattatggacaggcggtttagataatacggtgcggtgttgggacctgcgggagggtcgacagttacagcagcacgatttttctagtcaaatcttctctctcggtcattgccccaatcaggactggttagccgtaggcatggaatcttctaatgtcgaaattcttcacgtacgcaagccagagaagtaccagctgcacctgcacgagagttgcgtgttgagcttgaagttcgcatcatgtgggagatggttcgtgagcacaggcaaagacaacctgctcaacgcatggcgcacaccatacggagccagcatcttccagtccaaggagagttcttcagtcctgtcatgcgatatctctcggaacaacaagtatatagtcaccggcagcggtgataaaaaggcaacagtttatgaggttgtttattag

SEQ ID NO: 56124 - DNA, 1233 bp, Artificial Sequence
  derived and/or modified sequence
atgacttttccacccgctctcctccctcctaatccagtcactcctccaagacctcgcactctgccccctccagggccagctcgcccagtcaccagcgcctctttgttaccttctcagcatttgccacggaccgcctcggttagttctagtgttgtgtatgggaggagccctgttatggcctttgagagccatccccacctccggggttcctcggtgagctcgagcctgccatccatccctgggggaaaacccgcttactcattccacgtgtcggccgacgggcaaatgcagccagttccctttcctagcgacgccttggtcggggcaggcatccctcgacacgcgaggcagcttcataccctcgctcacggcgaagtcgtgtgcgctgtgactatctctggatctactcagcacgtttatactggtggcaaaggctgcgtgaaagtttgggacgtcggacaaccgggtgccaaaacacctgtcgctcagctggattgtctcaacagagataattatatcagaagctgcaagctgctcccagatggcaggtccctgattgtcggaggagaggccagcacactgagtatctgggacctcgccgcacccacaccacgtattaaggctgagctcacatctagcgcgccagcgtgttatgctctcgctgtgagtcccgatgccaaggtgtgcttctcttgttgctccgacggaaatattgtggtgtgggatttacagaatcaaaccatggtgcgccagtttcagggtcacactgatggcgcatcgtgcatcgacatcagcgactatggtacacgactttggacaggaggcctcgacaacacagttaggtgctgggatctgagagagggccgtcagctacaacagcacgatttcagcagccagatattttctctgggtcattgtcctaatcaggattggctcgccgtgggaatggagagtagcaacgtggaaattctgcacgttcggaagccggagaaataccagctccaccttcacgaatcttgtgtgctttccttgaagttcgcttcatgtggtaggtggtttgtttcaactggaaaggacaatctgttgaatgcttggagaacgccctacggggcatccatttttcagagcaaggaatccagcagcgtcttatcttgcgatatcagtcgaaacaacaaatacattgtgaccggctccggggataaaaaggcgacggtctacgaggtggtgtactag

SEQ ID NO: 56125 - DNA, 1866 bp, Artificial Sequence
  derived and/or modified sequence
atgcagagacactacgtgatgtattatgagatgtcatacgggctgaatatcgaaatgcataaacaggcagagattgtgaagaggctttccggaatttgcgctcagattattcctttcctgacccaggagcaccaacaacaggtgctgcaggcagtggagcgcgcaaaacaggtgacagtgggtgagttgaatagccttattggatcagcctcaccaagcccaccagagtctctggtagaagaggagagaccaagtggaccgggagggggtggaaagcagcgagcggacgagaaagaaccctcaggtccttacgagtcagacgaagacaaaagcgattataatctagtggtggacgaggatcagccctcggagccaccttccccagcaactacaccctgcggcaaggttccaatatgcatccctgcacgcagagacttggttgatagccccgctagtctggcatccagcctgggttcacctcttccacgggctaaagagcttatactcaatgacttaccggcttcaaccccagcctccaaatcttgtgattcttcccctcctcaggatgcgagcacaccaggcccttctagcgcaagccatctttgccaactcgctgcaaaacccgctccctccacagactctgtggcgctgaggagccctctgaccctctccagcccctttactaccagcttctcattgggttcccactccacattaaacggggacttgagcgtacccagttcatacgtgtccctccatctctcacctcaggtgagcagttctgttgtgtacggacgaagtcctgtcatggccttcgaatcccacccacacttgcgtggctcttcggtgagttcttccctgccatcgatccctggaggcaagccagcttattctttccacgtctcggctgatggacagatgcaacccgtacccttcccatccgacgcgttggtgggtgcagggataccaaggcatgccaggcaactacatactctggctcatggcgaggttgtctgtgcagtgacgataagcggatctactcaacatgtgtacaccggcggaaagggatgcgttaaagtctgggatgtgggccagccgggagctaaaacccccgttgcccagctagattgtctaaaccgggacaattacatcagatcatgtaaactcctgcccgatgggcgttcactgattgtcggcggagaggcttccaccttgtccatctgggacctcgctgccccaacacctaggataaaggccgaactgacttcaagcgcgcctgcttgttacgcattggcagtgagtcccgacgccaaggtgtgcttttcgtgttgctctgatggcaacattgtggtctgggacctccagaatcaaacaatggtgaggcaatttcaaggacatacagacggcgctagttgcattgatatctccgactacggaacacgactgtggaccggcggactcgataacacggtgcgatgctgggacttgagggagggtaggcagctgcaacagcatgatttttccagccaaatattctcactcggccattgtcctaatcaggattggctggctgtggggatggagtctagtaacgtcgaaatcctgcacgtcaggaagcccgagaaataccaactgcatctccacgaaagctgcgtcctgagtctcaagtttgcatcatgtggaagatggttcgtgtcaaccggcaaagacaacctgttgaatgcctggagaactccttatggcgcatctatcttccagtccaaggaaagttctagcgtactttcgtgtgatattagtcggaacaacaagtacattgtaactggaagtggagataaaaaagccaccgtgtatgaagtggtctactag

SEQ ID NO: 56126 - DNA, 1088 bp, Artificial Sequence
  derived and/or modified sequence
ctggcccatggcgaggtggtctgcgcggtcaccatcagcggctccacacagcatgtgtacacgggcggcaagggctgtgtgaaggtgtgggacgtggatggggcagtgtttgcaggtcaaaggggcggggctcaccagccaatcaggaaccgagacaactacattcgttcctgcaagttgctgccggatggccggagtctgatcgtgggcggtgaggccagcaccttgtccatttgggacctggcggcgcccaccccccgtatcaaggccgagctgacttcctcagccccagcctgctacgccctggccgtcagccccgacgccaaggtttgcttctcctgctgcagcgatggcaacattgtggtctgggacctgcagaatcagactatggtcaggcagttccagggccacacggacggcgccagctgcattgatatttccgattacggcactcggctctggacagggggcctggacaacacggtgcgctgctgggacctgcgggagggccgccagctgcagcagcatgacttcagctcccagattttctccctgggccactgccctaaccaggactggctggcggtcggaatggagagtagcaacgtggagatcctgcacgtccgcaagccggagaaataccagctgcacctccacgagagctgcgtgctgtccctgaagtttgcctcctgcggacggtggtttgtgagcaccgggaaggacaacctgctcaacgcctggaggacgccgtacggggccagcattttccagtccaaggagtcgtcctcagtcctgagttgtgacatctccagaaataacaaatacatcgtgacaggctcgggggacaagaaggccaccgtgtatgaggtggtctactgagacatgaccccccttcctgtacccgaagtccagactcccaggggaatcagcagccaggacagacatcctagcagccgcctcccagccctgcctaggaaccgtacatcccatctgctctctggccaacggcttcacaccttcccctgctgcatgtgggggccgatgggcaggggacctcggtggaaataaaatgtatctatcacatccgc

SEQ ID NO: 56127 - protein, 438 aa, Artificial Sequence
  derived and/or modified sequence
MCPKNASYYGNRAATLMMLGRFREALGDAQQSVRLDDSFVRGHLREGKCHLSLGNAMAACRSFQRALELDHKNAQAQQEFKNANAVMEYEKIAETDFEKRDFRKVVFCMDRALEFAPACHRFKILKAECLAMLGRYPEAQSVASDILRMDSTNADALYVRGLCLYYEDCIEKAVQFFVQALRMAPDHEKACIACRNAKALKAKKEDGNKAFKEGNYKLAYELYTEALGIDPNNIKTNAKLYCNRGTVNSKLRKLDDAIEDCTNAVKLDDTYIKAYLRRAQCYMDTEQYEEAVRDYEKVYQTEKTKEHKQLLKNAQLELKKSKRKDYYKILGVDKNASEDEIKKAYRKRALMHHPDRHSGASAEVQKEEEKKFKEVGEAFTILSDPKKKTRYDSGQDLDEEGMNMGDFDPNNIFKAFFGGPGGFSFEASGPGNFFFQFG

SEQ ID NO: 56128 - protein, 948 aa, Artificial Sequence
  derived and/or modified sequence
MTGQARFHRGAEACRAIRQCRSRRPRAAHPEGRAGSGRGSRHASPGVRRGGFSLLLLNLEEYYFEQHRANHILHKGSHHERKIRGSLKICSKSVIFEPDSISQPIIKIPLRDCIKIGKHGENGANRHFTKAKSGGISLIFSQVYFIKEHNVVAPYKIERGKMEYVFELDVPGKVEDVVETLLQLHRASCLDKLGDQTAMITAILQSRLARTSFDKNRFQNISEKLHMECKAEMVTPLVTNPGHVCITDTNLYFQPLNGYPKPVVQITLQDVRRIYKRRHGLMPLGLEVFCTEDDLCSDIYLKFYEPQDRDDLYFYIATYLEHHVAEHTAESYMLQWQRGHLSNYQYLLHLNNLADRSCNDLSQYPVFPWIIHDYSSSELDLSNPGTFRDLSKPVGALNKERLERLLTRYQEMPEPKFMYGSHYSSPGYVLFYLVRIAPEYMLCLQNGRFDNADRMFNSIAETWKNCLDGATDFKELIPEFYGDDVSFLVNSLKLDLGKRQGGQMVDDVELPPWASSPEDFLQKSKDALESNYVSEHLHEWIDLIFGYKQKGSDAVGAHNVFHPLTYEGGVDLNSIQDPDEKVAMLTQILEFGQTPKQLFVTPHPRRITPKFKSLSQTSSYNASMADSPGEESFEDLTEESKTLAWNNITKLQLHEHYKIHKEAVTGITVSRNGSSVFTTSQDSTLKMFSKESKMLQRSISFSNMALSSCLLLPGDATVITSSWDNNVYFYSIAFGRRQDTLMGHDDAVSKICWHDNRLYSASWDSTVKVWSGVPAEMPGTKRHHFDLLAELEHDVSVDTISLNAASTLLVSGTKEGTVNIWDLTTATLMHQIPCHSGIVCDTAFSPDSRHVLSTGTDGCLNVIDVQTGMLISSMTSDEPQRCFVWDGNSVLSGSQSGELLVWDLLGAKISERIQGHTGAVTCIWMNEQCSSIITGGEDRQIIFWKLQY

SEQ ID NO: 56129 - DNA, 2847 bp, Artificial Sequence
  derived and/or modified sequence
atgactggccaggctcgctttcacaggggggcggaagcgtgccgggctatcaggcagtgccgctctagacggcctcgggctgcgcatcctgaaggccgagctggaagtgggaggggcagccggcacgcgagtccaggggtccgacgaggcgggttttcattattactacttaatctcgaggaatactattttgagcagcatagggccaatcacatcttgcataagggatcacatcacgaacgtaaaatccgcgggtcgctcaaaatctgctccaaatctgtgatcttcgaacccgattccatcagccaaccaatcatcaagatccccctgagagactgtatcaaaataggcaagcatggcgaaaatggtgccaatcgacactttaccaaggctaaaagcggcggaataagtctgatctttagccaagtatatttcatcaaggaacataacgtagtggccccatacaaaatagagagaggaaagatggaatacgtgtttgagcttgatgttccaggaaaggtggaggacgttgtagagactttactccagctgcacagggctagttgcctggataagctcggcgaccaaacggctatgataacagccattctccagagccgcctagcccgtacttcttttgacaaaaacaggtttcagaatattagtgagaagctgcatatggagtgtaaggcggaaatggtgacccctctcgtcaccaatccaggccatgtgtgtataacagacaccaatttatatttccagcctctgaacggctaccccaaacccgtcgtgcagatcacactccaggatgtccgaaggatctacaagagacggcacggcctcatgccccttgggctggaagtattctgcactgaggacgacctatgctcagatatttacctcaaattctatgagccacaggacagagacgacctttatttctacatagcgacatatttggagcaccacgtcgccgagcatacagccgaatcctatatgctgcagtggcagaggggccatcttagtaattaccagtatttgttacacttaaataatctcgccgacagatcatgcaacgacctgtcccagtacccagtgttcccctggattattcacgactactcctcttctgagcttgacctctcaaatcccggaacattcagagatttatcaaaacctgtgggcgcactaaacaaggagagattggaacgtctcctgacaaggtatcaggagatgccagaacctaagtttatgtatggctcacactatagctctcctggatacgtccttttctacctagtgcggatagccccggaatacatgttgtgccttcagaatggcaggttcgacaacgccgatcgaatgtttaacagcatcgctgagacctggaaaaattgcctagacggggccacagattttaaggagctgattcccgaattttacggagatgacgtgtcatttctggtgaactctctgaaactggacctgggcaaaagacagggaggacaaatggtggatgatgtggagctccctccttgggcctcatcaccagaagacttcttgcagaagtcaaaggacgctctggagagcaactacgtgagcgagcatctccatgagtggatcgacttgatattcggctacaagcaaaagggcagcgatgccgtgggcgcacacaatgtctttcatccgctgacttacgaaggtggcgtggacctcaatagtatccaagatcccgatgagaaggtggccatgctgactcagatcctcgaattcggccagacccctaagcagttgttcgttacccctcatcccaggaggataacaccaaagttcaagagtttgtctcaaacatcatcatataatgcctccatggctgattcacccggcgaagaatccttcgaagatttaacagaagaaagcaagactcttgcttggaataatatcaccaagctacaattgcacgagcattacaagatccataaagaggcagttactggcatcacggttagcagaaatggatcttccgttttcacaactagccaggacagtaccttgaagatgttctctaaagagagcaagatgctgcagcgaagcataagcttctctaacatggcattatcctcctgcctcctcctgccgggggacgccaccgtgattacgtcatcatgggataataacgtgtatttttattcaatcgcgttcgggcggcgacaggatacactgatgggacacgacgatgctgtgagcaagatatgctggcacgacaacaggctttattcagcaagctgggattccacagtgaaagtgtggagcggtgttccagccgagatgcccggtacaaagaggcatcattttgatctgctggctgagctggagcatgacgtgtccgtggacaccatctcccttaacgcagctagcacgttgttggtctctgggactaaggaaggcactgtcaacatttgggaccttacaactgccaccctcatgcatcagatcccgtgccattctggcattgtatgtgatacagcattctctcctgacagtcgacatgtgctatctacagggacagacggctgtctgaacgtgatcgatgtgcagacaggaatgttgatcagctctatgacatcagacgagccacagaggtgcttcgtctgggacggcaattccgtgctgagtggctcccagagtggggagctcttagtatgggacctcctgggggctaagatcagcgaacggatacaggggcacacgggggccgtgacttgcatttggatgaacgagcagtgttcatccattataactgggggcgaggatcgacagattatcttctggaaactgcagtactag

SEQ ID NO: 56130 - DNA, 2847 bp, Artificial Sequence
  derived and/or modified sequence
atgacaggccaggcccgcttccacagaggagctgaggcctgccgggccatccggcagtgccgcagcagaagacccagggctgcccaccctgagggccgggccggcagcggccggggcagcagacatgccagccctggggtgcggcggggcggcttcagcctgctgctgctgaacctggaggagtactactttgagcagcaccgggccaaccacatcctgcacaagggcagccaccacgagaggaagatccggggcagcctgaagatctgcagcaagagcgtcatctttgagccagacagcatcagccagcccatcatcaagatccccctgcgggactgcatcaagattggcaagcatggagaaaatggagccaacagacacttcaccaaggccaagagcggcggcatcagcctcatcttcagccaggtgtacttcatcaaggagcacaacgtggtggccccctacaagattgagcggggcaagatggagtatgtgtttgagctggatgtgcctgggaaggtggaggatgtggtggagaccctgctgcagctgcaccgggccagctgcctggacaagctgggggaccagacagccatgatcacagccatcctgcagagccggctggcccggaccagctttgacaagaaccgcttccagaacatcagcgagaagctgcacatggagtgcaaggccgagatggtgacccccctggtgaccaaccctggccacgtgtgcatcacagacaccaacctgtacttccagcccctgaatggctaccccaagcctgtggtgcagatcaccctgcaggatgtgcggcgcatctacaagagaagacatggcctgatgcccctgggcctggaggtgttctgcacagaagatgacctgtgcagcgacatctacctgaagttctatgagccccaggacagagatgacctgtacttctacatcgccacctacctggagcaccacgtggccgagcacacagctgagagctacatgctgcagtggcagaggggccacctgagcaactaccagtacctgctgcacctgaacaacctggccgacaggagctgcaatgacctgagccagtaccctgtgttcccctggatcatccatgactacagcagcagcgagctggacctgagcaaccctggcaccttccgggacctgagcaagcctgtgggcgccctgaacaaggagcggctggagcggctgctgacccgctaccaggagatgcctgagcccaagttcatgtatggcagccactacagcagccctggctacgtgctcttctacctggtgcgcatcgcccctgagtacatgctgtgcctgcagaatggccgctttgacaatgctgacaggatgttcaacagcattgctgagacctggaagaactgcctggatggagccacagacttcaaggagctgatccctgagttctatggagatgatgtgtccttcctggtgaacagcctgaagctggacctgggcaagaggcagggcggccagatggtggatgatgtggagctgcccccctgggccagcagccctgaggacttcctgcagaagagcaaggatgccctggagagcaactacgtgtctgagcacctgcacgagtggattgacctgatcttcggctacaagcagaagggcagtgatgctgtgggcgcccacaacgtgttccaccccctgacctatgagggcggcgtggacctgaacagcatccaggaccctgatgagaaggtggccatgctgacccagatcctggagtttggccagacccccaagcagctgtttgtgaccccccacccccggcgcatcacccccaagttcaagagcctgagccagaccagcagctacaatgcctccatggctgacagccctggagaggagagctttgaggacctgacagaggagagcaagaccctggcctggaacaacatcaccaagctgcagctgcacgagcactacaagatccacaaggaggccgtgacaggcatcaccgtgtccagaaatggcagctctgtgttcaccaccagccaggacagcaccctgaagatgttcagcaaggagagcaagatgctgcagaggagcatctccttcagcaacatggccctgagcagctgcctgctgctgcctggagatgccaccgtcatcaccagctcctgggacaacaacgtgtacttctacagcatcgccttcggccggcggcaggacaccctgatgggccatgatgatgctgtgtccaagatctgctggcatgacaaccggctgtacagcgcctcctgggacagcacagtgaaggtgtggagcggcgtgcctgctgagatgcctggcaccaagaggcaccactttgacctgctggccgagctggagcatgatgtgtctgtggacaccatcagcctgaatgctgccagcaccctgctggtgtctggcaccaaggagggcaccgtgaacatctgggacctgaccacagccaccctgatgcaccagatcccctgccacagcggcatcgtgtgtgacacagccttctccccagacagccgccacgtgctgagcactggaacagatggctgcctgaatgtgattgatgtgcagacaggcatgctgatcagctccatgaccagtgatgagccccagcgctgctttgtgtgggatggcaacagcgtgctgagcggcagccagagcggggagctgctggtgtgggacctgctgggcgccaagatcagcgagcgcatccagggccacactggagctgtgacctgcatctggatgaatgagcagtgcagcagcatcatcactggaggagaagatcggcagatcatcttctggaagctgcagtactag

SEQ ID NO: 56131 - DNA, 2847 bp, Artificial Sequence
  derived and/or modified sequence
atgaccggccaggcccggttccaccggggcgccgaggcctgccgggctatacgccaatgccggtctcggcgtccgcgggccgcacacccagagggccgggccggctctggtcggggttctaggcacgcatctccaggtgtgcggaggggtggcttctctctactgctgctgaacctggaggagtactactttgaacaacaccgggccaatcacattttgcataaaggaagtcaccatgaaagaaaaatccgaggcagcttgaagatctgttcgaagtccgttatttttgaacccgattccatctctcaaccaatcattaaaatacccctgcgcgactgtatcaagatcggaaaacacggcgagaacggcgctaatcgtcacttcaccaaagccaaatccgggggaatctcgctgatatttagtcaagtgtacttcattaaagagcataatgtcgtggcaccatacaagatcgaaagggggaagatggaatatgtgtttgaactcgatgtgccaggcaaagtagaggatgtggtcgaaaccctcctccagctgcacagagcatcctgcctggacaagctcggagatcagaccgctatgatcacagctattcttcagagcaggctggcacgcaccagctttgataaaaatcgcttccaaaatatcagtgaaaagttgcatatggagtgtaaagccgaaatggtcacccccctcgttaccaaccccggacacgtgtgcattacagacacaaacctctatttccagcctttgaatggctaccctaaaccagtcgttcagatcaccctgcaggatgtacggcgtatctacaaacgccggcacggcttgatgcctctcggcctggaggtcttctgcaccgaagacgacctgtgcagcgatatttatctgaaattttatgaacctcaggacagagatgacctttatttttacatcgccacatatttggagcatcatgtggctgaacatacagctgaaagttacatgctgcagtggcagcggggacatcttagcaattaccagtacttgctgcatctcaataacctggcggataggtcgtgcaatgatctatcacagtatccagtgtttccttggatcattcacgactacagctctagcgagttagatctttcaaatccaggcacattccgggacttatccaaacctgtgggggcacttaacaaggagcgactggaacgcctccttacccgttaccaggagatgccagagcctaagttcatgtacggctcccattactccagtcccggttacgtactattctatctggtgaggatcgcccctgagtatatgctttgtttgcagaatggacggtttgataacgctgaccgcatgtttaactcgattgccgaaacttggaaaaattgtctagacggggcaactgacttcaaggaactgattcccgaattctatggggacgatgtcagttttctggtgaatagccttaagctagatctcggcaagcgccaggggggacagatggttgacgatgtggagttgcccccctgggcctcgtctccggaggatttccttcagaagtctaaggatgctttggaatcgaactacgtttcggagcatctgcacgagtggattgatctaatttttggatacaagcagaaagggagtgatgctgtaggggcccacaatgttttccatccacttacatatgagggtggcgtggacctgaactccatacaggacccggacgagaaggtagccatgctgacacagattctggaattcggacagactcccaaacagttgttcgtcacgccacaccctcgccgcattactccaaagtttaaaagtctgagtcagaccagcagttataacgcttctatggctgactctcccggtgaggaaagttttgaggacctgaccgaggagtctaagaccttggcctggaataacatcaccaaactgcagctccatgaacactataagattcacaaggaggccgtgaccgggatcactgttagccgcaacgggtcgagcgtgtttacaacatcccaggatagcacactcaagatgttctctaaagaaagcaagatgcttcagcggagtattagctttagcaacatggcgctatcatcgtgcctcctgctccctggggacgccactgtgataacatccagctgggataataacgtctatttttactccattgcctttgggaggagacaagacactctgatggggcacgacgacgctgtgtccaagatctgctggcatgacaataggctgtatagcgcttcctgggattccactgtcaaggtgtggtccggcgtcccagccgagatgcctggaactaagaggcaccacttcgatcttctggcagagctggagcatgacgtcagtgtggatactatttccctgaatgccgccagtacactattggttagcggaacgaaggagggaactgtcaatatctgggacttgactacagccaccttaatgcatcagataccctgccattctggaattgtctgcgacacggcgttcagccccgattcccgccatgtcctgagcacaggcactgacggttgtctgaacgtgattgacgtgcagaccggtatgttgatctctagcatgacttctgacgaaccccaacggtgttttgtctgggacgggaattccgtgctgtctggatcacaatcaggagaactcctggtgtgggatttgttaggcgcgaagatatcagaaagaattcagggacacacgggcgcagtgacttgtatctggatgaatgagcaatgcagtagtataatcacggggggggaagataggcagatcatcttttggaagcttcagtactag

SEQ ID NO: 56132 - DNA, 3371 bp, Artificial Sequence
  derived and/or modified sequence
agtcggggccggtcgtggggacgccggccggagatctgagggacgggaggcggcgtgggggccgggcacggaggcaggggccggacgcgtgtccagggcctgggctgggggctgtggcggaaacctgaggtcggggtgagaggccgggggcctggtctgggccggagcctgccggggacaggaactggatgacgggccaggccagattccaccgcggagccgaggcatgccgagctatccggcagtgcaggtcccggcggccgcgggcagctcacccggaaggccgcgcggggtccgggcgtggatcccggcacgcgagcccgggcgttcgcaggggaggattttccttgctgctgcttaacttggaggagtactactttgaacagcatagagccaatcacattttgcacaagggcagtcaccatgaaaggaaaatcagaggctccttaaaaatatgttcaaaatcggtgatttttgaaccagattcaatatcccagcccatcatcaagattcctttgagagactgtataaaaataggaaagcatggagaaaatggagccaatagacacttcacaaaggcaaaatctgggggtatttcactcattttcagtcaggtatatttcattaaagaacataatgttgttgcaccatataaaatagaaaggggcaaaatggaatatgtttttgaattggatgttcccgggaaagtggaagatgttgtggagacgttgcttcagcttcacagagcatcctgccttgacaaattgggtgaccaaaccgccatgataacagctattttgcagtctcgtttagctagaacatcatttgacaaaaacaggttccaaaacatttctgaaaagctgcacatggaatgcaaagcagaaatggtgacgcctctggtgactaatcctggacacgtgtgcatcacggacacaaacctgtattttcagcccctcaacggctacccgaaacctgtggtccagataacactccaagatgtccgccgcatctacaaaaggaggcacggcctcatgcctctgggcttggaagtattttgcacagaagatgatctgtgttccgacatctacctaaagttctatgaacctcaagatagagatgatctctatttttacattgccacatacctagagcaccatgtggcggagcacactgctgagagctacatgctgcagtggcagcgtggacacctttccaactatcagtacctccttcacctcaacaacctggccgaccgcagctgcaacgacctctcccagtaccctgtgtttccatggataatacatgattattccagctcagaactagatttgtcaaatccaggaaccttccgggatctcagtaagccagtaggggccctaaataaggaacggctggagagactactgacacgctaccaggaaatgcctgaaccaaagttcatgtatgggagtcactactcttccccgggttatgtacttttttatcttgttaggattgcaccagagtatatgctgtgcctgcagaatggaagatttgataatgcagatagaatgttcaacagtattgcagaaacttggaaaaactgtctggatggtgcaacggattttaaagagttaattccagaattctatggtgatgatgtgagctttctagtcaatagcctgaagttggatttgggaaagagacaaggaggacagatggttgacgacgtggagcttcccccttgggcttccagtcccgaggactttctccagaagagcaaagatgcattggaaagcaattatgtgtctgaacaccttcacgagtggattgatctaatatttggctacaaacaaaaagggagtgatgcagttggggcccataatgtatttcatcccctgacctatgaaggaggtgtagacttgaacagcatccaggatcctgatgagaaggtagccatgcttacgcaaatcttggaatttgggcagacaccaaaacaactatttgtgacaccacatcctcgaaggatcaccccaaagtttaaaagtttgtcccagacctccagttataatgcttctatggcagattccccaggtgaagagtcttttgaagacctgaccgaagaaagcaaaacactggcctggaataacatcaccaaactgcagttacacgagcactataaaatccacaaagaagcagttactggaatcacggtctctcgcaatggatcttcagtattcacaacatcccaagattccaccttgaagatgttttctaaagaatcaaaaatgctacaaagaagtatatcattttcaaatatggctttatcgtcttgtttacttttaccaggagatgccactgtcataacttcttcatgggataataatgtctatttttattccatagcatttggaagacgccaggacacgttaatgggacatgatgatgctgttagtaagatctgttggcatgacaacaggctatattctgcatcgtgggactctacagtgaaggtgtggtctggtgttcctgcagagatgccaggcaccaaaagacaccactttgacttgctggccgagctggaacatgatgtcagtgtagatacaatcagtttaaatgctgcaagcacactgttagtttccggcaccaaagaaggcacagtgaatatttgggacctcacaacggccaccttaatgcaccagattccatgccattcagggattgtatgtgacactgcttttagcccagatagtcgccatgtcctcagcacaggaacagatggctgtcttaatgtcattgatgtgcagacaggaatgctcatctcctccatgacatcagatgagccccagaggtgctttgtctgggatggaaattccgttttatctggcagtcagtctggtgaactgctcgtttgggacctccttggagcaaaaatcagtgagagaatacagggccacacaggtgctgtgacatgtatatggatgaatgaacagtgtagcagtatcatcacaggaggggaagacagacaaattatattctggaaattgcagtattaagtgccttttcctctcctgaatattaaattgaactctatttaatgcatttttaaaccaaacttttaaacggactggtgaatgtgcaatgttagtaattagaagttttaccacatggaaaatttgtggttttaaactttctaaatcatggtgacttcattgaaagccattagttgctattctcttagggcagataaaatgcggctgtgttaggaaaaacatgttacactgtaaggcagatgatcgtccccgtatgatgattgtcagaagacaggactaagtagcagagaatagctaagagataaattgggctggggaaacttgtcagaaagcactgaa

SEQ ID NO: 56133 - DNA, 2847 bp, Artificial Sequence
  derived and/or modified sequence
atgacaggccaagcacgcttccatcgaggagccgaagcttgccgtgccatccgccagtgtaggtcccgacgccctcgggctgcacaccctgaagggcgagcgggaagcgggagagggagccggcacgcatcgcccggagtgcgacggggaggattttctctcctccttctcaacctcgaagagtattatttcgaacagcaccgcgctaaccacatcctccataaagggagccatcacgaaaggaaaatcaggggctccttaaagatatgttcaaagtcggtgatcttcgagccagacagcatcagccagcctatcatcaagataccgctccgggattgcatcaagatcgggaaacatggcgaaaatggtgcgaatagacactttacaaaggccaaatccggcggaatctcacttattttctcacaggtttattttatcaaagagcataacgtagtggcgccatacaagatcgagagaggcaagatggagtatgtgttcgagctggacgttccagggaaggttgaggacgtggtggagaccctgttacaattacaccgggcttcctgcctggacaagttgggagatcagacagcgatgatcacagctattctgcagagcaggctggccagaacaagcttcgacaagaatcgctttcagaacatcagtgagaaactgcacatggagtgcaaggcagagatggtgaccccactggtaaccaaccctggccatgtttgtatcaccgacactaatttgtattttcagcctctaaatggctacccaaaacctgtcgtgcaaattacgttacaggatgtgcggaggatctataaacgaaggcatggactgatgcctcttggtctggaggtgttttgcaccgaagacgacctctgttcggacatctacctgaaattctacgaaccacaggaccgggatgacctttatttttatatagctacttatcttgaacaccatgtagccgagcatacagccgagtcctatatgctgcagtggcagcggggtcacctgtccaattaccagtacctcctccacctgaacaaccttgccgatcgttcttgcaatgatttgtcccagtaccccgtatttccatggatcattcatgactacagctcttctgaattagatctgtctaatccgggaacgtttcgtgatctgtctaaaccagtcggagcattgaataaagagcgcctggagaggttgctgacacgctaccaggaaatgcccgaacccaagtttatgtacgggtctcactacagttcaccaggttacgtcctgttctatctggttagaatagctccagaatatatgctgtgtcttcagaacggtaggtttgataatgccgatagaatgttcaacagcatcgctgagacatggaagaattgtctggatggagctactgatttcaaggagctgatcccagagttctacggcgacgacgtgagcttcctcgtgaactcgcttaaactggacttggggaaacgccaaggaggtcagatggtcgatgatgtggagttgccaccatgggcgtctagccccgaggacttcttgcagaaatcaaaagatgcccttgaatccaactacgtgtctgagcacctgcacgaatggatcgatcttatcttcgggtacaaacaaaaggggagtgacgccgtgggagcccacaatgtctttcatccactgacctacgaaggaggcgtagacctgaattctattcaggatcccgatgagaaagtggcgatgctaactcagatcctggaattcgggcaaacccccaagcagctatttgtgaccccccatccacggaggataacccctaaatttaaaagtctttcccagacgagcagttacaatgcaagcatggccgattccccaggcgaggagtctttcgaagacctgactgaagaatctaagacactcgcttggaacaatattacgaagctccagctccacgagcactacaagattcataaggaagctgtaactgggattactgtgtcacggaatggctcctctgttttcacgacatcccaggattcaaccctgaaaatgtttagtaaggaaagtaagatgcttcagaggtcaatcagtttcagtaatatggccttgagtagctgcttgttgctacctggagatgccaccgtcatcacctcgtcctgggataacaatgtatatttttacagtattgccttcgggcgacggcaggacaccctgatggggcacgacgacgcggtctcaaaaatatgttggcatgataatcgcctgtactccgcctcttgggactctacggtcaaagtgtggtctggcgtgcccgcagagatgccgggaacaaagcgtcaccacttcgatctcctggctgagttagagcacgatgtttccgtggacaccatatccttaaacgccgcttcaacactgcttgtatccgggacaaaggaggggactgtgaatatctgggatctgacaacggccacactcatgcatcaaatcccttgccacagtggtattgtctgtgacactgcattctcccctgattctcgccatgtcctttccaccggaacagatggatgcctcaatgtaatcgacgtgcagaccggtatgcttatctctagtatgacatcagacgaaccgcagcggtgctttgtttgggacggaaactcagtgctctccgggagccagtccggcgagcttctagtgtgggatctactaggagcaaaaatttcagagaggattcaaggccatactggcgctgtcacgtgtatttggatgaatgaacagtgctccagcatcattacaggcggagaagataggcagatcatcttctggaagctgcagtactag

SEQ ID NO: 56134 - DNA, 2847 bp, Artificial Sequence
  derived and/or modified sequence
atgaccggccaggccagattccacagaggcgccgaggcctgcagagccatcagacagtgcagaagcagaagacccagagccgcccaccccgagggcagagccggcagcggcagaggcagcagacacgccagccccggcgtgagaagaggcggcttcagcctgctgctgctgaacctggaggagtactacttcgagcagcacagagccaaccacatcctgcacaagggcagccaccacgagagaaagatcagaggcagcctgaagatctgcagcaagagcgtgatcttcgagcccgacagcatcagccagcccatcatcaagatccccctgagagactgcatcaagatcggcaagcacggcgagaacggcgccaacagacacttcaccaaggccaagagcggcggcatcagcctgatcttcagccaggtgtacttcatcaaggagcacaacgtggtggccccctacaagatcgagagaggcaagatggagtacgtgttcgagctggacgtgcccggcaaggtggaggacgtggtggagaccctgctgcagctgcacagagccagctgcctggacaagctgggcgaccagaccgccatgatcaccgccatcctgcagagcagactggccagaaccagcttcgacaagaacagattccagaacatcagcgagaagctgcacatggagtgcaaggccgagatggtgacccccctggtgaccaaccccggccacgtgtgcatcaccgacaccaacctgtacttccagcccctgaacggctaccccaagcccgtggtgcagatcaccctgcaggacgtgagaagaatctacaagagaagacacggcctgatgcccctgggcctggaggtgttctgcaccgaggacgacctgtgcagcgacatctacctgaagttctacgagccccaggacagagacgacctgtacttctacatcgccacctacctggagcaccacgtggccgagcacaccgccgagagctacatgctgcagtggcagagaggccacctgagcaactaccagtacctgctgcacctgaacaacctggccgacagaagctgcaacgacctgagccagtaccccgtgttcccctggatcatccacgactacagcagcagcgagctggacctgagcaaccccggcaccttcagagacctgagcaagcccgtgggcgccctgaacaaggagagactggagagactgctgaccagataccaggagatgcccgagcccaagttcatgtacggcagccactacagcagccccggctacgtgctgttctacctggtgagaatcgcccccgagtacatgctgtgcctgcagaacggcagattcgacaacgccgacagaatgttcaacagcatcgccgagacctggaagaactgcctggacggcgccaccgacttcaaggagctgatccccgagttctacggcgacgacgtgagcttcctggtgaacagcctgaagctggacctgggcaagagacagggcggccagatggtggacgacgtggagctgcccccctgggccagcagccccgaggacttcctgcagaagagcaaggacgccctggagagcaactacgtgagcgagcacctgcacgagtggatcgacctgatcttcggctacaagcagaagggcagcgacgccgtgggcgcccacaacgtgttccaccccctgacctacgagggcggcgtggacctgaacagcatccaggaccccgacgagaaggtggccatgctgacccagatcctggagttcggccagacccccaagcagctgttcgtgaccccccaccccagaagaatcacccccaagttcaagagcctgagccagaccagcagctacaacgccagcatggccgacagccccggcgaggagagcttcgaggacctgaccgaggagagcaagaccctggcctggaacaacatcaccaagctgcagctgcacgagcactacaagatccacaaggaggccgtgaccggcatcaccgtgagcagaaacggcagcagcgtgttcaccaccagccaggacagcaccctgaagatgttcagcaaggagagcaagatgctgcagagaagcatcagcttcagcaacatggccctgagcagctgcctgctgctgcccggcgacgccaccgtgatcaccagcagctgggacaacaacgtgtacttctacagcatcgccttcggcagaagacaggacaccctgatgggccacgacgacgccgtgagcaagatctgctggcacgacaacagactgtacagcgccagctgggacagcaccgtgaaggtgtggagcggcgtgcccgccgagatgcccggcaccaagagacaccacttcgacctgctggccgagctggagcacgacgtgagcgtggacaccatcagcctgaacgccgccagcaccctgctggtgagcggcaccaaggagggcaccgtgaacatctgggacctgaccaccgccaccctgatgcaccagatcccctgccacagcggcatcgtgtgcgacaccgccttcagccccgacagcagacacgtgctgagcaccggcaccgacggctgcctgaacgtgatcgacgtgcagaccggcatgctgatcagcagcatgaccagcgacgagccccagagatgcttcgtgtgggacggcaacagcgtgctgagcggcagccagagcggcgagctgctggtgtgggacctgctgggcgccaagatcagcgagagaatccagggccacaccggcgccgtgacctgcatctggatgaacgagcagtgcagcagcatcatcaccggcggcgaggacagacagatcatcttctggaagctgcagtactag

SEQ ID NO: 56135 - protein, 1906 aa, Artificial Sequence
  derived and/or modified sequence
MIEDKGPRVADYFVVAGLTDVSKPLEEEIHFNDACHKVAKPKEPITDVSVIIKSLGEEVPQDYICIDVTPTGLSADLNNGSLVGPQIYLCYRRGRDKPPLTDLGVLYDWKERLKQGCEIIQSTPYGRPANISGSTSSQRIYITYRRASENMTQNTLAVTDICIIIPSKGESPPHTFCKVDKNLNNSMWGSAVYLCYKKSVAKTNTVSYKAGLICRYPQEDYESFSLPESVPLFCLPMGATIECWPSNSKYPLPVFSTFVLTGASAEKVYGAAIQFYEPYSEENLTEKQRLLLGLTSADGKSDSSKTIHTNKCICLLSHWPFFDAFRKFLTFLYRYSISGPHVLPIEKHISHFMHKVPFPSPQRPRILVQLSPHDNLILSQPVSSPLPLSGGKFSTLLQNLGPENAVTLLVFAVTEHKILIHSLRPSVLTSVTEALVSMIFPFHWPCPYVPLCPLALADVLSAPCPFIVGIDSRYFDLYDPPPDVSCVDVDTNTISQIGDKKNVAWKILPKKPCKNLMNTLNNLHQQLAKLQQRPRDDGLMDLAINDYDFNSGKRLHMIDLEIQEAFLFFMASILKGYRSYLRPITQAPSETATDAASLFALQAFLRSRDRSHQKFYNMMTKTQMFIRFIEECSFVSDKDASLAFFDDCVDKVDMDKSGEVRLIELDESFKSEHTVFVTPPEIPHLPNGEEPPLQYSYNGFPVLRNNLFERPEGFLQAKKNKLPSKSSSPNSPLPMFRRTKQEIKSAHKIAKRYSSIPQMWSRCLLRHCYGLWFICLPAYVKVCHSKVRALKTAYDVLKKMQSKKMDPPDEVCYRILMQLCGQYDQPVLAVRVLFEMQKAGIDPNAITYGYYNKAVLESTWPSRSRSGYFLWTKVRNVVLGVTQFKRALKKHAHLSQTTLSDGSDLDAVSHGSMDSGHGTHTVEQAPFNTGLIKVYATDDRSSTGGQSDLGYNSLSKDEVRRGDTSTEDIQEEKDKKGSDCSSLSESESTKGSADCLPKLSYQNSSSIVRLTGTSNNSAGKISGESMESTPELLLISSLEDTNETRNIQSRCFRKRHKSDNETNLQQQVVWGNRNRNLSGGVLMGFMLNRINQEATPGDIVEKLGADAKILSNVISKSTRPNTLDIGKPPLRSKRDSLEKESSDDDTPFDGSNYLADKVDSPVIFDLEDLDSETDVSKAGCVATQNPKRIQRMNSSFSVKPFEKTDVATGFDPLSLLVAETEQQQKEEEEEDEDDSKSISTPSARRDLAEEIVMYMNNMSSPLTSRTPSIDLQRACDDKLNKKSPPLVKACRRSSLPPNSPKPVRLTKSKSYTKSEEKPRDRLWSSPAFSPTCPFREESQDTLTHSSPSFNLDTLLVPKLDVLRNSMFTAGKGVAEKASKWYSRFTMYTTSSKDQSSDRTSLSSVGAQDSESTSLTDEDVCHELEGPISSQETSATSGTKRIDLSRISLESSASLEGSLSKFALPGKSEVTSSFNASNTNIFQNYAMEVLISSCSRCRTCDCLVHDEEIMAGWTADDSNLNTTCPFCGNIFLPFLNIEIRDLRRPGRYFLKSSPSTENMHFPSSISSQTRQSCISTSASGLDTSALSVQGNFDLNSKSKLQENFCTRSIQIPANRSKTAMSKCPIFPMARSISTSGPLDKEDTGRQKLISTGSLPATLQGATDSLGLEWHLPSPDPVTVPYLSPLVVWKELESLLENEGDHAITVADFVDHHPIVFWNLVWYFRRLDLPSNLPGLILSSEHCNKYSKIPRHCMSEDSKYVLIQMLWDNMKLHQDPGQPLYILWNAHTQKYPMVHLLQKSDNSFNQELLKSMVKSIKMNDVYGPMSQILETLNKCPHFKRQRSLYREILFLSLVALGRENIDIDAFDKEYKMAYDRLTPSQVKSTHNCDRPPSTGVMECRKTFGEPYL

SEQ ID NO: 56136 - DNA, 5721 bp, Artificial Sequence
  derived and/or modified sequence
atgattgaggacaaggggccccgagttgcagactatttcgtagtagccggcctgacagacgtttctaaacccctggaggaagagatacatttcaacgacgcctgtcataaggtggctaagcctaaggaacccatcacagatgtgtccgtgatcatcaagtctctgggcgaggaggtaccgcaggactacatctgcatcgatgttaccccaactggactgtcagctgatctgaacaacggaagtcttgttgggccccagatctacctgtgctataggaggggccgggataagccccctctgactgacctaggggtcctgtacgactggaaagagcgactcaaacaggggtgtgagattatacagtctaccccttacggcaggcctgcaaatataagtggctcaacctcttcccagagaatctacatcacataccgccgcgccagtgagaacatgactcagaatactctcgcggtgacagatatatgcattattatacccagcaagggcgaatccccacctcacactttctgcaaggtagacaagaatctgaacaacagcatgtggggatcagcagtatacctgtgctacaagaagtccgtagcaaagactaatacagtcagctacaaagccggtttaatatgccggtacccacaggaggactacgagagttttagcctccctgagtccgtgccccttttttgtctgcctatgggagccactatcgaatgttggcccagcaacagtaaatacccccttccagtcttttcaacgtttgtgctaacaggcgcaagcgctgaaaaagtttacggcgcagcaattcagttctacgagccatactcggaggaaaatctcacagagaaacagcgcttgctgctgggtcttaccagcgccgatggcaaatccgactcttcgaaaactatccacaccaataagtgcatctgtttgctaagtcactggccgtttttcgacgccttccgaaaatttctgactttcctgtacaggtactcgataagcgggccccatgtccttccaatcgaaaaacatattagccactttatgcataaagtaccgtttccctccccccagcgccctcgaatcctggtgcagctctctcctcatgacaatttaatactcagtcaacccgtgtccagtcctctgccattgtcagggggaaaattctctactctcttgcagaatctcggaccagaaaacgcagtaaccctcctcgtttttgcagtaacagagcataagatccttatccacagcctccggcccagtgttctgacttccgtcaccgaagcccttgtgtccatgatcttccccttccactggccatgtccctacgtgccactatgcccccttgccctcgcggatgtactctctgctccctgtccctttatcgttggaattgactcacgttacttcgatctctacgatccacctccagatgtcagctgcgttgatgtggatactaatacgatcagccagataggcgacaaaaagaatgtcgcttggaagatcctgccaaaaaaaccctgcaagaacctgatgaacactctgaacaaccttcaccagcagcttgccaaacttcaacagcgcccaagagacgatgggttgatggatcttgcgataaacgactatgattttaattccgggaagcgcctgcacatgattgacttagagattcaagaggccttcttgttcttcatggcctcaatcctgaaaggctacagaagctaccttagaccaatcacccaagcccccagcgagacggccaccgacgctgcctcgctttttgctttgcaggccttcctgcgcagcagggaccggagccatcagaagttctacaacatgatgactaagacgcaaatgtttattagattcattgaggaatgcagctttgtcagtgataaagatgcaagcttagccttcttcgatgactgcgtggataaggtcgacatggataagtctggagaggtgcggctcatcgaactcgacgaaagcttcaaatctgagcacactgtgtttgtcacaccacccgaaatcccccaccttcctaatggtgaggagccaccattacagtacagctataatggcttcccagtgctgcgtaacaaccttttcgagcggcctgagggattcttacaggccaaaaagaacaaattgccgagcaaatcgtcaagtcccaacagcccccttcctatgtttcgtaggacgaaacaagagattaagagcgcccacaaaattgctaaacgatatagttcaattccgcagatgtggagtcggtgcttgttacggcattgttatggcctatggttcatttgtttacccgcatatgtgaaagtgtgccattcaaaggtgcgggccctgaagaccgcttacgatgtccttaagaagatgcagtccaaaaaaatggaccctcccgatgaagtgtgttatcgcatcctgatgcagctgtgcggccagtacgaccagcctgtcctcgctgtgagagttctgtttgagatgcagaaagcgggcattgaccccaacgctatcacttatggttactataacaaggctgttcttgagtcaacctggccctcgagaagcaggtctggttacttcctgtggaccaaggtgcgtaacgttgtgctgggagtgactcaattcaagagagccctcaaaaagcacgctcacctcagtcagaccacactctctgacggttcagatctcgatgccgtgagccacgggtccatggactccggccacggtactcacacagtggagcaggcgcctttcaataccgggctcatcaaggtgtatgcaaccgatgatcggtcttccaccggcggtcagtccgatttaggttataattccttgagcaaggacgaggtgcggagaggagacactagcactgaagatattcaggaggagaaagataagaaggggagcgactgcagttcattatccgagtcagagtctaccaaaggaagcgctgactgtttgccaaagctcagttatcagaattcatcgagtatcgtgaggttgaccgggacctcgaataatagcgcggggaaaatctctggtgaatccatggagtccacccctgaacttctgcttatcagtagcctagaggacacaaatgagacgaggaatattcagtctcgatgtttccgtaaacgccacaagtcagataatgagaccaacctccagcagcaggttgtctggggcaaccgcaatagaaatctgtcaggcggcgtcttaatgggctttatgctgaaccggattaatcaggaggccacacccggcgatattgtggaaaagctgggagccgacgctaagatactgtctaatgtgatcagcaagtctacgcgacctaatacgttggatattggaaagccaccactgagaagcaaaagagacagtctggagaaagagtcaagtgacgacgataccccattcgacggctctaactacttggcggataaggtggattctcctgtgatcttcgacctcgaggacctggacagcgaaacggatgtcagcaaggccggctgcgtggcaacccagaatccaaaacggatacagcggatgaactctagttttagtgttaagccgttcgagaagaccgacgtggctactggatttgatcccttatcgctgcttgtggctgaaacagagcagcagcagaaagaggaagaggaggaggacgaagacgactccaaaagcatatccacccccagcgctcggcgtgatctggcagaggagattgtgatgtacatgaataacatgtccagcccactcacaagccgcacccccagcattgatctgcagcgcgcatgtgatgacaagctcaacaagaagtctccacccctcgtgaaggcgtgcagacgttcctcactgccacccaattctccaaaacccgtcaggctgaccaaaagcaagtcctataccaagagtgaggaaaaacctagggataggctgtggtccagccctgcattcagccctacatgtcccttcagagaggagagccaggataccctcactcactctagccccagcttcaacctcgatacactcctagtaccaaaacttgacgtactccgaaattccatgtttaccgcaggaaaaggagtggccgaaaaggcgagcaaatggtatagtagattcaccatgtataccaccagttcaaaagatcagtcttccgatagaactagcttgtcttccgtcggcgctcaggactcagaaagcacttctctcacggacgaggacgtttgtcatgagctggagggcccaatctcctcccaggagacctctgctacgtcaggcactaagcgcatagacctctcccgcatttccttggagtcgagcgcgagtctggaaggtagcctgagcaagttcgccctcccagggaaatcggaagtgacttcatccttcaacgcctctaatacaaacatctttcaaaattacgctatggaggttttaataagttcttgctctaggtgtcggacctgcgattgtctcgtccatgacgaggaaatcatggccgggtggaccgcagatgatagcaaccttaacacgacctgcccattttgcggaaatatcttcctgccatttcttaatatcgaaattagagatctgcgaaggcccggcagatacttcttgaagagtagtccctcaacagagaacatgcatttcccaagcagcatttccagccagacgcgacagtcatgtataagtacatcagcttccgggctcgatacctctgccttgtcagtgcagggtaactttgacttgaactccaagagcaaactccaagaaaacttttgtacaagatccatccagatccctgccaaccgctctaaaaccgcaatgagtaaatgccccatattccctatggcccgttctatcagtaccagcggccccctggataaggaggacacaggccggcaaaaactgatctccactggatccctccctgccacactacagggcgctacggattccctgggacttgaatggcaccttcctagccccgacccagtgaccgtgccatacctctcaccactggtggtttggaaggagctggaatccctgctcgagaacgaaggggatcatgcaatcaccgttgccgactttgtggatcaccacccaatcgttttctggaaccttgtctggtatttccgtcggttagaccttccgagcaatttacctggcctaattctgagcagcgaacactgcaataagtactcaaagatcccgcgccactgtatgtcggaagacagtaagtacgtgctgatacaaatgctttgggacaacatgaagttacaccaagacccagggcaacctttgtacattctctggaacgcccacactcaaaagtatccgatggtgcacctcctccagaagtccgacaatagttttaaccaggaactacttaagtctatggtaaagtcaatcaaaatgaatgatgtgtacgggccaatgagccagattctcgagacccttaataagtgccctcacttcaagcgccagagaagtctgtatcgtgagatcctttttctgtcccttgtcgctctcggtcgcgagaacatcgatatagacgcattcgataaggagtacaagatggcctacgataggctgaccccctctcaggtcaaatcaactcacaactgtgaccggccaccttccacgggtgtgatggagtgcaggaaaaccttcggggagccctatttgtag

SEQ ID NO: 56137 - DNA, 5721 bp, Artificial Sequence
  derived and/or modified sequence
atgattgaagataaaggcccccgggtggccgactactttgtggtggccggcctgacagatgtgtccaagcccctggaggaggagatccacttcaatgatgcctgccacaaggtggccaagcccaaggagcccatcacagatgtgtctgtcatcatcaagagcctgggggaggaggtgccccaggactacatctgcattgatgtgacccccaccggcctgtctgctgacctgaacaacggcagcctggtgggcccccagatctacctgtgctaccgccggggccgggacaagccacccctgacagacctgggcgtgctgtatgactggaaggagcggctgaagcagggctgtgagatcatccagagcaccccctacggccggcctgccaacatcagcggcagcaccagcagccagaggatctacatcacctacagaagagccagcgagaacatgacccagaacaccctggccgtgacagacatctgcatcatcatccccagcaagggggagagccccccccacaccttctgcaaggtggacaagaacctgaacaacagcatgtggggcagcgctgtgtacctgtgctacaagaagtctgtggccaagaccaacacagtgtcctacaaggccggcctcatctgccgctacccccaggaggactatgagagcttcagcctgcctgagagcgtgcccctcttctgcctgcccatgggcgccaccatcgagtgctggcccagcaacagcaagtaccccctgcctgtgttcagcacctttgtgctgactggagccagcgctgagaaggtgtatggagctgccatccagttctatgagccctacagcgaggagaacctgacagagaagcagaggctgctgctgggcctgaccagcgcagatggcaagagtgacagcagcaagaccatccacaccaacaagtgcatctgcctgctgagccactggcccttctttgatgccttcaggaagttcctgaccttcctgtaccgctacagcatcagcggcccccacgtgctgcccatcgagaagcacatcagccacttcatgcacaaggtgcccttccccagcccccagaggccccgcatcctggtgcagctgagcccccatgacaacctgatcctgagccagcctgtgagcagccccctgcccctgagcggcggcaagttcagcaccctgctgcagaacctgggcccagaaaatgctgtgaccctgctggtgtttgctgtgacagagcacaagatcctgatccacagcctgcggcccagcgtgctgacctctgtgacagaggccctggtgtccatgatcttccccttccactggccctgcccctacgtgcccctgtgccccctggccctggctgatgtgctgagcgccccctgccccttcatcgtgggcatcgacagccgctactttgacctgtatgaccccccaccagatgtgtcctgtgtggatgtggacaccaacaccatcagccagattggagacaagaagaatgtggcctggaagatcctgcccaagaagccctgcaagaacctgatgaacaccctgaacaacctgcaccagcagctggccaagctgcagcagaggcccagagatgatggcctgatggacctggccatcaatgactatgacttcaacagcggcaagaggctgcacatgattgacctggagatccaggaggccttcctgttcttcatggccagcatcctgaagggctaccgcagctacctgcggcccatcacccaggcccccagcgagacagccacagatgctgccagcctgtttgccctgcaggccttcctgcggagccgggacaggagccaccagaagttctacaacatgatgaccaagacccagatgttcatccgcttcattgaagaatgttcctttgtgtctgacaaggatgccagcctggccttctttgatgactgtgtggacaaggtggacatggacaagtctggagaggtgcggctgattgagctggatgagagcttcaagtctgagcacacagtgtttgtgaccccacctgagatcccccacctgcccaatggagaggagccccccctgcagtacagctacaacggcttccctgtgctgaggaacaacctgtttgagaggcctgagggcttcctgcaggccaagaagaacaagctgcccagcaagagcagcagccccaacagccccctgcccatgttccggaggaccaagcaggagatcaagagcgcccacaagatcgccaagcgctacagcagcatcccccagatgtggagccgctgcctgctgcggcactgctacggcctgtggttcatctgcctgcctgcctacgtgaaggtgtgccacagcaaggtgcgggccctgaagacagcctatgatgtgctgaagaagatgcagagcaagaagatggaccccccagatgaggtgtgctaccgcatcctgatgcagctgtgtggccagtatgaccagcctgtgctggccgtgcgggtgctgtttgagatgcagaaggccggcatcgaccccaatgccatcacctacggctactacaacaaggctgtgctggagagcacctggcccagccgcagccgcagcggctacttcctgtggaccaaggtgagaaatgtggtgctgggcgtgacccagttcaagagggccctgaagaagcacgcccacctgagccagaccaccctgagtgatggcagtgacctggatgctgtgagccacggctccatggattctggccacggcacccacacagtggagcaggcccccttcaacacaggcctcatcaaggtgtatgccacagatgacaggagcagcactggaggccagagcgacctgggctacaacagcctgagcaaggatgaggtgcggcggggggacaccagcacagaggacatccaggaggagaaggacaagaagggcagtgactgcagcagcctgtctgagagcgagagcaccaagggcagcgctgactgcctgcccaagctgagctaccagaacagcagcagcatcgtgcggctgaccggcaccagcaacaacagcgctgggaagatcagcggggagagcatggagagcaccccagagctgctgctgatcagcagcctggaggacaccaatgagaccaggaacatccagagccgctgcttcaggaagaggcacaagagtgacaatgagaccaacctgcagcagcaggtggtgtggggcaacagaaacagaaacctgagcggcggcgtgctgatgggcttcatgctgaaccgcatcaaccaggaggccacccctggggacatcgtggagaagctgggcgcagatgccaagatcctgagcaatgtcatcagcaagagcacccggcccaacaccctggacatcggcaagccacccctgcggagcaagagggacagcctggagaaggagagcagtgatgatgacaccccatttgatggcagcaactacctggccgacaaggtggacagccctgtgatctttgacctggaggacctggacagcgagacagatgtgtccaaggccggctgtgtggccacccagaaccccaagaggatccagaggatgaacagcagcttctctgtgaagccctttgagaagacagatgtggccaccggctttgaccccctgagcctgctggtggccgagacagagcagcagcagaaggaggaggaggaggaggatgaagatgacagcaagagcatcagcacccccagcgcccggcgggacctggccgaggagatcgtgatgtacatgaacaacatgagcagccccctgaccagcaggacccccagcattgacctgcagagggcctgtgatgacaagctgaacaagaagagcccccccctggtgaaggcctgcagaagaagcagcctgccccccaacagccccaagcctgtgcggctgaccaagagcaagagctacaccaagtctgaggagaagccccgggaccggctgtggagcagccctgccttcagccccacctgccccttccgggaggagagccaggacaccctgacccacagcagccccagcttcaacctggacaccctgctggtgcccaagctggatgtgctgagaaattccatgttcaccgctggaaaaggagtggccgagaaggccagcaagtggtacagccgcttcaccatgtacaccaccagcagcaaggaccagagcagtgacaggaccagcctgagctctgtgggcgcccaggacagcgagagcaccagcctgacagatgaagatgtgtgccacgagctggagggccccatcagcagccaggagaccagcgccaccagcggcaccaagagaattgacctgagccgcatcagcctggagagcagcgccagcctggagggcagcctgagcaagtttgccctgcccgggaagtctgaggtgaccagcagcttcaatgccagcaacaccaacatcttccagaactatgccatggaggtgctgatcagcagctgcagccgctgcaggacctgtgactgcctggtgcatgatgaggagatcatggccggctggacagcagatgacagcaacctgaacaccacctgccccttctgtggcaacatcttcctgcccttcctgaacatcgagatccgggacctgcggcggcccggccgctacttcctgaagagcagccccagcacagagaacatgcacttccccagcagcatcagcagccagacccggcagagctgcatcagcaccagcgccagcggcctggacaccagcgccctgtctgtgcagggcaactttgacctgaacagcaagagcaagctgcaggagaacttctgcaccaggagcatccagatcccagccaacagaagcaagacagccatgagcaaatgtcccatcttccccatggcccggagcatcagcaccagcggccccctggacaaggaggacaccggccggcagaagctgatcagcacaggcagcctgcctgccaccctgcagggcgccacagacagcctgggcctggagtggcacctgcccagcccagaccctgtgacagtgccctacctgagccccctggtggtgtggaaggagctggagagcctgctggagaatgaaggagaccacgccatcaccgtggccgactttgtggaccaccaccccatcgtgttctggaacctggtgtggtacttccggcggctggacctgcccagcaacctgcccggcctcatcctgagcagcgagcactgcaacaagtacagcaagatccccaggcactgcatgtctgaggacagcaaatatgtgctgatccagatgctgtgggacaacatgaagctgcaccaggaccccggccagcccctgtacatcctgtggaatgcccacacccagaagtaccccatggtgcacctgctgcagaagagtgacaacagcttcaaccaggagctgctgaagtccatggtgaagagcatcaagatgaatgatgtgtatggccccatgagccagatcctggagaccctgaacaagtgcccccacttcaagaggcagaggagcctgtaccgggagatcctcttcctgagcctggtggccctgggcagagaaaatattgatattgatgcctttgacaaggagtacaagatggcctatgaccggctgacccccagccaggtgaagagcacccacaactgtgacaggcctcccagcactggagtgatggagtgcaggaagacctttggagagccctacctgtag

SEQ ID NO: 56138 - DNA, 5721 bp, Artificial Sequence
  derived and/or modified sequence
atgatcgaggacaagggcccccgggtggccgactacttcgtggtggccggcctcacggacgtgagtaagcctctggaagaagaaatacacttcaatgacgcgtgccacaaagttgccaaacctaaggagcctatcaccgatgtctccgtgatcataaagtctctgggcgaggaggtgccccaagactacatttgtatcgatgttaccccaaccggattgagcgcggacttgaacaacggcagcttagttggacctcaaatctacctgtgctataggcgcggtagagataagcctcccctgacagacctgggcgtgctctacgattggaaggagaggctcaagcagggctgtgagataatccagtccacgccatatggacggcctgcaaatatttcaggctctacttcctctcagaggatctacatcacctaccgcagagcctccgaaaatatgacccagaacacattggccgttaccgacatttgtattatcatcccgagtaaaggcgagtcccccccccataccttctgtaaggtggataaaaacctgaacaattctatgtggggttctgcagtgtacttgtgttacaagaaaagcgtggccaaaacaaataccgttagttacaaggcaggcctgatttgccgctacccccaggaggactatgaatccttctctctccctgagtccgtccccctattctgcttgccaatgggcgcgaccatagaatgctggccttccaactccaagtatcctctacctgtgttcagcacgttcgttctgaccggcgcctcagcagagaaagtgtacggagcagcgatacagttctatgagccatatagcgaagagaatctgacagagaaacagaggctgctgctgggcctgactagcgctgatggaaaatctgacagttctaaaacaatccatacaaacaaatgtatctgtctccttagtcattggccatttttcgacgctttccgaaagttcttaaccttcctgtaccgctacagcatatccggcccccacgtgctgcctatcgagaagcacatatcccacttcatgcataaagtacctttcccttcgccacaaaggcctcgcatcctggtgcagctgagtccacacgataaccttatcttaagtcagcctgtttcatctccattgcccttatccggcgggaaattctcaaccttactacagaacttgggcccagaaaatgcagtgacacttctagtgttcgcagtaaccgaacacaagatccttattcactcattaagacctagcgttttgacatccgtgaccgaggccctggtgagcatgattttccccttccactggccatgcccatacgtccctctgtgtcctctggccctggccgatgtcctcagcgctccatgcccttttatcgtggggatagatagccgctactttgacttatacgatccaccccccgatgtctcttgcgtggacgttgacacaaatacaatctcccagatcggtgacaaaaagaatgtcgcctggaagattttacccaaaaaaccatgcaagaacctgatgaacaccctgaataacctccatcagcagctagccaaactccagcagaggcctagagacgacggattaatggatctggcgatcaacgactacgacttcaattccggcaagagactgcatatgatcgatctggagatccaggaggcttttctattcttcatggccagcatcctgaaaggatatcgaagctatctgaggcctattacccaggcgccttcagaaaccgctactgatgcagcttctctgttcgctctgcaggcttttctgaggagccgagacaggtcccaccaaaagttttataacatgatgaccaaaacacagatgttcatcagattcattgaagagtgcagctttgtgtctgacaaagacgcaagccttgcttttttcgacgactgtgtggacaaagtcgacatggacaagagtggggaagtgaggctgatcgaactggacgagagtttcaaaagcgagcataccgttttcgtcacccctcccgagattccccacctgcccaacggcgaggaacccccactgcagtactcttacaatgggtttcctgtcttgcgtaacaatctgtttgagcggcccgagggatttcttcaggcgaagaagaataagctgccttccaaaagctccagtcccaactcacctctgcccatgtttcggagaactaagcaggaaattaagtctgcccacaagatcgcgaagcgctatagttccattccacaaatgtggtccaggtgtctgctgcgccattgctatggcctctggttcatctgcttgccggcatacgtaaaggtttgccactcaaaggtcagggctttgaaaaccgcatacgacgtgctgaagaagatgcagtctaaaaaaatggaccctccggatgaggtctgctaccgaattctgatgcagctgtgtggacagtatgatcagcccgtgctggccgtccgcgtactttttgaaatgcagaaagccgggatcgacccaaatgccatcacttacgggtattacaacaaagctgtgctggagtcaacttggccctccagaagtcggagcggatattttctctggaccaaagttcgcaacgtggtgctcggggtgacccagttcaagagagcactcaaaaaacacgcccatctttcacagacaaccttatcagatgggtcagatctggacgcagttagccatgggagtatggactctggacacggtacgcacactgtggagcaagctccttttaatacagggctgattaaagtctatgcaactgacgaccgatcaagcacaggtggacagagtgaccttggctacaattctcttagcaaggatgaagtcaggcgtggtgacacatccactgaggacatccaggaagagaaggataagaagggatcggactgttcctcactatctgaatctgagagcacaaagggttctgccgactgtttgccaaaattgtcttatcaaaatagtagttccattgtgcggcttacaggcactagcaataatagtgctggcaagatctcaggtgaatccatggaatctactcctgagttattactaatctccagccttgaggacacaaacgagacccgaaatatacaatctcggtgttttaggaagcggcataaaagcgataatgaaacgaatcttcagcagcaggtcgtgtggggaaatcgaaatcggaatctatctggcggggttcttatgggcttcatgctcaatagaatcaatcaggaggccaccccgggggatatagtggaaaagttgggcgcggacgctaagattctgtcaaatgtcatcagcaagagcacgagacctaacacactggatatcgggaaaccccctctgaggtccaaacgagattcactggaaaaagagagctccgatgatgatacgccctttgacggcagcaactatctggccgataaggtcgacagcccggtgatttttgatctggaagatcttgacagcgagactgatgtgtctaaggccggctgcgtggccacccaaaatccaaagagaatccagcgcatgaactcttctttctccgtgaaacctttcgagaagactgacgtggccaccggatttgaccccctgtcactgctcgtagccgagacagaacaacagcaaaaggaagaagaagaagaggatgaggatgactccaagtctatctcaaccccttcagcacgacgcgatctagccgaggagatcgttatgtacatgaacaacatgagttctccactaaccagtcgcacaccgtctatcgacttacagcgcgcctgcgacgacaaactgaataaaaagtcgcctccgctcgtcaaagcctgcaggcggtcctctttgccaccgaatagccccaaacctgtgaggctgaccaagtctaagtcatatacaaagtctgaggaaaagccacgggatcgtctgtggtcctccccggctttcagcccgacttgtccgttccgggaggaatcacaggacactctgacccattctagcccaagttttaacctggatacactgttggttcccaagctggatgtgcttagaaacagcatgtttacggctggaaagggagtggctgagaaggcatccaagtggtattccagatttacaatgtacacgacgagtagtaaagatcagagctcggatcgtacctctctcagctccgtcggagcacaggattcggagagcacttccctcacagacgaggatgtgtgtcacgaacttgagggtcccatctctagtcaggagacgtctgctacgtccggcacaaagcggatagacttatcaagaatatccctggagagtagtgcttcactcgaggggtctctgtctaagttcgccttacctggaaagtccgaggtgacaagctcatttaacgcttcaaacaccaacatcttccaaaattatgctatggaggtattgatctctagttgcagccgttgtagaacatgcgactgccttgttcacgacgaggagattatggcagggtggacagcagacgattcaaacttgaatacaacctgcccattttgtggtaacatctttttaccgttcctcaatatcgaaattcgtgatctccgcaggcctggccgatattttctgaaaagcagtcccagcaccgaaaatatgcatttcccaagctccatttcctcgcagacaaggcagtcttgcatttccacctccgcttcaggactcgatacctctgctctctccgtgcaaggcaactttgatcttaatagtaagagcaaactccaggagaatttttgtactcgctctatacaaattcctgccaatcgatcgaagaccgccatgtcgaaatgccccatctttcccatggccaggtctataagcacatccgggcctctggataaggaggatacagggagacagaagctgatctctacagggtcacttccagccacgctgcagggcgcaactgactccctgggcttggagtggcacctgccatcccctgatcctgttactgtgccctacctgtctccactcgttgtgtggaaagaattggaatctctcctggagaatgaaggggatcacgccatcacagtcgcagatttcgtggatcaccatcctatcgtcttttggaatctggtgtggtattttcgcaggttagatcttcctagcaaccttcccggtcttatactgagcagcgaacactgtaataagtattccaaaatcccgcgacactgtatgtccgaggacagtaaatacgtgctgatacagatgctgtgggacaatatgaaactccatcaggatcctggacagccactgtatattctttggaacgcacacacacagaagtatccaatggtacatttactgcagaagagcgataacagctttaaccaagaactcctgaagtccatggtgaaatctattaagatgaatgacgtctatggaccgatgtcacagatcctggagactctgaacaagtgcccacactttaagcgacaacggtcattatacagggaaatcctgtttcttagtctcgtggccctgggacgggaaaacattgacatcgacgcatttgacaaggaatataagatggcttacgataggctgacaccatcacaggttaaaagcacacacaattgtgacaggccaccgtcaacaggggttatggaatgccgaaagacattcggagagccctatttgtag

SEQ ID NO: 56139 - DNA, 5720 bp, Artificial Sequence
  derived and/or modified sequence
atgatagaggataaagggcctagggtggctgattacttcgtcgtcgctggtctgacagacgtctctaagcctctggaggaagaaattcacttcaacgatgcgtgtcacaaagtggccaaacccaaagagccaatcactgatgtgagcgtgatcatcaagtcccttggggaagaagtgcctcaagattatatttgcattgacgtcaccccgaccgggctcagtgcagatctgaacaatggatcactcgtgggccctcagatatatctgtgttatcgaaggggacgggacaagccaccattgacggatcttggggtcctatacgattggaaagaaaggctcaaacaagggtgcgaaattatccagagcacaccttacggtaggccggctaacatttccggtagcacttccagccagcgaatttatattacttatcggcgagcctctgagaacatgactcagaatacgttggctgtgaccgacatttgtatcattatcccctctaaaggcgaaagccccccacacaccttctgcaaagttgacaagaacctgaacaactctatgtgggggtccgccgtttacctgtgttacaagaaaagcgtggctaagaccaacaccgtgagttataaggccggtctgatttgcagatatccccaggaggactatgaatctttctctctgcccgagagcgtccccttgttctgtttgcctatgggagcgactattgaatgttggcctagtaattcgaagtacccactccctgtgttttccacctttgtgcttactggagcttcggcggaaaaggtctacggagcagccattcagttttatgagccgtattccgaggaaaacttgactgaaaagcaaagactgctgctgggcctgacatctgcggacggtaagtcggactcctctaagaccatccacaccaataagtgcatatgtctcctttctcattggcccttcttcgatgcgtttcgtaagttcctgacattcctgtaccgctattctatcagcgggccacatgtgttaccaattgaaaaacacatcagtcacttcatgcacaaagtcccattccccagcccacagcgccctcgaatcctggtccaacttagcccccacgacaacttaattctctcccaacccgtgagcagtccactgccactctccggcggaaagtttagcactctgctccagaacttggggccagaaaacgctgtgaccctgcttgtgtttgctgtgactgagcacaagatcctgatccacagcctgcgcccaagtgtgctaacgagtgtgacggaggcgctggtcagtatgatctttccatttcattggccatgcccttatgtgcctctgtgccccctcgcattggcagacgtgctttcggctccctgcccatttattgtcggcatagacagtaggtactttgacttgtacgacccaccacccgatgtgagctgtgtagacgtcgacactaataccatttcacagattggagataagaaaaacgtagcctggaaaatcctccctaaaaagccctgtaaaaacctgatgaacacactgaacaatcttcatcagcagctggccaagcttcagcagcgcccacgcgatgatggccttatggatcttgctatcaatgactatgacttcaacagcggcaaaaggctgcacatgatcgatcttgaaattcaggaggcgttcctgttttttatggcatctatacttaagggttaccggtcctacttgcggcctatcacacaggccccaagcgagaccgctacggatgccgcaagtcttttcgccctgcaggcattcctaaggtccagagaccggtcccatcaaaagttctacaatatgatgactaaaactcagatgtttatccgcttcattgaggagtgtagtttcgtatcagataaggatgcaagcctggcctttttcgatgactgtgtggacaaagtggatatggacaagagcggtgaggtccgattgatcgagttggacgaatcattcaaatcagagcacacagtgttcgtgacacccccagagatccctcatctgcctaatggagaggagcccccactccaatactcctacaacgggtttccagtcctaaggaacaacctgttcgagaggcctgagggtttcttacaagccaagaaaaacaagctgcctagcaagagttcctctcccaattcaccactgcccatgtttagacgcacgaagcaggaaataaaatcagctcataagatcgcaaaacgttactcctccatcccccagatgtggtccagatgcctgttacggcactgttacgggctctggtttatatgtctgccggcttatgttaaggtgtgtcatagcaaggtccgcgcactgaagactgcttatgacgtgctgaaaaagatgcagtccaagaaaatggatcctcctgatgaggtatgctacaggattctgatgcagttgtgtgggcagtacgaccagcccgtgctcgcagtaagggtgctgtttgaaatgcagaaagccggtatcgaccccaatgccatcacttatggctactacaataaagcagtgctcgagtccacttggcctagcagatctcggtcagggtactttttatggactaaggttagaaacgttgttctgggtgtaacgcaattcaaacgagcactgaagaagcacgcacatctgagccaaacaacgttaagcgacggttcagacctggatgctgtctcacatggatccatggactccggtcatggcacccataccgtggagcaagccccatttaacacagggctgatcaaagtctacgcgacggacgaccggtcctccacagggggacagtccgatctgggctataactctctcagcaaggacgaggttcgcaggggagacacgtccactgaagatatccaggaggagaaggataaaaaggggagtgattgcagcagcctgagcgaatcagaatccactaaggggagtgcagattgcctgcccaagttaagttatcagaactcctcgagcattgtccggttgaccggtacttccaataatagcgctggcaaaatctcaggtgagagcatggagtcaactccggagctcctcctgatttcttctttagaggatacaaacgaaacaaggaacatccaatcacgctgctttagaaaacgccacaaatcagataacgaaaccaacctgcaacagcaagtagtgtgggggaatagaaaccgtaacttgagcgggggagtgctgatgggctttatgctcaatcgtatcaaccaggaggccactcctggagacattgtggagaagcttggcgctgacgcaaagatcctatctaatgtgatctcaaaatctacacggcctaatacactggacatcggcaaaccccctctgagaagcaagcgggatagtttggagaaagagtccagcgacgacgatacaccatttgatggatctaactatcttgctgataaagttgattctccggtaatattcgacctggaggatcttgatagcgagacggatgtgtcaaaggccggatgcgtcgccacccaaaatcctaaaaggattcagcgcatgaactcaagtttcagcgtcaagcccttcgagaaaaccgacgtcgctactgggttcgatccactttctctgttagtggcagagaccgaacaacaacagaaggaggaggaagaggaagacgaggacgacagcaaaagcattagtacccctagcgctcggagagaccttgcggaggagattgtcatgtatatgaataacatgtcgagccccctgacatcgagaacacccagtatcgatcttcagcgggcttgtgatgataagctgaacaagaagtccccccctctggtgaaagcttgccgtcggagctctttgccccctaacagtcctaagccggttagactcaccaagtcaaagagttacacaaaatcggaagagaagccacgggaccggctttggtctagccctgcatttagcccaacctgtcctttcagggaagagagccaggacaccttgacccactcttcaccatcttttaatctggatacgctgctcgtcccgaagttggacgtgcttagaaatagcatgtttacagccggtaagggcgtagccgaaaaagccagtaagtggtattccagattcacaatgtataccacttccagtaaggatcagagttctgaccggacatctctgtcttccgttggagcacaggattctgaatccacatcacttactgacgaagacgtctgtcacgaacttgagggaccaatctccagccaagagacctccgctacatccggtacaaagagaatcgatttatctaggatctctctagaatcttcagcctccctcgaaggctcactttcgaagtttgccctcccaggaaagtcggaggtcacctcatcgtttaatgcttcaaacacaaatatcttccagaattacgccatggaggtgctgatctctagctgttcccgatgccgcacctgcgactgtttggtgcacgatgaggagataatggctggatggacggcagacgatagcaacctgaatactacctgtcccttttgcggtaatatcttcttgccttttctaaatattgagattagggacctccgtcgccctggtaggtacttcttgaagtcatccccttctactgagaacatgcacttcccctcctctatttcgtcccagactagacaatcatgcattagtacttcagcaagtgggctcgacactagcgctctgagcgtgcagggcaattttgacttgaattctaaatccaaattgcaagaaaacttctgcacaagaagcatccaaattcccgcaaatcgttccaaaaccgccatgagcaagtgtcccattttccccatggcacgctctatttccacatccggtcccctggacaaagaagatacaggccgacagaaactgatttcaaccggtagccttcccgctacccttcagggagcaactgactctctcgggctagagtggcatctgcctagtcccgaccctgtgaccgtcccctaccttagtcctctggtcgtatggaaggagttggaaagccttttggagaatgagggtgaccatgcaatcactgtcgccgattttgtggaccaccatccgattgtgttctggaatctcgtttggtactttcgacgtttggacctgccaagcaatctgcctgggctgattctttcttcggagcattgcaataagtattctaagatccctcggcattgtatgtccgaggactccaagtatgttttgatacagatgctttgggataacatgaagctccaccaggaccccggacagccactctacattctctggaacgcgcatacacagaaatacccgatggtacacctgctgcagaaatcagacaactcattcaaccaggaactcctgaaatctatggtgaagtccatcaagatgaacgacgtgtatggccctatgagccagatcctcgagacattgaacaaatgccctcacttcaagagacagcgatcactctatcgagagattctttttctctctctggtagcactgggcagggaaaacatcgacattgacgcctttgataaggagtacaagatggcctatgatcgcttgacacctagccaggtgaagtcaacccataactgcgatcgacctccatccacgggcgtcatggaatgccgaaaaacattcggagagccgtatctcta

SEQ ID NO: 56140 - DNA, 7336 bp, Artificial Sequence
  derived and/or modified sequence
attgccaagatggcgccggtcgcggtggccgcggaggctagagtcggagaaagaggcggaggcagtggcggccgcgaggggagggggagtcccgtctgactgagacggcaggcctgggcgggcgggcgggggtgccgcgaagggcggagcgccgggctggggatgagctaagcgggctcagagcgccgcggcattcagcccctcgtgttccgctaccgcgcgtgcgggattccggcgccgctctccgagctcgatccgctgctcgcacgggagccagctgggtgttatttctcaaactctgaggctgcggagttcacacattgaaatctgtcatctttttcagagagaaactttcggtaatgtatgtaaccttctgtaatggaagatgattgaagacaaggggcctcgtgttgctgactactttgttgtagcaggattaactgatgtttcaaagcctctagaagaagaaattcacttcaatgatgcttgtcataaagtagctaaaccaaaagaacctattacagatgtttcagttattatcaaatctcttggggaggaagtcccacaggattatatctgtattgatgttaccccaactggattgtcagctgatcttaataatggaagtcttgtggggccacagatttacctttgctatagaagaggaagagataagcctccacttacagatctgggggttttatatgactggaaagaaagattgaaacagggttgtgaaattattcagagtactccctatgggcgccccgcaaatattagtgggagtacctcatcacaaagaatttatatcacttaccgaagagcctctgaaaacatgactcagaatacgttggctgtcactgacatatgtattattatacccagtaaaggagaaagcccaccacacacgttctgcaaagtcgacaagaatctcaataacagtatgtggggatcagcagtatacttgtgttataaaaaatcggtggcaaagacgaacactgtatcttacaaagctggcctaatttgtagatatcctcaagaagattatgagtcattctcactaccggaatctgttcctctattttgtttaccaatgggtgcaaccattgaatgttggccatcaaatagcaaataccctctgcctgtattttctacttttgttttaactggagcctcagctgaaaaggtttatggtgctgctattcagttttatgaaccatactctgaggagaatctcacagaaaagcagagacttcttttgggtttaacatcagcagatgggaagtctgatagttccaaaacaattcatactaacaaatgcatctgtcttctttctcactggcctttttttgatgcattcaggaagtttctgacttttctgtatcgttattccatctctgggcctcatgtccttccaattgagaagcatatttctcattttatgcataaagttccttttccatctcctcagagaccacggattttagttcagttatcaccacatgataatctgattctcagtcagcctgtgtcttcacctcttccactaagtggtggcaagttttcaacactactgcagaatttaggccctgaaaatgctgtgacactactggtgtttgcagtaacagaacataaaattcttatccattccctacggccatccgtgcttactagtgtgacagaagcattagtgtctatgattttccctttccactggccatgcccgtatgttcctctctgcccactggctttagcagatgtcttgagtgcaccatgtccattcatagtagggattgattcaagatactttgatctctatgatcctccaccagatgtcagttgtgttgatgtagataccaacactatttctcaaattggtgacaagaaaaatgtagcctggaagatacttccaaagaagccatgtaaaaatctgatgaacacactgaataatttgcatcagcaattggcaaaattgcagcagagaccgagagatgatggactcatggatttagcaataaatgactatgattttaattctggaaagaggttgcacatgatagatttggaaatccaagaggcatttttgtttttcatggcctctattttaaaaggttacagatcatacttaaggccaataacacaagccccatctgagacagccacagatgcagcctctctctttgccctacaagctttcttaagaagccgggaccggtcacatcaaaaattctataacatgatgaccaaaacacaaatgtttattcgcttcattgaagaatgttcttttgttagtgacaaagatgcaagcctggcattttttgatgattgtgtagataaagtggatatggacaagagcggtgaagtacgacttatagaactggatgaatctttcaaaagtgaacacactgtttttgtaacaccacctgagatcccccacctacccaatggtgaagaaccccctttacagtacagctataatggatttccagttcttaggaacaatttatttgaaagacctgaaggatttctacaagcaaagaagaacaaattgccttcaaaatcaagtagtcctaatagccctttgcccatgttcagaagaacaaaacaggaaattaaatcagcccataaaattgcaaagaggtactcttccatccctcagatgtggtctaggtgtctactgcgccactgttatggactgtggtttatttgtctcccagcttatgtgaaagtctgtcattcaaaagtcagggctctgaaaacagcatatgatgtgcttaaaaaaatgcagtcaaagaagatggatccacctgatgaggtatgctaccgcattcttatgcaactctgtggacaatatgatcagccagtgcttgcagttcgagtgctttttgaaatgcagaaagctggtattgaccccaatgccattacttatggttattataataaggctgttttggaaagtacctggccttcaagaagtcgtagtggctattttctttggacaaaagtaagaaatgttgttttaggagtaacacagttcaaaagagctttaaagaagcatgcacacttatcacaaacaactctctcagatggcagtgacctggatgctgttagtcatggcagcatggatagtggtcatgggacacacactgtggagcaggcaccttttaatacgggtttaatcaaagtatatgctactgatgatagatctagtacaggtggccagtctgatcttggatataattcattatctaaagatgaagttagaagaggggatacatctactgaagacattcaagaagaaaaagataaaaaagggagtgattgtagttccttgtcagagagtgagagtacaaaaggaagtgctgattgccttcctaagctcagttatcaaaattcttccagtatcgttcgcctcactggtacaagtaacaacagtgctggtaaaatatcaggagaaagcatggaaagcacacctgagctgctcttaatatcatctcttgaagatacaaatgaaacacgaaacattcaaagtagatgcttcaggaaaagacataaaagtgacaatgaaactaatttgcagcagcaagtggtctggggaaatagaaaccgtaatcttagtggaggggtactgatgggatttatgctcaatagaattaaccaggaagcaacccctggagatatagttgaaaaattgggagctgatgcaaaaattctttcaaatgttatctcaaaaagcacgagaccaaatactcttgatattgggaagccacctttaagatcaaaaagagacagtctagaaaaggaatctagtgatgatgatacaccttttgatggttctaactatttggcagataaagtggattctcctgttatttttgacttagaagacttagacagtgaaacagatgtatcaaaagcaggatgtgttgctacacaaaatcccaagaggattcaacgtatgaacagcagcttttcagtaaaaccttttgaaaaaactgatgtcgcaacaggatttgatcccctctctcttttggttgctgagactgaacagcagcaaaaagaagaagaggaggaggatgaagatgatagcaaaagcatttcaacaccatctgctaggcgtgatttagctgaagaaattgtgatgtatatgaataacatgagcagtcctttgacaagtcgtacaccaagcattgatttacaacgggcatgtgatgataaattaaataagaaaagtccaccattggtcaaggcatgcagaagatctagtctgcctcctaattctcctaagccagtgagacttaccaaatctaaaagttacacaaaaagtgaggagaaaccaagggatagactttggtcttctccagccttctcacctacttgcccatttagggaagaatctcaggatacattaacccactcatcaccttcatttaacttagatacactactagtacctaaactagatgttctaagaaacagtatgttcactgctggaaaaggagttgcagagaaagcaagcaaatggtattcaagattcaccatgtacaccacatcatctaaggatcaaagttctgatcgtaccagtctttcttcagtgggagcccaggattctgaatctacctctttaacagatgaagatgtctgccatgagttggaaggacctatctcctctcaagagaccagtgctacttcagggactaagagaattgatctcagccgaataagcctggaaagttctgcatccttggaaggatctctgtcgaagtttgccttacctgggaaatcagaagtgacatcttccttcaacgcgagtaatacaaatatcttccagaactatgcaatggaggttctcatctcaagttgctctcggtgtagaacttgtgattgtcttgtccatgatgaggaaatcatggctggctggacagcagatgattcaaatctcaatactacatgcccattctgtggcaatatcttcttaccctttctgaatatagaaataagagatttaagacgacctggaagatactttctaaagtcaagcccatcaacagaaaatatgcactttccatcctccatttcaagtcagacgaggcagtcttgcatttcaacatcagcctctggtcttgacacatctgctctctctgttcaagggaattttgatctaaatagcaaatctaaactgcaggaaaatttttgcacccgaagtattcagatccctgctaatagatcaaaaacagctatgtctaaatgtccaatatttccaatggccaggagtattagtacttctggccccttggataaggaagatactggaagacagaagctcatttctacaggcagcctgccagctactttacaaggagctacagattctttaggtttagaatggcaccttccaagtcccgatcctgtcactgttccgtatcttagtcctttagtggtatggaaagaacttgaaagcttattggaaaatgaaggtgatcatgcaataacagtagcagactttgtggaccatcatccaattgttttttggaacctggtatggtatttcagacgtcttgacttgcccagtaacttacctggattgattctttcttctgagcactgtaacaagtattcaaagattccccgccactgtatgtctgaagatagcaaatatgttttaatacaaatgttatgggacaatatgaagttacatcaggatccgggacagcccttgtacattctctggaatgcacacacccaaaaatatccaatggtccatttattgcaaaaaagtgataactcatttaaccaggaactgttgaaaagtatggtaaaaagcattaaaatgaatgatgtctatggaccaatgagtcagattttagagacactgaataagtgtccacattttaaaagacagaggagtttatacagagaaatactatttctctcacttgtggcactgggaagagaaaacattgatatagatgcttttgataaagagtacaagatggcatacgatcgtctcacacctagtcaagtcaagagtacacacaactgtgatagaccaccaagtacaggggtgatggaatgtcgaaaaacctttggagaaccttatctttaagatgtatttgtatgtgtaaacattcaatgtatattgtatagtcagtgtataaaataacacttttagactctaaatattttttcttcaatttttgaaaatacaatttgtaaatggttcaaaagactcagacagcttatgtacagaatgtttgaagaagagaatagtgacaagtggggagaaagccactttgtttctcatttcttttttcttcttctttaactcccctgtaataggaaataaagtatttttgtgatgaggaaatccctaaacaaaattagttgccataaaatatgacaactgctttatggtttcttttggaagagacagattgaaaaatcatgaatggaatctaaacagaaatgtcagatgaacgtatttcctgttttcatagactattcaaatgttttgaccatgaagttgtattatacatattttaaattgtttatagtaagttgatatttttttaatttttaaatttaatatagcaaacttaaaatgaatttaaacttaagcaagcaagcgtgtattttccttgtctgctgctatttgaagtaattagtacagctgcagatctctctgtgtatatctatctatatatatattttttattacttgggagaatgaattttaaaatgtcagtgctagtgtcaagtgttgtcctaggattgcatgttagtacccctaagcctgagtgtggggagtgagttatgcaagggtagcgtgcactgcccagactgactcatggagccttgtgcaaggagagccagagaggttcactataccatgactccaaaattgtctctattgctaatagatacgtatagtatacagggaaaacagcttataaatccaaatatcaatttaaattttaatattctacatgaaaacttacattgggaaatatgcagacaagtgattatattccaaattttacccttattttaatatctaaaatattgggtatgatgcaaattatactatagaatatttatctgaaatatgacttactggggtattctgttaatactatatataaatattcagaatttttttcaaaagtagaaaaattcccctctaaaagtacagccagatagattttcatccatattgaggaacttagctttttcaacaagcttcagaatctgaagtctgtagaatctaaaatacagaaatatccagaaatcagacaataaattgaaagtttagacatcatgagtattaaatagcttt

SEQ ID NO: 56141 - DNA, 5721 bp, Artificial Sequence
  derived and/or modified sequence
atgatcgaggacaagggccccagagtggccgactacttcgtggtggccggcctgaccgacgtgagcaagcccctggaggaggagatccacttcaacgacgcctgccacaaggtggccaagcccaaggagcccatcaccgacgtgagcgtgatcatcaagagcctgggcgaggaggtgccccaggactacatctgcatcgacgtgacccccaccggcctgagcgccgacctgaacaacggcagcctggtgggcccccagatctacctgtgctacagaagaggcagagacaagccccccctgaccgacctgggcgtgctgtacgactggaaggagagactgaagcagggctgcgagatcatccagagcaccccctacggcagacccgccaacatcagcggcagcaccagcagccagagaatctacatcacctacagaagagccagcgagaacatgacccagaacaccctggccgtgaccgacatctgcatcatcatccccagcaagggcgagagccccccccacaccttctgcaaggtggacaagaacctgaacaacagcatgtggggcagcgccgtgtacctgtgctacaagaagagcgtggccaagaccaacaccgtgagctacaaggccggcctgatctgcagatacccccaggaggactacgagagcttcagcctgcccgagagcgtgcccctgttctgcctgcccatgggcgccaccatcgagtgctggcccagcaacagcaagtaccccctgcccgtgttcagcaccttcgtgctgaccggcgccagcgccgagaaggtgtacggcgccgccatccagttctacgagccctacagcgaggagaacctgaccgagaagcagagactgctgctgggcctgaccagcgccgacggcaagagcgacagcagcaagaccatccacaccaacaagtgcatctgcctgctgagccactggcccttcttcgacgccttcagaaagttcctgaccttcctgtacagatacagcatcagcggcccccacgtgctgcccatcgagaagcacatcagccacttcatgcacaaggtgcccttccccagcccccagagacccagaatcctggtgcagctgagcccccacgacaacctgatcctgagccagcccgtgagcagccccctgcccctgagcggcggcaagttcagcaccctgctgcagaacctgggccccgagaacgccgtgaccctgctggtgttcgccgtgaccgagcacaagatcctgatccacagcctgagacccagcgtgctgaccagcgtgaccgaggccctggtgagcatgatcttccccttccactggccctgcccctacgtgcccctgtgccccctggccctggccgacgtgctgagcgccccctgccccttcatcgtgggcatcgacagcagatacttcgacctgtacgaccccccccccgacgtgagctgcgtggacgtggacaccaacaccatcagccagatcggcgacaagaagaacgtggcctggaagatcctgcccaagaagccctgcaagaacctgatgaacaccctgaacaacctgcaccagcagctggccaagctgcagcagagacccagagacgacggcctgatggacctggccatcaacgactacgacttcaacagcggcaagagactgcacatgatcgacctggagatccaggaggccttcctgttcttcatggccagcatcctgaagggctacagaagctacctgagacccatcacccaggcccccagcgagaccgccaccgacgccgccagcctgttcgccctgcaggccttcctgagaagcagagacagaagccaccagaagttctacaacatgatgaccaagacccagatgttcatcagattcatcgaggagtgcagcttcgtgagcgacaaggacgccagcctggccttcttcgacgactgcgtggacaaggtggacatggacaagagcggcgaggtgagactgatcgagctggacgagagcttcaagagcgagcacaccgtgttcgtgaccccccccgagatcccccacctgcccaacggcgaggagccccccctgcagtacagctacaacggcttccccgtgctgagaaacaacctgttcgagagacccgagggcttcctgcaggccaagaagaacaagctgcccagcaagagcagcagccccaacagccccctgcccatgttcagaagaaccaagcaggagatcaagagcgcccacaagatcgccaagagatacagcagcatcccccagatgtggagcagatgcctgctgagacactgctacggcctgtggttcatctgcctgcccgcctacgtgaaggtgtgccacagcaaggtgagagccctgaagaccgcctacgacgtgctgaagaagatgcagagcaagaagatggacccccccgacgaggtgtgctacagaatcctgatgcagctgtgcggccagtacgaccagcccgtgctggccgtgagagtgctgttcgagatgcagaaggccggcatcgaccccaacgccatcacctacggctactacaacaaggccgtgctggagagcacctggcccagcagaagcagaagcggctacttcctgtggaccaaggtgagaaacgtggtgctgggcgtgacccagttcaagagagccctgaagaagcacgcccacctgagccagaccaccctgagcgacggcagcgacctggacgccgtgagccacggcagcatggacagcggccacggcacccacaccgtggagcaggcccccttcaacaccggcctgatcaaggtgtacgccaccgacgacagaagcagcaccggcggccagagcgacctgggctacaacagcctgagcaaggacgaggtgagaagaggcgacaccagcaccgaggacatccaggaggagaaggacaagaagggcagcgactgcagcagcctgagcgagagcgagagcaccaagggcagcgccgactgcctgcccaagctgagctaccagaacagcagcagcatcgtgagactgaccggcaccagcaacaacagcgccggcaagatcagcggcgagagcatggagagcacccccgagctgctgctgatcagcagcctggaggacaccaacgagaccagaaacatccagagcagatgcttcagaaagagacacaagagcgacaacgagaccaacctgcagcagcaggtggtgtggggcaacagaaacagaaacctgagcggcggcgtgctgatgggcttcatgctgaacagaatcaaccaggaggccacccccggcgacatcgtggagaagctgggcgccgacgccaagatcctgagcaacgtgatcagcaagagcaccagacccaacaccctggacatcggcaagccccccctgagaagcaagagagacagcctggagaaggagagcagcgacgacgacacccccttcgacggcagcaactacctggccgacaaggtggacagccccgtgatcttcgacctggaggacctggacagcgagaccgacgtgagcaaggccggctgcgtggccacccagaaccccaagagaatccagagaatgaacagcagcttcagcgtgaagcccttcgagaagaccgacgtggccaccggcttcgaccccctgagcctgctggtggccgagaccgagcagcagcagaaggaggaggaggaggaggacgaggacgacagcaagagcatcagcacccccagcgccagaagagacctggccgaggagatcgtgatgtacatgaacaacatgagcagccccctgaccagcagaacccccagcatcgacctgcagagagcctgcgacgacaagctgaacaagaagagcccccccctggtgaaggcctgcagaagaagcagcctgccccccaacagccccaagcccgtgagactgaccaagagcaagagctacaccaagagcgaggagaagcccagagacagactgtggagcagccccgccttcagccccacctgccccttcagagaggagagccaggacaccctgacccacagcagccccagcttcaacctggacaccctgctggtgcccaagctggacgtgctgagaaacagcatgttcaccgccggcaagggcgtggccgagaaggccagcaagtggtacagcagattcaccatgtacaccaccagcagcaaggaccagagcagcgacagaaccagcctgagcagcgtgggcgcccaggacagcgagagcaccagcctgaccgacgaggacgtgtgccacgagctggagggccccatcagcagccaggagaccagcgccaccagcggcaccaagagaatcgacctgagcagaatcagcctggagagcagcgccagcctggagggcagcctgagcaagttcgccctgcccggcaagagcgaggtgaccagcagcttcaacgccagcaacaccaacatcttccagaactacgccatggaggtgctgatcagcagctgcagcagatgcagaacctgcgactgcctggtgcacgacgaggagatcatggccggctggaccgccgacgacagcaacctgaacaccacctgccccttctgcggcaacatcttcctgcccttcctgaacatcgagatcagagacctgagaagacccggcagatacttcctgaagagcagccccagcaccgagaacatgcacttccccagcagcatcagcagccagaccagacagagctgcatcagcaccagcgccagcggcctggacaccagcgccctgagcgtgcagggcaacttcgacctgaacagcaagagcaagctgcaggagaacttctgcaccagaagcatccagatccccgccaacagaagcaagaccgccatgagcaagtgccccatcttccccatggccagaagcatcagcaccagcggccccctggacaaggaggacaccggcagacagaagctgatcagcaccggcagcctgcccgccaccctgcagggcgccaccgacagcctgggcctggagtggcacctgcccagccccgaccccgtgaccgtgccctacctgagccccctggtggtgtggaaggagctggagagcctgctggagaacgagggcgaccacgccatcaccgtggccgacttcgtggaccaccaccccatcgtgttctggaacctggtgtggtacttcagaagactggacctgcccagcaacctgcccggcctgatcctgagcagcgagcactgcaacaagtacagcaagatccccagacactgcatgagcgaggacagcaagtacgtgctgatccagatgctgtgggacaacatgaagctgcaccaggaccccggccagcccctgtacatcctgtggaacgcccacacccagaagtaccccatggtgcacctgctgcagaagagcgacaacagcttcaaccaggagctgctgaagagcatggtgaagagcatcaagatgaacgacgtgtacggccccatgagccagatcctggagaccctgaacaagtgcccccacttcaagagacagagaagcctgtacagagagatcctgttcctgagcctggtggccctgggcagagagaacatcgacatcgacgccttcgacaaggagtacaagatggcctacgacagactgacccccagccaggtgaagagcacccacaactgcgacagaccccccagcaccggcgtgatggagtgcagaaagaccttcggcgagccctacctgtag

SEQ ID NO: 56142 - protein, 299 aa, Artificial Sequence
  derived and/or modified sequence
MAQNLKDLAGRLPAGPRGMGTALKLLLGAGAVAYGVRESVFTVEGGHRAIFFNRIGGVQQDTILAEGLHFRIPWFQYPIIYDIRARPRKISSPTGSKDLQMVNISLRVLSRPNAQELPSMYQRLGLDYEERVLPSIVNEVLKSVVAKFNASQLITQRAQVSLLIRRELTERAKDFSLILDDVAITELSFSREYTAAVEAKQVAQQEAQRAQFLVEKAKQEQRQKIVQAEGEAEAAKMLGEALSKNPGYIKLRKIRAAQNISKTIATSQNRIYLTADNLVLNLQDESFTRYSDSLIKGKK

SEQ ID NO: 56143 - protein, 299 aa, Artificial Sequence
  derived and/or modified sequence
MAQNLKDLAGRLPAGPRGMGTALKLLLGAGAVAYGVRESVFTVEGGHRAIFFNRIGGVQQDTILAEGLHFRIPWFQYPIIYDIRARPRKISSPTGSKDLQMVNISLRVLSRPNAQELPSMYQRLGLDYEERVLPSIVNEVLKSVVAKFNASQLITQRAQVSLLIRRELTERAKDFSLILDDVAITELSFSREYTAAVEAKQVAQQEAQRAQFLVEKAKQEQRQKIVQAEGEAEAAKMLGEALSKNPGYIKLRKIRAAQNISKTIATSQNRIYLTADNLVLNLQDESFTRGSDSLIKGKK

SEQ ID NO: 56144 - DNA, 900 bp, Artificial Sequence
  derived and/or modified sequence
atggcacagaacctaaaggatctggccggccggctgcccgcagggccgcggggcatgggcaccgccctaaagctgttgttgggggctggcgcagttgcctatggcgttcgagagagcgtgttcaccgttgaaggtggacacagggcaatatttttcaaccgcattgggggagttcagcaggacactatactggctgaggggttgcacttcagaattccatggttccagtaccccattatatacgacatccgggctcggcctagaaaaatttccagccccaccggctccaaggacctgcagatggtaaacatatcactgcgagttctgtctagacccaacgcccaggaactgccttcaatgtatcagcgccttgggttagactacgaggagcgcgtactgccctccatcgtgaacgaggtgttgaaatcagttgttgccaaatttaatgcctcccaactcatcacccaacgcgcccaggtgagcctgctaattagacgcgagttgaccgagcgagcaaaggacttttccttaattctggatgacgtggctattaccgaactgagtttctcgcgtgaatacaccgcagccgtagaagctaaacaggtcgcccaacaggaggcgcagcgcgctcagtttctggtcgagaaggcaaagcaggaacagagacaaaagatcgtgcaggccgagggcgaggccgaggcagctaagatgttgggggaggctttgagcaaaaacccaggatatatcaagttgcgcaaaattagggccgcccaaaatatatctaagacaattgcaactagccagaaccgcatctaccttacagctgacaatttggttcttaacctgcaggatgaaagcttcacgcggtactcggactctctgataaagggaaagaaatag

SEQ ID NO: 56145 - DNA, 900 bp, Artificial Sequence
  derived and/or modified sequence
atggcccagaatttgaaggatctggccggccgactaccggcaggcccccgcggcatgggcaccgccctgaagcttctgctcggcgccggggcagtggcgtacggggttagagaatcggtgtttactgttgaggggggtcatagggcgatattttttaatcgcatcgggggtgtgcagcaggacaccattctcgccgaggggctgcactttcgaatcccctggttccaatatccgattatttatgacatccgcgcccgcccaagaaaaatcagttctccgactggctctaaggatctccagatggtgaatatttcactacgggtcctttcccgaccaaacgctcaggaactgccttccatgtatcagcgcctgggtctggattacgaggaacgtgttctgccatctatagtgaacgaagttctgaagagtgtggtggccaagttcaatgcttcccagttgattacccagagggcccaggttagcctcctgatcaggcgcgagctgactgaacgggcaaaggacttctctctgatccttgacgatgtcgcaataacggagcttagcttctcccgagaatacaccgccgccgtggaggccaaacaggttgcgcagcaggaagctcagagggcacagttcctggttgagaaggccaagcaggaacagcgacagaaaatcgttcaggcggagggggaggctgaagcggccaaaatgcttggcgaggcactttcaaagaacccaggctacataaagctgcggaagattcgggctgctcagaatatctctaagacaatcgctaccagccagaaccgtatttatttgacggccgataaccttgtgcttaatctgcaggacgagagttttacccgtggtagcgattcactgattaaggggaagaagtag

SEQ ID NO: 56146 - DNA, 900 bp, Artificial Sequence
  derived and/or modified sequence
atggcccagaacctgaaggacctggccggccgcctgcctgctggcccccggggcatgggcacagccctgaagctgctgctgggcgctggagctgtggcctacggcgtgcgggagagcgtcttcaccgtggagggcggccaccgggccatcttcttcaacagaattggaggagtgcagcaggacaccatcctggccgagggcctgcacttccgcatcccctggttccagtaccccatcatctatgacatccgggcccggcccaggaagatcagcagccccaccggcagcaaggacctgcagatggtgaacatcagcctgcgggtgctgagccggcccaatgcccaggagctgcccagcatgtaccagaggctgggcctggactatgaggagcgggtgctgcccagcatcgtgaatgaggtgctgaagtctgtggtggccaagttcaatgccagccagctgatcacccagagggcccaggtgtccctgctgatcagaagagagctgacagagcgggccaaggacttcagcctcatcctggatgatgtggccatcacagagctgtccttcagccgggagtacacagctgctgtggaggccaagcaggtggcccagcaggaggcccagagggcccagttcctggtggagaaggccaagcaggagcagaggcagaagatcgtgcaggccgagggggaggccgaggccgccaagatgctgggggaggccctgagcaagaaccctggctacatcaagctgaggaagatccgggccgcccagaacatcagcaagaccatcgccaccagccagaaccgcatctacctgacagctgacaacctggtgctgaacctgcaggatgagagcttcacccgctacagcgacagcctcatcaagggcaagaagtag

SEQ ID NO: 56147 - DNA, 900 bp, Artificial Sequence
  derived and/or modified sequence
atggcccagaacctgaaggacctggccggccgcctgcctgctggcccccggggcatgggcacagccctgaagctgctgctgggcgctggagctgtggcctacggcgtgcgggagagcgtcttcaccgtggagggcggccaccgggccatcttcttcaacagaattggaggagtgcagcaggacaccatcctggccgagggcctgcacttccgcatcccctggttccagtaccccatcatctatgacatccgggcccggcccaggaagatcagcagccccaccggcagcaaggacctgcagatggtgaacatcagcctgcgggtgctgagccggcccaatgcccaggagctgcccagcatgtaccagaggctgggcctggactatgaggagcgggtgctgcccagcatcgtgaatgaggtgctgaagtctgtggtggccaagttcaatgccagccagctgatcacccagagggcccaggtgtccctgctgatcagaagagagctgacagagcgggccaaggacttcagcctcatcctggatgatgtggccatcacagagctgtccttcagccgggagtacacagctgctgtggaggccaagcaggtggcccagcaggaggcccagagggcccagttcctggtggagaaggccaagcaggagcagaggcagaagatcgtgcaggccgagggggaggccgaggccgccaagatgctgggggaggccctgagcaagaaccctggctacatcaagctgaggaagatccgggccgcccagaacatcagcaagaccatcgccaccagccagaaccgcatctacctgacagctgacaacctggtgctgaacctgcaggatgagagcttcacccggggcagtgacagcctcatcaagggcaagaagtag

SEQ ID NO: 56148 - DNA, 900 bp, Artificial Sequence
  derived and/or modified sequence
atggcccagaacctgaaggacctggccggccggctgcccgccggcccgcgtgggatgggcaccgccttaaagctgcttttaggagcgggtgctgtcgcatatggtgtaagagagagtgttttcaccgtcgagggaggtcaccgggccatcttctttaatagaatcgggggggtccagcaggacacgatcttggccgaggggctccattttcggattccatggtttcaatatccaataatctatgacatccgtgctagacctcgaaagatttcctctcctactgggagcaaggaccttcaaatggtcaatatcagcttgcgagtgctctcacgccccaacgctcaagaacttccttctatgtaccagcgccttggactcgactacgaagagcgtgtgctgccttctatcgtgaacgaagttctgaagtctgtggtggctaaattcaacgcttcacaacttatcacccagagggcacaagtatcactgctcataagacgggagctcaccgaacgagccaaagatttttccctgatccttgacgatgtggctatcaccgagctgtccttttctcgcgagtacactgccgccgtcgaggctaaacaggtcgcccagcaggaggcgcagcgagcgcagtttctcgtggagaaagctaaacaggagcagaggcaaaagatcgtgcaagccgagggcgaggccgaggcggctaagatgctgggtgaagctctttccaagaatcctgggtacatcaaacttcgtaagatacgagccgcacagaatatcagcaagactattgccacatcacagaaccggatttaccttaccgcagacaatttggtattgaatctccaggacgagagttttacccgctactcagattccttgataaagggcaagaaatag

SEQ ID NO: 56149 - DNA, 900 bp, Artificial Sequence
  derived and/or modified sequence
atggcccagaacctgaaggacctggccggccggctgcccgccggcccacgggggatgggaacagccctcaaacttttgcttggtgctggcgcagttgcctatggagtccgggaatcggtgtttactgtagagggcggacatagggccatatttttcaataggatcggtggtgtgcagcaggacacaattctggccgagggactccactttagaatcccatggtttcagtatcccattatatacgacattcgggctagacccagaaaaatatccagccccactgggagcaaggatttacaaatggtgaacattagtctacgggttctctcccgccctaacgctcaggagttgccttctatgtaccaacggctcggtctcgattatgaggagcgggtcctgccatctatcgttaacgaggtgctcaagtcagtggtggctaaatttaacgctagccagctcattacacaaagagcacaggtctcgctgctgattagacgtgaactcacagaaagggccaaggattttagcctaatcctcgacgacgtagccatcaccgaactaagcttttcccgcgaatacaccgcagcggtcgaggcgaaacaagtggcccagcaggaagctcagagagcgcagtttctggtggaaaaggctaaacaggaacagcgccagaaaattgttcaggccgaaggcgaggctgaggccgcaaagatgctgggagaggccctctcgaaaaatcctgggtacatcaagctccgcaagattagggccgcgcagaacatctcaaagactatcgctacttctcagaatcgcatctacttaaccgcagataacctcgtgctgaacctgcaggatgagtctttcacacgcggaagtgattccctgatcaagggtaagaagtag

SEQ ID NO: 56150 - DNA, 900 bp, Artificial Sequence
  derived and/or modified sequence
atggcccagaacttaaaagacctggccggacggttaccagcgggtccaagggggatgggcacggccttgaagctgcttctgggtgctggagccgtagcctacggagtgagggagagtgttttcacggtagagggtgggcatagggccatcttcttcaaccgcatcggcggtgtccagcaagataccattctcgcagaggggttgcacttccgaattccctggtttcagtacccaatcatttacgatatccgggcaaggccaagaaagatcagctccccaaccggatcgaaggatcttcagatggtcaacattagtctgagagtcttgtctaggcccaacgcacaggagctacccagtatgtaccagcgactgggtctcgactacgaggagagggtcctgccttctatcgtgaacgaggtattgaagtccgtggtcgccaaattcaacgccagtcagctgatcacgcagagagcacaggttagtctcctcatcagaagggaactaactgagagggcaaaggacttcagcctcatactcgacgacgtggctatcacagagctgtcgttcagccgcgaatacaccgcggcagtggaagcaaagcaggtcgcccaacaggaggcccaacgtgcccagtttttggtggagaaggccaagcaagagcagcgtcaaaagatcgtccaagccgaaggcgaggctgaggcagcaaagatgctcggggaggctttgtctaaaaaccctggctatatcaaattgcgtaagattagggcagctcagaacatttctaagaccattgccacttcccagaacaggatatacctcacagctgataacttggtgttgaatctccaagatgagtcattcaccagatactccgacagcttgattaagggaaagaagtag

SEQ ID NO: 56151 - DNA, 900 bp, Artificial Sequence
  derived and/or modified sequence
atggctcagaacttgaaagacctggccggtagacttcccgctggacccagaggaatgggaaccgctcttaagctactgcttggagccggtgccgtggcctatggggtacgggagtctgttttcactgtggagggaggccatagggccattttcttcaaccggattggaggcgttcaacaggatactatcctcgctgagggactccacttcagaatcccctggtttcagtaccctatcatttatgacatacgggctcggcctcgaaaaatttcctccccaaccggctcgaaggacctgcagatggtcaatatcagtctgagagttctgtctagacctaacgcccaagaactgccctccatgtatcagcgattgggcctagactacgaggaacgcgttcttccttctattgtgaacgaggtgcttaagagcgtggtggccaagtttaatgcgtctcagttgatcacccagcgagcacaagtgtcactgctgattcgacgggaattaaccgaacgggctaaagacttttccctgatactggatgacgtggcaattactgagttgtctttctctcgggagtatacagccgcagtcgaagcaaaacaggtggcccagcaggaagcacaacgcgcacagtttctggtggagaaggccaaacaagagcagcgtcagaaaattgttcaggccgagggcgaggctgaagcagccaaaatgctgggcgaggctcttagtaaaaatccaggctacattaagctccggaaaattagagctgcccaaaacatttcaaaaacaatagcaacctcacaaaatcgcatttacctcactgctgacaacctggtgctgaatttgcaggatgagtcttttaccagggggtcagattctctcatcaaaggcaagaagtag

SEQ ID NO: 56152 - DNA, 1110 bp, Artificial Sequence
  derived and/or modified sequence
tccgtatgcgcgattcctgtgcgcgaagttcgggtccgtagtgggctaagggggagggtttcaaagggagcgcacttccgctgccctttctttcgccagccttacgggcccgaaccctcgtgtgaagggtgcagtacctaagccggagcggggtagaggcgggccggcacccccttctgacctccagtgccgccggcctcaagatcagacatggcccagaacttgaaggacttggcgggacggctgcccgccgggccccggggcatgggcacggccctgaagctgttgctgggggccggcgccgtggcctacggtgtgcgcgaatctgtgttcaccgtggaaggcgggcacagagccatcttcttcaatcggatcggtggagtgcagcaggacactatcctggccgagggccttcacttcaggatcccttggttccagtaccccattatctatgacattcgggccagacctcgaaaaatctcctcccctacaggctccaaagacctacagatggtgaatatctccctgcgagtgttgtctcgacccaatgctcaggagcttcctagcatgtaccagcgcctagggctggactacgaggaacgagtgttgccgtccattgtcaacgaggtgctcaagagtgtggtggccaagttcaatgcctcacagctgatcacccagcgggcccaggtatccctgttgatccgccgggagctgacagagagggccaaggacttcagcctcatcctggatgatgtggccatcacagagctgagctttagccgagagtacacagctgctgtagaagccaaacaagtggcccagcaggaggcccagcgggcccaattcttggtagaaaaagcaaagcaggaacagcggcagaaaattgtgcaggccgagggtgaggccgaggctgccaagatgcttggagaagcactgagcaagaaccctggctacatcaaacttcgcaagattcgagcagcccagaatatctccaagacgatcgccacatcacagaatcgtatctatctcacagctgacaaccttgtgctgaacctacaggatgaaagtttcaccaggtacagtgacagcctcatcaagggtaagaaatga

SEQ ID NO: 56153 - DNA, 1515 bp, Artificial Sequence
  derived and/or modified sequence
aggaaatggagatgacttgctgtcttgcgctgccctccctgggagggcagccttccagaaaggggcgggacttccgtatgcgcgattcctgtgcgcgaagttcgggtccgtagtgggctaagggggagggtttcaaagggagcgcacttccgctgccctttctttcgccagccttacgggcccgaaccctcgtgtgaagggtgcagtacctaagccggagcggggtagaggcgggccggcacccccttctgacctccagtgccgccggcctcaagatcagacatggcccagaacttgaaggacttggcgggacggctgcccgccgggccccggggcatgggcacggccctgaagctgttgctgggggccggcgccgtggcctacggtgtgcgcgaatctgtgttcaccgtggaaggcgggcacagagccatcttcttcaatcggatcggtggagtgcagcaggacactatcctggccgagggccttcacttcaggatcccttggttccagtaccccattatctatgacattcgggccagacctcgaaaaatctcctcccctacaggctccaaagacctacagatggtgaatatctccctgcgagtgttgtctcgacccaatgctcaggagcttcctagcatgtaccagcgcctagggctggactacgaggaacgagtgttgccgtccattgtcaacgaggtgctcaagagtgtggtggccaagttcaatgcctcacagctgatcacccagcgggcccaggtatccctgttgatccgccgggagctgacagagagggccaaggacttcagcctcatcctggatgatgtggccatcacagagctgagctttagccgagagtacacagctgctgtagaagccaaacaagtggcccagcaggaggcccagcgggcccaattcttggtagaaaaagcaaagcaggaacagcggcagaaaattgtgcaggccgagggtgaggccgaggctgccaagatgcttggagaagcactgagcaagaaccctggctacatcaaacttcgcaagattcgagcagcccagaatatctccaagacgatcgccacatcacagaatcgtatctatctcacagctgacaaccttgtgctgaacctacaggatgaaagtttcaccaggggaagtgacagcctcatcaagggtaagaaatgagcctagtcaccaagaactccacccccagaggaagtggatctgcttctccagtttttgaggagccagccaggggtccagcacagccctaccccgccccagtatcatgcgatggtcccccacaccggttccctgaacccctcttggattaaggaagactgaagactagccccttttctggggaattactttcctcctccctgtgttaactggggctgttggggacagtgcgtgatttctcagtgatttcctacagtgttgttccctccctcaaggctgggaggagataaacaccaacccaggaattctcaataaatttttattacttaacctgaa

SEQ ID NO: 56154 - DNA, 1518 bp, Artificial Sequence
  derived and/or modified sequence
gtagtgggctaagggggagggtttcaaagggagcgcacttccgctgccctttctttcgccagccttacgggcccgaaccctcgtgtgaagggtgcagtacctaagccggagcggggtagaggcgggccggcacccccttctgacctccagtgccgccggcctcaagatcagacatggcccagaacttgaaggacttggcgggacggctgcccgccgggccccggggcatgggcacggccctgaagctgttgctgggggccggcgccgtggcctacggtgtgcgcgaatctgtgttcaccgtggaaggcgggcacagagccatcttcttcaatcggatcggtggagtgcagcaggacactatcctggccgagggccttcacttcaggatcccttggttccagtaccccattatctatgacattcgggccagacctcgaaaaatctcctcccctacaggctccaaagacctacagatggtgaatatctccctgcgagtgttgtctcgacccaatgctcaggagcttcctagcatgtaccagcgcctagggctggactacgaggaacgagtgttgccgtccattgtcaacgaggtgctcaagagtgtggtggccaagttcaatgcctcacagctgatcacccagcgggcccaggtatccctgttgatccgccgggagctgacagagagggccaaggacttcagcctcatcctggatgatgtggccatcacagagctgagctttagccgagagtacacagctgctgtagaagccaaacaagtgggtgagtcgcaagagccgtggggtgagggcttctgagatgcaggaggaggaaagactccatgggtggggctcctgacccaggacagggtctccctgactctctcccaccacagcccagcaggaggcccagcgggcccaattcttggtagaaaaagcaaagcaggaacagcggcagaaaattgtgcaggccgagggtgaggccgaggctgccaagatgcttggagaagcactgagcaagaaccctggctacatcaaacttcgcaagattcgagcagcccagaatatctccaagacgatcgccacatcacagaatcgtatctatctcacagctgacaaccttgtgctgaacctacaggatgaaagtttcaccaggggaagtgacagcctcatcaagggtaagaaatgagcctagtcaccaagaactccacccccagaggaagtggatctgcttctccagtttttgaggagccagccaggggtccagcacagccctaccccgccccagtatcatgcgatggtcccccacaccggttccctgaacccctcttggattaaggaagactgaagactagccccttttctggggaattactttcctcctccctgtgttaactggggctgttggggacagtgcgtgatttctcagtgatttcctacagtgttgttccctccctcaaggctgggaggagataaacaccaacccaggaattctcaataaatttttattacttaacctgaa

SEQ ID NO: 56155 - DNA, 900 bp, Artificial Sequence
  derived and/or modified sequence
atggcccagaacctgaaggacctggccggcagactgcccgccggccccagaggcatgggcaccgccctgaagctgctgctgggcgccggcgccgtggcctacggcgtgagagagagcgtgttcaccgtggagggcggccacagagccatcttcttcaacagaatcggcggcgtgcagcaggacaccatcctggccgagggcctgcacttcagaatcccctggttccagtaccccatcatctacgacatcagagccagacccagaaagatcagcagccccaccggcagcaaggacctgcagatggtgaacatcagcctgagagtgctgagcagacccaacgcccaggagctgcccagcatgtaccagagactgggcctggactacgaggagagagtgctgcccagcatcgtgaacgaggtgctgaagagcgtggtggccaagttcaacgccagccagctgatcacccagagagcccaggtgagcctgctgatcagaagagagctgaccgagagagccaaggacttcagcctgatcctggacgacgtggccatcaccgagctgagcttcagcagagagtacaccgccgccgtggaggccaagcaggtggcccagcaggaggcccagagagcccagttcctggtggagaaggccaagcaggagcagagacagaagatcgtgcaggccgagggcgaggccgaggccgccaagatgctgggcgaggccctgagcaagaaccccggctacatcaagctgagaaagatcagagccgcccagaacatcagcaagaccatcgccaccagccagaacagaatctacctgaccgccgacaacctggtgctgaacctgcaggacgagagcttcaccagatacagcgacagcctgatcaagggcaagaagtag

SEQ ID NO: 56156 - DNA, 900 bp, Artificial Sequence
  derived and/or modified sequence
atggcccagaacctgaaggacctggccggcagactgcccgccggccccagaggcatgggcaccgccctgaagctgctgctgggcgccggcgccgtggcctacggcgtgagagagagcgtgttcaccgtggagggcggccacagagccatcttcttcaacagaatcggcggcgtgcagcaggacaccatcctggccgagggcctgcacttcagaatcccctggttccagtaccccatcatctacgacatcagagccagacccagaaagatcagcagccccaccggcagcaaggacctgcagatggtgaacatcagcctgagagtgctgagcagacccaacgcccaggagctgcccagcatgtaccagagactgggcctggactacgaggagagagtgctgcccagcatcgtgaacgaggtgctgaagagcgtggtggccaagttcaacgccagccagctgatcacccagagagcccaggtgagcctgctgatcagaagagagctgaccgagagagccaaggacttcagcctgatcctggacgacgtggccatcaccgagctgagcttcagcagagagtacaccgccgccgtggaggccaagcaggtggcccagcaggaggcccagagagcccagttcctggtggagaaggccaagcaggagcagagacagaagatcgtgcaggccgagggcgaggccgaggccgccaagatgctgggcgaggccctgagcaagaaccccggctacatcaagctgagaaagatcagagccgcccagaacatcagcaagaccatcgccaccagccagaacagaatctacctgaccgccgacaacctggtgctgaacctgcaggacgagagcttcaccagaggcagcgacagcctgatcaagggcaagaagtag

SEQ ID NO: 56157 - protein, 790 aa, Artificial Sequence
  derived and/or modified sequence
MKAFGPPHEGPLQGLVASRIETYGGRHRASAQSTAGRLYPRGYPVLDPSRRRLQQYVPFARGSGQARGLSPMRLRDPEPEKRHGGHVGAGLLHSPKLKELTKAHELEVRLHTFSMFGMPRLPPEDRRHWEIGEGGDSGLTIEKSWRELVPGHKEMSQELCHQQEALWELLTTELIYVRKLKIMTDLLAAGLLNLQRVGLLMEVSAETLFGNVPSLIRTHRSFWDEVLGPTLEETRASGQPLDPIGLQSGFLTFGQRFHPYVQYCLRVKQTMAYAREQQETNPLFHAFVQWCEKHKRSGRQMLCDLLIKPHQRITKYPLLLHAVLKRSPEARAQEALNAMIEAVESFLRHINGQVRQGEEQESLAAAAQRIGPYEVLEPPSDEVEKNLRPFSTLDLTSPMLGVASEHTRQLLLEGPVRVKEGREGKLDVYLFLFSDVLLVTKPQRKADKAKVIRPPLMLEKLVCQPLRDPNSFLLIHLTEFQCVSSALLVHCPSPTDRAQWLEKTQQAQAALQKLKAEEYVQQKRELLTLYRDQDRESPSTRPSTPSLEGSQSSAEGRTPEFSTIIPHLVVTEDTDEDAPLVPDDTSDSGYGTLIPGTPTGSRSPLSRLRQRALRRDPRLTFSTLELRDIPLRPHPPDPQAPQRRSAPELPEGILKGGSLPQEDPPTWSEEEDGASERGNVVVETLHRARLRGQLPSSPTHADSAGESPWESSGEEEEEGPLFLKAGHTSLRPMRAEDMLREIREELASQRIEGAEEPRDSRPRKLTRAQLQRMRGPHIIQLDTPLSASEV

SEQ ID NO: 56158 - DNA, 2373 bp, Artificial Sequence
  derived and/or modified sequence
atgaaggcctttggaccaccccatgagggccccttacaggggctcgtcgccagccgtatcgaaacatacggaggccgccaccgagcttccgcccagtcaaccgctggccgtctgtaccctagagggtaccccgtgttggacccatcccggaggagactgcagcagtatgtgccctttgccagaggcagcggtcaggcccgcggattgtccccaatgagactgcgtgatccagaacctgaaaagagacatggcgggcacgtgggagccggactactgcattctcctaagctgaaggagttgaccaaggctcacgagctcgaggtgcgcctgcacacctttagtatgttcggtatgccccgcctccctcccgaagatcgacgccattgggagattggcgaaggcggcgatagcgggttgacaatcgaaaaatcctggcgggagctggtgccaggccacaaggaaatgtcccaagaactgtgccatcagcaagaggccctgtgggagctgctgacaacagagttgatttatgtgagaaagctcaagatcatgactgacttgttggcggctgggctcctgaacctgcaacgagttggattactaatggaggtatctgccgaaaccctcttcggaaacgtccccagcctgatcagaacacatcgatctttttgggatgaagtgttaggccctactttggaagaaactagagcatcagggcagccactagaccctataggcctccagtccggttttctgactttcgggcagcgtttccacccttatgtgcagtattgccttcgggtgaaacagactatggcatatgccagggaacaacaggagactaatcctctgtttcacgccttcgttcagtggtgtgagaaacacaaacgctccggacgccagatgctatgcgacctcttaattaagcctcaccagcgaattaccaaataccccctcctattacatgcggtgctgaagaggtcccctgaggcccgagcccaggaggctctgaacgcaatgattgaggccgtcgaatcctttctcaggcatatcaacgggcaggtgcggcaaggagaggaacaggaatcccttgctgcggctgcgcagagaatcggcccatacgaagtgctggaacctccaagcgacgaagttgaaaagaacctgcgacccttctcaaccctcgacctcaccagccccatgcttggggttgcatccgagcacacaagacaactgctactggaaggtcccgtcagggtgaaagagggacgcgagggcaagctggacgtctatctgtttctgttctccgatgtgctattagttacaaagccccaacgaaaggcagacaaagcaaaggttatccggcctcccctcatgctggagaagctggtttgccagcctctcagggatccaaactccttcctgctgattcatttgacagaatttcaatgcgtgtcctcagccttactagttcactgcccctcccctaccgatagagctcaatggctggaaaaaacccagcaagcacaggcagccctgcagaagctgaaggccgaagagtatgtgcagcaaaagagagagctgctaacgctctaccgggatcaagacagagagtccccgagcacccgcccaagcaccccgtcattggagggctcacagtcgtcagctgagggtaggactccagaatttagcacgatcatccctcatctggttgtgactgaagacaccgatgaggacgctccactggtgccggatgacacctctgattctggttacggaactctgattcccggcactcccaccgggagtaggtcccctctgtctcgcctgagacaacgggcgttaagacgtgaccccaggctgacattcagcactctcgagctgagagatattcccctgcggccacacccccctgacccccaggcccctcagagacgctcagcccccgagcttcccgagggcatcttaaaagggggatcattgccccaggaggatcccccaacttggtcagaggaggaagacggcgctagtgaacggggcaatgtcgttgtggagaccttacaccgcgctcgtctgcgtgggcagctgcctagtagccccacgcacgccgattctgcgggtgagagtccttgggagagctctggggaagaggaagaggagggccccctttttcttaaagctgggcatacatcactgcgccctatgagagccgaagacatgcttcgggagattagggaggagttagcctcacagagaattgaaggagccgaggagcctcgcgactcacgaccacgcaagttaactcgggctcagctccagcgcatgcgaggacctcatataattcagctagatacacccctaagtgcttccgaggtttag

SEQ ID NO: 56159 - DNA, 2373 bp, Artificial Sequence
  derived and/or modified sequence
atgaaggcattcggcccccctcacgagggacctctgcaaggtctggtagcaagccgcattgagacctacgggggaaggcaccgcgcttccgcacaatctaccgctggacgactgtaccctagaggctaccccgttctcgacccaagccggcgtcgcctccaacagtacgtccccttcgcaagggggtctggccaggccagaggtctgagccccatgagactcagggatcccgaacctgagaaacggcacggaggccacgtcggggccggcctcctccatagccctaagctgaaggagctcacaaaagctcacgaactagaggtgagacttcatactttctcgatgtttggtatgccccgattgccacccgaggaccggcggcactgggagatcggggaaggcggagacagcggcctcaccatcgaaaagtcctggagggaactggtaccaggacataaggagatgtctcaggagttatgtcaccagcaagaagctctgtgggagctgctgaccaccgagctgatttatgtgcgaaaacttaagattatgacagacctgctggctgcaggcctcctcaacctacagagggtcggattgctgatggaagtttcagcggaaaccctgtttggaaatgtgccatctctgatccgcactcacagaagtttctgggacgaggtccttgggcctaccttagaggagacacgtgccagcggacagcccctggatccaatcgggctccaatccggattcttgacgtttgggcagagatttcacccttatgtgcagtattgtctccgcgttaaacagactatggcctatgctcgggaacagcaggaaactaatccattgtttcatgccttcgtgcagtggtgcgagaagcacaaaaggagcggacggcagatgctgtgcgacctcctgattaagccacatcaaaggatcaccaaatatcccctcctcctgcacgccgttcttaagaggtctcccgaggctcgggcccaggaagcactcaacgcaatgatcgaggccgtggagtcattcttgcgacatattaacggacaggtgcgccaaggcgaagagcaggaatctttagctgctgctgcccaaagaatcggcccttatgaggtactggagccacccagtgacgaggttgagaagaacctgaggccattctctaccctggatctaacttctccaatgctgggggtggcatcagagcacactcggcagctgctgctggaagggccagtcagggtcaaagagggccgcgagggcaaactggacgtctacctgtttctattttccgacgttcttctggtgacaaagccacagcgcaaggccgacaaggccaaggtgatccggcctccactcatgctggaaaaattggtgtgccagccactgcgagatcccaactcttttttgttgatacacttgacggagttccagtgcgtttccagtgccctgctcgtgcattgcccgagccccaccgacagggcacaatggctcgaaaaaactcagcaagcccaggccgcactccagaagctcaaagccgaagagtacgtccagcagaaacgagaattgctaaccctgtatcgggaccaggatcgcgagtccccatctacccggcccagcaccccatcattggaaggcagccagtccagtgccgaaggtaggactcccgagttcagcactattattcctcatttggtggtaacagaagacaccgacgaggacgcacctttagttcccgacgacactagcgatagcgggtacggcacgctgatccccgggaccccgaccggatccaggagtcccttgagccgattaaggcagagggccttgcgcagagacccccggctgaccttttccaccctggaattaagagacattcccctgcggcctcacccgccagacccccaggccccacaacgtcgctctgcccccgagctgccggaaggcatactcaagggcgggagcttgcctcaggaagatccccccacatggtctgaggaggaagacggtgcttcggagcgtggtaatgtagtggtcgagacactgcaccgggctaggcttcgtggtcagcttccgagctctccaacacatgccgactctgcaggtgagtcgccttgggaatcctctggagaagaggaggaagagggacccctatttctgaaggctgggcatacatcattacgccccatgagggccgaagatatgctgagagagatcagagaggagctagcaagccaacgtatcgagggggcagaagagccgagagacagccgaccacgtaagcttacccgggcccagctccagcggatgagaggcccacacattatccagctggatacaccactgtcagccagtgaagtatag

SEQ ID NO: 56160 - DNA, 2373 bp, Artificial Sequence
  derived and/or modified sequence
atgaaggccttcggcccccctcatgagggccccctgcagggcctggtggccagccgcatcgagacctatggaggccgccaccgggccagcgcccagagcacagctggccgcctgtacccccggggctaccctgtgctggaccccagcagaagaaggctgcagcagtatgtgccctttgcccggggcagcggccaggcccggggcctgagccccatgaggctgcgggaccctgagcctgagaagagacatggaggccacgtgggcgccggcctgctgcacagccccaagctgaaggagctgaccaaggcccacgagctggaggtgcggctgcacaccttctccatgtttggcatgccccggctgcccccagaggaccggcggcactgggagattggagagggcggggacagcggcctgaccatcgagaagtcctggagggagctggtgcccggccacaaggagatgagccaggagctgtgccaccagcaggaggccctgtgggagctgctgaccacagagctgatctacgtgaggaagctgaagatcatgacagacctgctggccgccggcctgctgaacctgcagagggtgggcctgctgatggaggtgtctgctgagaccctgtttggaaatgtgcccagcctcatccgcacccaccgctccttctgggatgaggtgctgggccccaccctggaggagacccgggccagcggccagcccctggaccccatcggcctgcagagcggcttcctgaccttcggccagcgcttccacccctacgtgcagtactgcctgcgggtgaagcagaccatggcctatgcccgggagcagcaggagaccaaccccctcttccacgcctttgtgcagtggtgtgagaagcacaagaggagcggccggcagatgctgtgtgacctgctgatcaagccccaccagaggatcaccaagtaccccctgctgctgcatgctgtgctgaagaggagccctgaggcccgggcccaggaggccctgaatgccatgattgaggccgtggagagcttcctgcggcacatcaatggccaggtgcggcagggcgaggagcaggagagcctggccgccgccgcccagagaattggcccctatgaggtgctggagcccccatctgatgaggtggagaagaacctgcggcccttcagcaccctggacctgaccagccccatgctgggcgtggccagcgagcacacccggcagctgctgctggagggccctgtgcgggtgaaggagggccgggagggcaagctggatgtgtacctgttcctgttcagtgatgtgctgctggtgaccaagccccagaggaaggctgacaaggccaaggtgatccggccccccctgatgctggagaagctggtgtgccagcccctgcgggaccccaacagcttcctgctgatccacctgacagagttccagtgtgtgtcctctgccctgctggtgcactgccccagccccacagaccgggcccagtggctggagaagacccagcaggcccaggccgccctgcagaagctgaaggccgaggagtatgtgcagcagaagcgggagctgctgaccctgtacagagaccaggaccgggagagccccagcacccggcccagcacccccagcctggagggcagccagagcagcgctgagggccgcaccccagagttcagcaccatcatcccccacctggtggtgacagaggacacagatgaagatgcccccctggtgcctgatgacaccagtgacagcggctacggcaccctcatccctggcacccccaccggcagccgcagccccctgagccggctgcggcagagggccctgcggcgggacccccggctgaccttcagcaccctggagctgcgggacatccccctgcggccccaccccccagacccccaggccccccagaggagaagtgcccctgagctgcctgagggcatcctgaagggcggcagcctgccccaggaggacccccccacctggagcgaggaggaggatggagccagcgagagaggaaatgtggtggtggagaccctgcaccgggcccggctgcggggccagctgcccagcagccccacccatgctgacagcgctggggagagcccctgggagagcagcggggaggaggaggaggagggccccctcttcctgaaggccggccacaccagcctgcggcccatgagagctgaggacatgctgcgggagatccgggaggagctggccagccagagaattgaaggagctgaggagccccgggacagccggcccaggaagctgacccgggcccagctgcagaggatgaggggcccccacatcatccagctggacacccccctgagcgccagcgaggtgtag

SEQ ID NO: 56161 - DNA, 2373 bp, Artificial Sequence
  derived and/or modified sequence
atgaaggccttcggccccccccacgagggccccctgcagggcctggttgctagccgaattgaaacgtatgggggtagacacagagcctcagctcagtctactgcaggccgattatacccgagagggtatcccgtgctcgacccaagcagacgccgtctccaacagtatgtgccgttcgcaagaggttccggacaagcccggggcctcagcccaatgcgactccgggacccggagcccgagaaaagacatggaggacatgtaggagccggactcctgcactcccccaagctgaaagagcttacaaaagcccatgaactggaagtgcggctccatacattttccatgttcgggatgcccaggttgccaccagaggacagacggcactgggagataggtgagggcggtgacagcgggttaaccatcgaaaagtcctggagagagcttgtaccaggtcacaaggagatgtcgcaggaactatgccaccagcaggaggccctgtgggagcttcttacaacagaactgatttatgttcgaaagcttaagatcatgacagatctcttagcagctgggctcctgaatctccaacgcgtcggacttttgatggaagtttccgctgagaccctttttggcaacgttccatctcttatcaggacacaccggtctttctgggatgaagtgcttggccctacacttgaggagactcgggctagcgggcaacccttggacccaattgggttacaatctggtttcctcaccttcgggcagcgctttcatccctatgtccagtactgcctcagagtgaaacagaccatggcgtacgcacgggaacaacaggagactaatcccctttttcacgcctttgtgcagtggtgtgaaaaacataagcgttccggccgccaaatgctgtgtgaccttctgataaagccacatcagagaatcactaagtatccattgttactccatgccgtgctcaaacggagcccagaggcacgggctcaggaggctctcaacgcgatgattgaggctgtggagagcttcctccggcatatcaacggccaggtgagacagggtgaggaacaggagtcgctcgcggccgcggcccagagaattggaccctacgaagttctagagccaccaagcgatgaagtagagaagaatctcaggcccttcagcaccctcgacctgacttcccccatgctcggcgtcgcatcagagcatacaagacagttgctactggagggccctgttcgggttaaggaaggaagagagggcaagcttgacgtttatctgtttcttttttctgacgtgctcctcgtgactaaaccccagcggaaggcagataaagccaaggtcatccgccccccgctgatgctggagaagctggtttgccagcccctaagggacccaaatagttttctgctgatccacctgacggagtttcaatgtgtctccagcgctcttctagttcattgtccctccccgaccgatagggcacagtggctggagaaaactcagcaggcacaagcagctctgcaaaagttaaaggccgaagagtacgtgcagcagaaacgagaacttctcaccctctatcgtgaccaggatagagagtcaccgtccacacgcccaagtactccctccctggaagggagtcagtcaagtgctgaaggcagaacgccagagttctctacgatcatcccccatctcgtggtcacggaggacaccgatgaggacgctcccctggtccctgacgacaccagcgattcaggttatggcacgctaataccagggacaccaaccggctcccgctctccactttccaggcttaggcagagggccttacgtagagatccacggctcacgttctctacacttgagctcagggatatacctctgcggcctcacccgcccgacccacaggcccctcaaagaagatctgctccggaattgcctgaaggaatcctgaagggcgggagccttccgcaggaggatcctccaacctggtctgaagaggaggacggagctagcgaacgcggcaatgtggtggtcgagaccctgcaccgcgcgcgactgaggggccagctgccctcaagtcccacccacgcagattccgcgggcgaatcaccttgggaatccagtggggaggaagaggaagagggcccgctgttccttaaggctggccacacctctctcaggccaatgagagccgaagatatgctgagagagataagggaagaattggcttcccagcggatagagggggccgaggaaccccgggattccagacctaggaagttaacacgagctcagttgcagcggatgaggggtcctcatattattcagctggacactcccctcagcgcttccgaagtttag

SEQ ID NO: 56162 - DNA, 2373 bp, Artificial Sequence
  derived and/or modified sequence
atgaaggccttcggccccccccacgagggccccctgcagggcctggtcgcctctaggatcgagacttatgggggccgacaccgcgctagtgcccaatccacggctggacgcctctatccacgtggctaccccgtgttagatccaagcagaagaagattgcagcagtacgtcccctttgcccggggtagcggacaggcacgtggcctctccccgatgaggctgcgtgatccagagcctgagaagcgtcatgggggacatgtgggcgcgggtctgctgcattctccaaaactgaaagagctcactaaagctcacgagctggaggtgcgactgcacacatttagtatgtttggtatgcctcgcctgccgccagaggatagaagacactgggagattggagaaggaggggactctggcctgactattgaaaaatcttggcgtgagttggtgccaggtcacaaggaaatgtctcaggaactctgccaccagcaagaggctctgtgggaactccttaccactgagctcatttacgtcaggaaactgaagatcatgactgatctcctcgccgctggactgctcaatctgcagagagtgggcctcctaatggaagtctctgcggaaactctctttggcaatgtaccaagcctgatacgcacccataggtcattctgggatgaagtgctgggacccactctggaggagacacgggcttcgggacagcccctggaccccatcggtctgcaatccgggttcctgacattcggccaaagattccacccgtatgtccaatattgcctgcgcgtgaaacagactatggcctacgctcgcgaacagcaggagaccaaccccctcttccatgcctttgtgcaatggtgcgaaaaacacaaacgctccgggcgccagatgctttgcgacttactgataaagccccaccagcgcattacaaagtatcctctgctgctgcacgctgtgttgaagcggagtccggaagcccgcgcacaggaggcactaaacgcgatgatagaagccgtggagagcttcctcaggcacatcaatggtcaggtgcgacagggcgaggagcaagagagtctggccgcagcagcccagaggattggaccatacgaagtgctcgagcctccctcggacgaggtggagaagaacctgcggccttttagcacactggatttgacctctccaatgctcggggtggccagcgagcacaccaggcaactgctgctcgagggcccagtcagagtaaaagaggggcgggaaggcaaactggacgtgtacctgtttttgttttcagatgttctcctggtcaccaagccccagcgcaaagccgacaaggccaaagtgatcagacccccactgatgcttgaaaaactggtgtgccaaccgctgcgtgatccaaacagcttccttctgatccatttgacagagtttcagtgcgtaagcagcgctctattggtgcactgcccatccccaaccgaccgcgctcagtggctggaaaagactcaacaagcccaggctgccctgcagaagctgaaggccgaagaatacgttcagcaaaagcgggagctgttgactttgtaccgagaccaggacagggaatccccctcaaccagaccttcaacgccttctttggaaggctctcagagttcggctgagggccgaactccggagtttagtaccattatccctcacctggtcgtcactgaagatactgacgaagacgccccccttgtgcctgacgacacttctgattccggctatgggactctcattcctgggacaccaaccggatcccggagccccctgtcacggctgcgacagcgagctttaaggcgggacccccggctcacattttcgacccttgagctgcgtgacattcctttaagaccacaccccccggacccccaggccccacagcgccgcagtgcccctgagttgcccgaaggaatcctaaaggggggttctcttccgcaagaggatcccccgacttggtctgaggaggaggacggagcctccgagcgggggaacgtagtcgttgagactctacacagagctagacttagagggcagttgccttcctcaccaacccacgcggactctgccggcgagagcccctgggaaagttctggggaggaggaagaggaaggccctctgttcctcaaggccgggcacacatcacttagaccgatgcgcgccgaagacatgctgcgcgagatccgagaggaactggccagtcaacgtatagagggcgctgaggaaccacgcgactctcgacctaggaaactcacgcgtgctcagttgcagcggatgcgcggccctcacattatacagcttgacactcctttgtctgcctcagaagtctag

SEQ ID NO: 56163 - DNA, 2881 bp, Artificial Sequence
  derived and/or modified sequence
agcgcctcgcgggggtctggcccggagtggagggcgcgcggtcccagccctcccgctcggccggcgggtgtcgagttcagccctaggggacctctttctcctggacattgaagatatggccctttggaggtgacccaggagagaagggatgaaggcctttggtcctccacatgagggccccctccaaggactcgtggcctcccgcattgagacttatgggggccggcatcgagcctctgctcagagcactgctggcagactctatccccgaggataccctgtgctggatcccagtcgccgacgcctccagcagtatgtcccctttgccaggggttctggccaggcccgaggcctgtcacccatgagactgcgagatccagagcccgagaagaggcacgggggccatgtgggggctggcctgcttcactcccccaaactcaaggaactcaccaaggcccatgagctggaggtgaggctgcacactttcagcatgtttgggatgccccggctgccccctgaggaccggcggcactgggagataggagagggtggcgacagtggcctgaccatcgagaagtcctggagggagctggtgcctgggcacaaggagatgagccaggagctctgccaccaacaggaggccctgtgggagctcctgaccaccgagctgatctacgtgagaaagctcaagatcatgactgatctgctagccgccggcctgctgaacctgcagcgagtgggactgctgatggaagtgtcagctgagaccctgtttggaaatgtccccagcctgattcgaacccaccggagcttttgggatgaggtgctggggcccaccctggaggagactcgggcctcgggccagcctctggaccccattggtctgcaaagtggcttcctgacgtttggccagcggttccacccctatgtccagtactgcctccgagtgaagcagaccatggcttacgcccgagaacagcaagaaactaaccctctcttccatgccttcgtgcagtggtgtgagaagcacaagcgctctgggaggcagatgctctgtgacttgcttatcaagccccaccagcgcatcaccaagtacccactgctgctccatgctgtgctcaagaggagccccgaggcacgagcccaagaggccctgaatgccatgattgaagccgtggagtcattcctgcgacacatcaatgggcaggtccgccagggcgaagagcaagagagcttggcggctgcagcacaacgcatcgggccctacgaggtgctggagccacccagtgatgaggtggagaagaacctgcgcccattctccaccctggacctgacgtcccccatgctgggggttgcatctgagcacaccagacagctgctgctggaggggcctgtgcgagtgaaggagggacgagaagggaagctggacgtgtacctgttcctcttctctgatgtgctccttgtgaccaagccccagcgcaaggcggacaaagccaaggtcatccgaccccctctcatgctggagaagctcgtgtgccaacccctgcgagaccccaacagcttcctgctgatccacctcactgaattccagtgtgtctccagcgccctccttgtgcactgtcccagtcctacagaccgtgcccagtggctggagaagacccagcaggcccaggccgccctacagaagctgaaggcagaggagtatgttcaacagaagagggagctcctgaccctctatcgggaccaggacagggagtcccccagcaccaggccctccacgccttccctggagggctctcagagcagcgcagaggggaggactcctgagttctcgaccattatcccccacctggtggtgacagaagacacagatgaagatgctccccttgtgccagatgatacctcagactctggctacggcactttgatcccaggcacccccacggggtcccgctccccactgagccgtctacgccaaagagcccttcggcgggaccctcgcctcaccttctccaccctggaactccgggacatccctctgcgtccccaccctcccgacccccaagctcctcaacgccgaagcgcccccgaactgccggaaggaatcctaaaaggaggcagtcttccccaggaagacccaccaacctggtctgaggaagaagatggggcctccgagcgagggaatgtggtggtggaaacactccacagggcccggcttcggggccagcttccctcctccccaacccatgctgactctgccggggaaagcccctgggagtcctcaggggaggaggaagaagaggggcctctgttcctgaaagctggccacacatccctgcgcccaatgcgggctgaggacatgctcagagagatccgggaggagctggccagccaaaggattgagggggccgaggagccccgggacagcaggccacggaagctgactcgggcccagctgcagaggatgcgggggccccacatcattcagctggacacccctctgtccgcatcagaggtatgaggaatgcagaggacctttggcatgcatctctcccagaggagatctctccccagtagtgctggtcaccctccggcatctgtgactctacctcaaggaccacatttcccaaaggaagcctggcccaggcaccctgcctcctgctctgtttggggatcaagaactgtaaatttatgtatcataggtgcacctgagccccacagaaagttgtgcataaaaatgactgccctggctgggcatggctgcctgtaatcccagcactttgggaggctgaggtgggaggatcccttgagcccaggagttccagaccagcctgggcaatatagggaaaccctgtctttacaaaaaaaaattttaaaaatt

SEQ ID NO: 56164 - DNA, 2963 bp, Artificial Sequence
  derived and/or modified sequence
ctggcctcccgaaggcgggaggaggggagccgggggctgggctgagacaggaccctgggtagggagcagtgcgagggagacagcgccctcagagggaggactattgggaggcggcaggagggacagcgaacgtttcctcctctgctcctgaatcggaggaagccctaggggacctctttctcctggacattgaagatatggccctttggaggtgacccaggagagaagggatgaaggcctttggtcctccacatgagggccccctccaaggactcgtggcctcccgcattgagacttatgggggccggcatcgagcctctgctcagagcactgctggcagactctatccccgaggataccctgtgctggatcccagtcgccgacgcctccagcagtatgtcccctttgccaggggttctggccaggcccgaggcctgtcacccatgagactgcgagatccagagcccgagaagaggcacgggggccatgtgggggctggcctgcttcactcccccaaactcaaggaactcaccaaggcccatgagctggaggtgaggctgcacactttcagcatgtttgggatgccccggctgccccctgaggaccggcggcactgggagataggagagggtggcgacagtggcctgaccatcgagaagtcctggagggagctggtgcctgggcacaaggagatgagccaggagctctgccaccaacaggaggccctgtgggagctcctgaccaccgagctgatctacgtgagaaagctcaagatcatgactgatctgctagccgccggcctgctgaacctgcagcgagtgggactgctgatggaagtgtcagctgagaccctgtttggaaatgtccccagcctgattcgaacccaccggagcttttgggatgaggtgctggggcccaccctggaggagactcgggcctcgggccagcctctggaccccattggtctgcaaagtggcttcctgacgtttggccagcggttccacccctatgtccagtactgcctccgagtgaagcagaccatggcttacgcccgagaacagcaagaaactaaccctctcttccatgccttcgtgcagtggtgtgagaagcacaagcgctctgggaggcagatgctctgtgacttgcttatcaagccccaccagcgcatcaccaagtacccactgctgctccatgctgtgctcaagaggagccccgaggcacgagcccaagaggccctgaatgccatgattgaagccgtggagtcattcctgcgacacatcaatgggcaggtccgccagggcgaagagcaagagagcttggcggctgcagcacaacgcatcgggccctacgaggtgctggagccacccagtgatgaggtggagaagaacctgcgcccattctccaccctggacctgacgtcccccatgctgggggttgcatctgagcacaccagacagctgctgctggaggggcctgtgcgagtgaaggagggacgagaagggaagctggacgtgtacctgttcctcttctctgatgtgctccttgtgaccaagccccagcgcaaggcggacaaagccaaggtcatccgaccccctctcatgctggagaagctcgtgtgccaacccctgcgagaccccaacagcttcctgctgatccacctcactgaattccagtgtgtctccagcgccctccttgtgcactgtcccagtcctacagaccgtgcccagtggctggagaagacccagcaggcccaggccgccctacagaagctgaaggcagaggagtatgttcaacagaagagggagctcctgaccctctatcgggaccaggacagggagtcccccagcaccaggccctccacgccttccctggagggctctcagagcagcgcagaggggaggactcctgagttctcgaccattatcccccacctggtggtgacagaagacacagatgaagatgctccccttgtgccagatgatacctcagactctggctacggcactttgatcccaggcacccccacggggtcccgctccccactgagccgtctacgccaaagagcccttcggcgggaccctcgcctcaccttctccaccctggaactccgggacatccctctgcgtccccaccctcccgacccccaagctcctcaacgccgaagcgcccccgaactgccggaaggaatcctaaaaggaggcagtcttccccaggaagacccaccaacctggtctgaggaagaagatggggcctccgagcgagggaatgtggtggtggaaacactccacagggcccggcttcggggccagcttccctcctccccaacccatgctgactctgccggggaaagcccctgggagtcctcaggggaggaggaagaagaggggcctctgttcctgaaagctggccacacatccctgcgcccaatgcgggctgaggacatgctcagagagatccgggaggagctggccagccaaaggattgagggggccgaggagccccgggacagcaggccacggaagctgactcgggcccagctgcagaggatgcgggggccccacatcattcagctggacacccctctgtccgcatcagaggtatgaggaatgcagaggacctttggcatgcatctctcccagaggagatctctccccagtagtgctggtcaccctccggcatctgtgactctacctcaaggaccacatttcccaaaggaagcctggcccaggcaccctgcctcctgctctgtttggggatcaagaactgtaaatttatgtatcataggtgcacctgagccccacagaaagttgtgcataaaaatgactgccctggctgggcatggctgcctgtaatcccagcactttgggaggctgaggtgggaggatcccttgagcccaggagttccagaccagcctgggcaatatagggaaaccctgtctttacaaaaaaaaattttaaaaatt

SEQ ID NO: 56165 - DNA, 2373 bp, Artificial Sequence
  derived and/or modified sequence
atgaaagcttttggacctccccatgagggcccactgcagggactcgttgcctccaggattgaaacctacggcggacgacatagagcgtctgcacaatcaactgcaggtaggctgtaccccaggggttaccctgtgttggacccgagccgcagacgcctccagcagtacgtgcctttcgccagggggtcaggacaggcgaggggactgtcgcccatgcgcctgcgcgaccctgagcctgagaagcggcatggaggccacgttggagcgggattgctgcacagcccaaagctgaaggagctcacaaaggcccacgagctcgaagtgaggttgcacacctttagcatgttcggaatgccacgtctcccgccagaggataggcggcattgggaaatcggagaaggcggagactcagggctgactatagagaaatcttggcgagaactggtgcccggacacaaggaaatgtcacaggaactgtgccatcaacaggaggctctctgggagctgttgacaacggagctgatctacgttcgcaagctgaaaatcatgaccgacctcctggctgcagggctgctcaacctgcagagggtggggctcctgatggaggtgagcgcagagacgttatttgggaacgtaccctccctcatccggactcaccggagtttttgggacgaagttctggggccaacgctcgaggaaacacgtgcgagcgggcagcctttggatcctataggattacagtccggtttcctcacgttcgggcaaaggttccacccctatgtgcagtactgcttaagagtgaagcagaccatggcatatgctcgcgaacaacaggagaccaatccattgtttcacgcattcgtgcagtggtgcgagaaacataaacggagcggaagacagatgctctgcgatcttctcattaagcctcaccagcgaataaccaagtacccactgttgttacatgcagtccttaaaaggtcacccgaggctagggcccaagaggctcttaacgccatgatagaggcagtcgaatcatttctgagacatatcaacgggcaagtccgtcagggagaagagcaagagagtcttgccgctgcggcacagagaatcgggccttacgaggtactggagcctcctagcgacgaagtggaaaagaacctgagaccctttagcacactagatctgaccagtccaatgctgggagtggccagcgagcacacccggcagctgctgctggagggcccagttagggttaaggaaggcagggaaggcaagctcgatgtgtatctgtttctgttctctgatgtgcttcttgtcactaagccccaacggaaggcagacaaagctaaagtcatccggcctcccctgatgctggagaaattagtgtgccaacctctgagagatcctaattctttcttattgattcacctgaccgagttccagtgcgtcagctccgctctgcttgtacactgtccctccccaaccgatcgggcacaatggctcgaaaagacccagcaggctcaggcagctctccaaaagctgaaagcagaggaatatgtccaacagaaaagggagctgctcactctataccgtgaccaagaccgggaatcaccatccacccggccaagcactccgtccctcgaagggtctcagtcatctgcagagggacgtacaccagaatttagcacgatcatccctcacctcgttgtcactgaggacactgatgaagatgctcctctagtgcccgatgacacatctgactccggatacgggaccctcatcccaggaacgcccacaggatctcggtccccgctaagtcgtctacggcagagggcactgcgcagagaccctcggctgacattcagcaccctcgagctgcgggatattccattacgcccacatcctccggatccgcaagccccacaacggaggtccgcaccagaacttcccgagggcatcttgaaggggggaagtctccctcaagaagaccctcctacctggtcagaagaggaagacggagcctccgagcgaggcaatgtggtggtggagactttacacagggcaaggctgcgaggacaattaccctctagccccacacatgccgacagcgcaggggagtctccatgggagtcttcaggggaagaggaggaagagggtccactgtttctgaaagctggccatacaagcctgcgccctatgcgcgctgaagacatgctacgggagatcagagaggaacttgcctcgcaacgcattgagggcgctgaggagcccagagacagcaggcccaggaagctgacccgtgcacaacttcagcgaatgcgtgggcctcacatcatccagctggacacgcccctgtccgccagcgaggtgtag

SEQ ID NO: 56166 - DNA, 2373 bp, Artificial Sequence
  derived and/or modified sequence
atgaaagcattcggccctcctcacgaaggcccactgcaaggcctggtggccagccggattgaaacctacgggggtaggcaccgggcatccgcccaatccaccgcaggaaggctctatccacggggatatccggtcctggatcctagccggagacgcctgcaacaatacgttccatttgcccgaggcagtgggcaggctcgaggattgagtccaatgcgcctcagggaccccgagcccgagaaaaggcacggtggccatgttggtgctgggcttcttcacagtccaaaactgaaagagttgactaaggcacacgagcttgaagtgaggctccataccttcagcatgttcgggatgcccagactcccccctgaggatcggagacattgggagatcggtgaggggggtgattctggcctaactattgagaagagttggcgcgagcttgtgcctggtcacaaggagatgtctcaggaactttgtcaccaacaggaggctttgtgggaactgctgaccacagagctgatatatgtgaggaagcttaaaattatgacagacctcctcgccgcaggcctgctgaatcttcagcgcgtgggccttttgatggaggtttccgctgagacactgtttgggaatgttccctctctaatcaggacacatagaagtttttgggacgaggtgctgggtccaactctcgaggaaaccagggccagtggtcaacctctcgaccccatcgggctccaatcaggctttctgacctttggccaacggttccatccgtatgtacagtattgtcttcgggtgaaacagaccatggcatacgctcgggaacagcaggagactaatccgctctttcacgccttcgtccagtggtgcgaaaaacacaaaagaagtggacgtcaaatgctatgtgacttactgatcaagcctcatcagcggattacaaaatacccgctgctgctacatgccgtgctaaagcgttctccagaggcacgggcacaggaggccttaaacgccatgattgaagcggtcgagagttttctcagacacattaacggccaggtgcgacagggcgaagagcaggagtcccttgccgcagctgcccagaggataggcccatatgaagtcctggagcctccatcagacgaggtcgagaagaacctgaggccctttagcacactggacctgacgagcccaatgctaggcgtggcaagtgagcacactcgtcagctattgctagagggcccagtacgcgtgaaggaaggcagggagggaaagctagatgtctatttgttcctgttctcagatgtgctgctggtgaccaaaccgcaaagaaaggctgacaaagccaaagttattcgccctcccctgatgctcgagaagctggtttgtcagcctttgcgggacccaaattctttcctgctgattcacctcactgagtttcagtgcgtgtctagcgccctactggtccattgtccctccccgactgacagagcccagtggttggaaaagacacaacaggcacaggctgccctacagaaactaaaagctgaggagtatgtgcagcagaagagagagctcctcacactgtaccgtgatcaagaccgcgaaagtccgagtactcgcccttctacaccatcccttgaggggtcccagtctagtgctgagggcaggaccccagagttttccacaattattcctcaccttgtggtgactgaagacacggatgaagacgcgcctctggtgcccgacgacacttctgacagtggctacggcactcttattccaggcactccaacggggagccgaagtccactgagtagattgcggcagcgggcactaaggcgcgatccaaggctgacattcagcaccctcgaactacgcgacatcccgctgaggccacatccccctgacccacaggcccctcagcgaagatcagctcctgaactccctgaaggcatactcaagggcggatccctgccacaagaggaccctcctacctggagtgaagaggaggatggtgcctccgaaagaggcaacgtagttgtggagactctccacagagcccgactaagggggcagcttccaagcagtccaacccatgcggattctgcaggggaatccccgtgggaaagcagtggggaggaagaggaggagggccctctgtttctcaaggcaggacacacatctctccgccctatgcgggctgaggatatgctgagagagataagggaggagctcgctagccagcgtatagagggagccgaggaaccacgcgacagtcgtccaaggaagctgaccagagcgcaactgcaaagaatgaggggaccacacataatccagctggacaccccgctgtcagctagtgaagtgtag

SEQ ID NO: 56167 - DNA, 2373 bp, Artificial Sequence
  derived and/or modified sequence
atgaaagcgttcggtccgccccacgagggaccattgcagggccttgtcgcatccagaattgagacttatggaggccggcatcgtgccagtgctcagtcaacagccggtcggctttaccctcggggataccctgtgctggacccctctagacggcgcctccaacagtatgttccatttgcccgtggttccgggcaggcaagagggctttcacccatgagactacgagaccccgaacccgagaagcgccatggggggcacgtgggtgctggactgttgcacagcccgaaactgaaagaacttaccaaggctcacgagttggaagtgcgactgcacaccttttctatgttcggcatgcctcgcctgccacctgaagatcgtcgccactgggagatcggcgagggcggcgactctgggcttacgatcgagaaatcttggagagagctcgtccctggtcataaggaaatgagccaagaactatgtcaccaacaagaagccctctgggaacttctgacaacggagcttatttacgtccggaagctgaagatcatgacagacctgttggccgccggattgctgaacctgcagcgggtagggctgcttatggaagtgtccgccgaaacactttttggtaacgtgccttccttgatccgcacccacagatcattctgggacgaagttttgggcccgaccctcgaagagaccagagcttctggccagcccttggatccaatcggcctgcagagcggatttctgactttcgggcagcgctttcatccctatgtccaatattgtctgcgcgtaaagcaaactatggcctacgcccgggaacagcaggaaaccaaccccctgtttcatgcttttgtgcagtggtgcgaaaagcataagcgcagcggtcgtcagatgctgtgcgacttacttatcaaaccccatcaaagaatcaccaaatacccacttttactgcacgctgtgctgaagcgaagccccgaagctcgggctcaggaagcactgaatgcaatgattgaagccgtggaaagcttcctacgacacataaacggccaggtccggcaaggggaggaacaagaatctctcgccgccgcagctcagcggataggaccatacgaggtgctcgagccgccctctgacgaagtcgagaagaatctacgaccattcagcacactggatctcacctcacctatgcttggggtggcaagtgagcacactcgtcagctgctgctcgaaggacctgtcagggttaaagagggcagggagggaaagctggatgtgtatttgttcctcttttctgatgtactgcttgtgacaaagcctcagaggaaagctgacaaggccaaggtcatcaggcctccactgatgctagagaaacttgtgtgtcagcccctacgcgaccctaactcttttctgttaattcacctgaccgagttccagtgtgtatcatcagccttgctggtacattgtccaagtcctacagatcgggcccagtggttggaaaagactcaacaggcccaggccgctctgcagaagctgaaggctgaagagtatgtccagcagaaaagagagttgctcaccttatatagagaccaagatcgggagagcccttcaaccagaccaagcaccccctctctcgaaggctcccagtcttcggccgagggccgcacccccgagttcagtaccatcattccccatctcgtagttaccgaggatactgatgaagatgcgccactggttcccgacgacacttcagacagcggatacggcacattgataccgggaacaccaactgggtccagatcccctctcagtcgcctgcgacaacgtgcactgcggcgagaccctaggctaacgtttagcaccctggagctgcgtgatattccattgcgacctcatccgcctgacccccaggccccacagagacgatccgcccccgagcttccagagggcattctgaaaggcggctcgttaccccaggaggatccccctacttggagcgaggaggaggacggtgcctctgaacgcgggaatgtggtcgtcgagacactccacagagcaagactgaggggacagctcccatcttccccaactcacgcggactccgccggggaaagcccttgggaatcatccggcgaggaggaagaggagggccctctctttctgaaggcgggacacacgtcactgcggcccatgcgcgccgaagatatgctgagagagattcgcgaggaactcgcctcccaaaggatagagggcgccgaggaacctagggatagccgccccaggaagcttaccagggcccaactacagagaatgagaggtcctcacatcattcagctcgatactccgttatcagccagtgaggtatag

SEQ ID NO: 56168 - DNA, 2373 bp, Artificial Sequence
  derived and/or modified sequence
atgaaagcatttggtccgcctcatgaaggccccctccaaggattagtcgcctctagaatagaaacctacggcggccgtcaccgggcgagcgctcagtctacagcaggacgactatacccccgcggatatcctgtgttagatcccagccgaagaagacttcagcaatacgttccattcgccagagggtcaggccaggctaggggcctctctccgatgcggctgagagatccagaacccgagaaaaggcacgggggacacgtgggtgccggactgctgcactctcctaaacttaaggagctgacaaaagcacacgaactggaggttagattgcataccttttccatgttcggaatgcctcgcctgccaccagaagaccggcgtcattgggaaataggagaaggaggggatagtggattaacaatcgaaaagtcctggagagagcttgttcctggccacaaagagatgtcacaggagctctgtcaccaacaggaagccttatgggaactcttgacaacagagttgatatatgtgcgcaagcttaagataatgactgacttgctagcagcgggtctgttaaatctacagagagtgggccttctgatggaggttagcgctgagactctgtttggcaacgtgcccagcttgatcaggacccatcgaagcttttgggatgaagtattgggccccaccttggaggaaaccagagcctccggtcagcccctggaccctatcggtttgcaatcaggatttttaactttcggccagcggttccatccttacgttcagtattgtctgagggtgaagcaaacaatggcttacgcacgagaacagcaggaaaccaatcctcttttccacgcattcgttcagtggtgcgagaagcataagagatctggaagacagatgctttgtgatctgcttataaaaccccaccaaaggattacaaaatatccactccttctccacgctgttctgaaaagaagcccagaggcccgggcccaggaagctctcaacgctatgatcgaagccgtagagtcctttttgagacacatcaatggccaggtacgccaaggagaagaacaggaaagtctggccgcagcagctcagagaatcggaccctatgaagtgctggagcccccctcagacgaagtcgaaaaaaatctccggccattttctacactggacctaacatcccctatgctgggcgtggcctcagagcatacccgacaactgctgctggaggggccagtaagagtgaaagagggccgagagggcaaactcgacgtctacctttttctgttttcagatgttttgctggtgactaagccacagcggaaagccgacaaggccaaagtaataagaccccccttgatgctagaaaagctggtttgtcaaccgttgcgtgaccccaattccttcttactgattcacttaactgaatttcagtgtgtgtcatctgcgttattggtacactgccccagccctaccgatagagctcagtggttagaaaagactcaacaagctcaagctgccctccaaaaactcaaggccgaggaatatgtccagcagaaacgtgagctcctcacgctgtatcgtgatcaggatagagagtctccatctacccggccttcaacgccaagtctggaaggctcccaaagtagtgctgaaggacgaacccctgaattttctaccatcatcccacacctagtcgttaccgaagatactgacgaagatgccccccttgtcccagatgacacatcagactctggatatgggaccttgattcctggcactcctacagggagtagatcaccactctcccggctcaggcagagagcgcttcgccgggaccctcggttgactttctccacactcgagctgagagatattccgctgaggcctcatccgcccgatcctcaggctccccaaagacgatcagcgcctgaattacccgagggaatcttaaaaggtggatctctccctcaggaggatccccccacatggagtgaagaggaagatggcgcttcagaacggggaaatgtagtagtagagaccctgcaccgagcgagactcagaggccaattgccaagtagtccaacccacgccgactctgccggcgagtccccatgggaatcaagtggcgaggaggaagaagagggccccttattcctgaaagcagggcacacctcactgaggccaatgcgcgccgaggacatgctgagggagattcgggaggagctggcttcccagagaattgaaggagcagaagaaccacgcgacagtaggcccaggaagctgactcgcgcacaacttcaaaggatgcgaggaccacacatcatccagctcgataccccgctgagcgcaagtgaagtgtag

SEQ ID NO: 56169 - DNA, 2373 bp, Artificial Sequence
  derived and/or modified sequence
atgaaggccttcggccccccccacgagggccccctgcagggcctggtggccagcagaatcgagacctacggcggcagacacagagccagcgcccagagcaccgccggcagactgtaccccagaggctaccccgtgctggaccccagcagaagaagactgcagcagtacgtgcccttcgccagaggcagcggccaggccagaggcctgagccccatgagactgagagaccccgagcccgagaagagacacggcggccacgtgggcgccggcctgctgcacagccccaagctgaaggagctgaccaaggcccacgagctggaggtgagactgcacaccttcagcatgttcggcatgcccagactgccccccgaggacagaagacactgggagatcggcgagggcggcgacagcggcctgaccatcgagaagagctggagagagctggtgcccggccacaaggagatgagccaggagctgtgccaccagcaggaggccctgtgggagctgctgaccaccgagctgatctacgtgagaaagctgaagatcatgaccgacctgctggccgccggcctgctgaacctgcagagagtgggcctgctgatggaggtgagcgccgagaccctgttcggcaacgtgcccagcctgatcagaacccacagaagcttctgggacgaggtgctgggccccaccctggaggagaccagagccagcggccagcccctggaccccatcggcctgcagagcggcttcctgaccttcggccagagattccacccctacgtgcagtactgcctgagagtgaagcagaccatggcctacgccagagagcagcaggagaccaaccccctgttccacgccttcgtgcagtggtgcgagaagcacaagagaagcggcagacagatgctgtgcgacctgctgatcaagccccaccagagaatcaccaagtaccccctgctgctgcacgccgtgctgaagagaagccccgaggccagagcccaggaggccctgaacgccatgatcgaggccgtggagagcttcctgagacacatcaacggccaggtgagacagggcgaggagcaggagagcctggccgccgccgcccagagaatcggcccctacgaggtgctggagccccccagcgacgaggtggagaagaacctgagacccttcagcaccctggacctgaccagccccatgctgggcgtggccagcgagcacaccagacagctgctgctggagggccccgtgagagtgaaggagggcagagagggcaagctggacgtgtacctgttcctgttcagcgacgtgctgctggtgaccaagccccagagaaaggccgacaaggccaaggtgatcagaccccccctgatgctggagaagctggtgtgccagcccctgagagaccccaacagcttcctgctgatccacctgaccgagttccagtgcgtgagcagcgccctgctggtgcactgccccagccccaccgacagagcccagtggctggagaagacccagcaggcccaggccgccctgcagaagctgaaggccgaggagtacgtgcagcagaagagagagctgctgaccctgtacagagaccaggacagagagagccccagcaccagacccagcacccccagcctggagggcagccagagcagcgccgagggcagaacccccgagttcagcaccatcatcccccacctggtggtgaccgaggacaccgacgaggacgcccccctggtgcccgacgacaccagcgacagcggctacggcaccctgatccccggcacccccaccggcagcagaagccccctgagcagactgagacagagagccctgagaagagaccccagactgaccttcagcaccctggagctgagagacatccccctgagaccccacccccccgacccccaggccccccagagaagaagcgcccccgagctgcccgagggcatcctgaagggcggcagcctgccccaggaggacccccccacctggagcgaggaggaggacggcgccagcgagagaggcaacgtggtggtggagaccctgcacagagccagactgagaggccagctgcccagcagccccacccacgccgacagcgccggcgagagcccctgggagagcagcggcgaggaggaggaggagggccccctgttcctgaaggccggccacaccagcctgagacccatgagagccgaggacatgctgagagagatcagagaggagctggccagccagagaatcgagggcgccgaggagcccagagacagcagacccagaaagctgaccagagcccagctgcagagaatgagaggcccccacatcatccagctggacacccccctgagcgccagcgaggtgtag

SEQ ID NO: 56170 - protein, 320 aa, Artificial Sequence
  derived and/or modified sequence
MCPREGGRASTIHQKTEKAFGQLLCQPLGEPKIQHPLKAALQKLKAEEYVQQKRELLTLYRDQDRESPSTRPSTPSLEGSQSSAEGRTPEFSTIIPHLVVTEDTDEDAPLVPDDTSDSGYGTLIPGTPTGSRSPLSRLRQRALRRDPRLTFSTLELRDIPLRPHPPDPQAPQRRSAPELPEGILKGGSLPQEDPPTWSEEEDGASERGNVVVETLHRARLRGQLPSSPTHADSAGESPWESSGEEEEEGPLFLKAGHTSLRPMRAEDMLREIREELASQRIEGAEEPRDSRPRKLTRAQLQRMRGPHIIQLDTPLSASEV

SEQ ID NO: 56171 - protein, 758 aa, Artificial Sequence
  derived and/or modified sequence
MGCRLHAPGEKAAHDPSRRRLQQYVPFARGSGQARGLSPMRLRDPEPEKRHGGHVGAGLLHSPKLKELTKAHELEVRLHTFSMFGMPRLPPEDRRHWEIGEGGDSGLTIEKSWRELVPGHKEMSQELCHQQEALWELLTTELIYVRKLKIMTDLLAAGLLNLQRVGLLMEVSAETLFGNVPSLIRTHRSFWDEVLGPTLEETRASGQPLDPIGLQSGFLTFGQRFHPYVQYCLRVKQTMAYAREQQETNPLFHAFVQWCEKHKRSGRQMLCDLLIKPHQRITKYPLLLHAVLKRSPEARAQEALNAMIEAVESFLRHINGQVRQGEEQESLAAAAQRIGPYEVLEPPSDEVEKNLRPFSTLDLTSPMLGVASEHTRQLLLEGPVRVKEGREGKLDVYLFLFSDVLLVTKPQRKADKAKVIRPPLMLEKLVCQPLRDPNSFLLIHLTEFQCVSSALLVHCPSPTDRAQWLEKTQQAQAALQKLKAEEYVQQKRELLTLYRDQDRESPSTRPSTPSLEGSQSSAEGRTPEFSTIIPHLVVTEDTDEDAPLVPDDTSDSGYGTLIPGTPTGSRSPLSRLRQRALRRDPRLTFSTLELRDIPLRPHPPDPQAPQRRSAPELPEGILKGGSLPQEDPPTWSEEEDGASERGNVVVETLHRARLRGQLPSSPTHADSAGESPWESSGEEEEEGPLFLKAGHTSLRPMRAEDMLREIREELASQRIEGAEEPRDSRPRKLTRAQLQRMRGPHIIQLDTPLSASEV

SEQ ID NO: 56172 - DNA, 174 bp, Artificial Sequence
  derived and/or modified sequence
atgtggaagccaatgccaagtccctctaacatgaaagcttcagctgctcttctttgcctcctgctgactgctgctgctttctccccccagggactggcgcagccggcatctaggcccaattggactcgaagatctgtgctcacccctcataggagcggctcccgaacactttag

SEQ ID NO: 56173 - DNA, 963 bp, Artificial Sequence
  derived and/or modified sequence
atgtgcccaagggagggtggcagggcatcgactattcatcaaaagaccgaaaaggcattcggtcagctgctgtgccagcccttaggggaacccaagatccagcaccccttaaaggcagccctgcagaagttgaaagctgaggaatacgtccagcagaaaagagagcttctgacgctctatagagatcaggatagggaaagcccttccactaggcccagcacaccatccctcgaaggcagtcagtcatccgctgagggtcgtaccccagagttttcaactatcatcccacatctggtagttaccgaggatactgatgaggacgccccgcttgtgcccgatgacacatccgattcgggatacgggacactgatcccagggactcctaccggttctagaagcccgcttagccggctccgtcagcgcgcgctccgcagggacccccgtttaacattctcaaccttagagttgcgggatatccccttgcgaccgcacccgccagatcctcaggccccacaaagaaggagcgcaccagagctgccagagggcatactgaagggcggatctctacctcaggaggatccacccacatggagcgaggaggaggatggggcttccgaacggggcaacgttgtggtcgagactttacaccgcgcccggctgcgcggtcaattgcccagctcacccacacacgccgattccgctggtgaaagtccctgggagtcctcaggagaagaggaggaggagggccccctgtttctcaaagctggccacacctcactgcgcccaatgcgtgcggaggatatgttgagggaaattagagaggagttagcctctcaacgcatcgaaggcgcagaggaaccccgtgattctcggccccggaagctgactcgcgcccagctacagagaatgcggggaccccacattatccagctggatactccattgtcagcatccgaagtgtag

SEQ ID NO: 56174 - DNA, 2277 bp, Artificial Sequence
  derived and/or modified sequence
atgggatgcagactgcatgcccccggtgagaaggctgcccacgatcccagtcgccgtcgtttgcagcagtacgttccgttcgcaaggggatcgggccaggcccgcgggctgtcccctatgcggcttagagacccagagccagaaaaacgacatggcgggcatgtgggggcaggcctgctgcattcacccaagttaaaggaactcactaaggcccatgagctggaggtgaggcttcacactttcagcatgttcggcatgccccggcttccacctgaggaccggcgccactgggagataggagaagggggcgattctgggctcaccatcgaaaaaagctggagggagctagtccctgggcacaaggagatgtcacaggagctgtgccatcagcaggaagcattatgggagctgttgacaaccgagctaatatatgtgagaaagctaaaaatcatgacagacctgttggccgccgggctcttgaacttacagcgcgttggtctgctcatggaggtgtctgccgaaaccttgtttggtaacgtaccatctctgattcgcacacacaggtccttttgggacgaagtacttggacctactctggaagaaactcgcgcaagcgggcagccacttgatcccatcggtctgcagagcggcttcttaaccttcggtcagcgcttccatccttacgtgcagtattgccttagagtcaagcagacgatggcatatgcccgtgagcagcaggagacaaatcccctttttcatgcctttgtacagtggtgcgagaaacataaaagaagcggccgacagatgctttgcgatctgttaatcaaaccccaccagcgcatcacaaaataccccttattgttgcacgccgtgttgaaaagaagccccgaagctagggcacaggaggccctgaacgcaatgatcgaggcagtcgaatctttcctgagacacattaacggccaggtcaggcagggcgaggagcaagagagcctggcagcagccgcccaaagaatcggaccctacgaagtccttgagccaccatcggacgaggtagaaaagaacctgaggccgttttctactctggatctcacatcaccaatgctaggtgttgcttccgagcacactcgccagctattgctggaaggccccgtccgcgtgaaggaggggcgcgagggaaagttagatgtatacctgttcctgttttccgacgttcttttagtgactaaaccccagaggaaggccgataaggctaaagtaatcaggccaccacttatgttagagaagctcgtgtgtcagccactgagagatccaaactccttcctcctgatccacttgacagaatttcagtgcgtaagcagtgcactgcttgtgcattgcccatctcccactgatcgagcacagtggctcgaaaaaacccaacaggcccaagctgcgcttcaaaagctaaaggctgaggagtacgtacagcagaagagggagcttttgacgctctatagggatcaagaccgagaatccccctccactagaccatctaccccatcccttgaaggatctcaaagctcagctgaaggacgcacacctgaattctccactatcatccctcatcttgttgttactgaagataccgacgaggatgcgccactagtccctgacgacacgtcagactctggatatggaaccctcatccccgggactccaactggatctcgctctcctctgtcacgactccgacagcgagctttacgtcgggaccccagattaactttctccactcttgaattgcgagacataccattaagaccacatccccctgacccacaagcacctcagcggaggagtgccccagagcttcctgagggcatactgaagggcgggtctctgccacaggaggaccctcccacttggtccgaagaggaagacggggcttctgagagaggcaacgtggttgtggagactctgcatcgcgctcgcctgcggggccagcttcctagcagtcctacgcatgctgattcagcgggggagtccccgtgggagtcgtctggagaggaagaagaggaggggcctttgttcctcaaagctggccatacttctcttcgacccatgcgagccgaggacatgctacgcgaaatccgcgaagaactcgcatctcagcgcatagaaggcgccgaagaacctagagactctcgtcctcgtaaacttaccagagcccaactgcagaggatgcgaggaccgcatatcatacagctggatacacctctgagcgcctcagaggtttag

SEQ ID NO: 56175 - DNA, 963 bp, Artificial Sequence
  derived and/or modified sequence
atgtgcccccgggagggcggccgggccagcaccatccaccagaagacagagaaggccttcggccagctgctgtgccagcccctgggggagcccaagatccagcaccccctgaaggccgccctgcagaagctgaaggccgaggagtatgtgcagcagaagcgggagctgctgaccctgtacagagaccaggaccgggagagccccagcacccggcccagcacccccagcctggagggcagccagagcagcgctgagggccgcaccccagagttcagcaccatcatcccccacctggtggtgacagaggacacagatgaagatgcccccctggtgcctgatgacaccagtgacagcggctacggcaccctcatccctggcacccccaccggcagccgcagccccctgagccggctgcggcagagggccctgcggcgggacccccggctgaccttcagcaccctggagctgcgggacatccccctgcggccccaccccccagacccccaggccccccagaggagaagtgcccctgagctgcctgagggcatcctgaagggcggcagcctgccccaggaggacccccccacctggagcgaggaggaggatggagccagcgagagaggaaatgtggtggtggagaccctgcaccgggcccggctgcggggccagctgcccagcagccccacccatgctgacagcgctggggagagcccctgggagagcagcggggaggaggaggaggagggccccctcttcctgaaggccggccacaccagcctgcggcccatgagagctgaggacatgctgcgggagatccgggaggagctggccagccagagaattgaaggagctgaggagccccgggacagccggcccaggaagctgacccgggcccagctgcagaggatgaggggcccccacatcatccagctggacacccccctgagcgccagcgaggtgtag

SEQ ID NO: 56176 - DNA, 2277 bp, Artificial Sequence
  derived and/or modified sequence
atgggctgccgcctgcacgcccctggagagaaggccgcccatgaccccagcagaagaaggctgcagcagtatgtgccctttgcccggggcagcggccaggcccggggcctgagccccatgaggctgcgggaccctgagcctgagaagagacatggaggccacgtgggcgccggcctgctgcacagccccaagctgaaggagctgaccaaggcccacgagctggaggtgcggctgcacaccttctccatgtttggcatgccccggctgcccccagaggaccggcggcactgggagattggagagggcggggacagcggcctgaccatcgagaagtcctggagggagctggtgcccggccacaaggagatgagccaggagctgtgccaccagcaggaggccctgtgggagctgctgaccacagagctgatctacgtgaggaagctgaagatcatgacagacctgctggccgccggcctgctgaacctgcagagggtgggcctgctgatggaggtgtctgctgagaccctgtttggaaatgtgcccagcctcatccgcacccaccgctccttctgggatgaggtgctgggccccaccctggaggagacccgggccagcggccagcccctggaccccatcggcctgcagagcggcttcctgaccttcggccagcgcttccacccctacgtgcagtactgcctgcgggtgaagcagaccatggcctatgcccgggagcagcaggagaccaaccccctcttccacgcctttgtgcagtggtgtgagaagcacaagaggagcggccggcagatgctgtgtgacctgctgatcaagccccaccagaggatcaccaagtaccccctgctgctgcatgctgtgctgaagaggagccctgaggcccgggcccaggaggccctgaatgccatgattgaggccgtggagagcttcctgcggcacatcaatggccaggtgcggcagggcgaggagcaggagagcctggccgccgccgcccagagaattggcccctatgaggtgctggagcccccatctgatgaggtggagaagaacctgcggcccttcagcaccctggacctgaccagccccatgctgggcgtggccagcgagcacacccggcagctgctgctggagggccctgtgcgggtgaaggagggccgggagggcaagctggatgtgtacctgttcctgttcagtgatgtgctgctggtgaccaagccccagaggaaggctgacaaggccaaggtgatccggccccccctgatgctggagaagctggtgtgccagcccctgcgggaccccaacagcttcctgctgatccacctgacagagttccagtgtgtgtcctctgccctgctggtgcactgccccagccccacagaccgggcccagtggctggagaagacccagcaggcccaggccgccctgcagaagctgaaggccgaggagtatgtgcagcagaagcgggagctgctgaccctgtacagagaccaggaccgggagagccccagcacccggcccagcacccccagcctggagggcagccagagcagcgctgagggccgcaccccagagttcagcaccatcatcccccacctggtggtgacagaggacacagatgaagatgcccccctggtgcctgatgacaccagtgacagcggctacggcaccctcatccctggcacccccaccggcagccgcagccccctgagccggctgcggcagagggccctgcggcgggacccccggctgaccttcagcaccctggagctgcgggacatccccctgcggccccaccccccagacccccaggccccccagaggagaagtgcccctgagctgcctgagggcatcctgaagggcggcagcctgccccaggaggacccccccacctggagcgaggaggaggatggagccagcgagagaggaaatgtggtggtggagaccctgcaccgggcccggctgcggggccagctgcccagcagccccacccatgctgacagcgctggggagagcccctgggagagcagcggggaggaggaggaggagggccccctcttcctgaaggccggccacaccagcctgcggcccatgagagctgaggacatgctgcgggagatccgggaggagctggccagccagagaattgaaggagctgaggagccccgggacagccggcccaggaagctgacccgggcccagctgcagaggatgaggggcccccacatcatccagctggacacccccctgagcgccagcgaggtgtag

SEQ ID NO: 56177 - DNA, 963 bp, Artificial Sequence
  derived and/or modified sequence
atgtgcccccgggagggcggccgggccagcaccatccaccagaagaccgaaaaggcattcggtcagctgttgtgccagcctcttggtgagcccaagattcagcaccctctgaaggccgctctgcaaaaactgaaggctgaagaatacgtgcagcagaaaagagagttactaacgctgtaccgggaccaggatcgcgaaagcccttctacccggccctccacgccgtccctggaaggcagtcagagttcggcggagggcaggacaccagaattctccactattattccacacctcgtcgtcacagaagacactgatgaggacgcacctctggtgccagatgacacatccgactcaggttacgggacgctcattcctgggaccccaacaggcagccgttctcctttaagcagattgcgccagcgggctttgcggcgggacccccggctgacattcagtactcttgagttgcgggatattcctttaagaccccaccctcctgacccgcaggcccctcagaggagatccgcaccggagctgccagaaggaatactgaagggcgggagcctgccgcaggaggatcctcctacttggagcgaggaagaagacggcgcctccgagcggggtaacgtggttgtcgagactttgcatagagctcgcctccgcggtcagctcccatccagcccaacacacgccgactcagccggcgagtccccttgggaatcatccggcgaggaggaggaggaaggtcccctgtttctgaaggccggtcacacttctctgagaccaatgagagccgaagatatgctcagggaaatccgagaggaactcgcttctcagagaatcgagggtgccgaggagccccgcgactcaaggccccgcaagctcacgcgagctcagttgcaacggatgcgcggcccccacataatccagctggacacccccctatccgcttctgaggtctag

SEQ ID NO: 56178 - DNA, 2277 bp, Artificial Sequence
  derived and/or modified sequence
atgggctgccggctgcacgcccccggcgagaaggccgcccacgacccaagcagacgacggctgcagcaatacgtgccattcgcccggggctctggccaagcccgtggcttatctcctatgcgcctgcgtgaccccgagcccgagaagcggcacggaggccacgtgggcgccgggctacttcattctcctaaactgaaagaactcacaaaggctcacgaactggaagtgaggctgcatactttctccatgttcggtatgcctcgactcccacccgaggaccgccgccactgggaaatcggtgaggggggagacagcggactcacaattgaaaagagctggcgggagctggtgccaggacacaaggagatgtcacaggagctctgtcaccaacaggaggcactatgggagttgctgacaaccgaactgatctatgttcgcaagctgaaaatcatgaccgatctgctggcagccggcctgctcaatctgcagcgggtgggactgctgatggaagtctccgcggagacactctttggcaatgtgccttctttaatccgcacacacaggagcttctgggacgaggtgttaggtccgaccctcgaggagacacgcgccagcggtcaacccctcgatcccattggcctgcaaagtgggttcctgacatttggacagcgattccatccctatgtgcagtattgcttgagagtgaagcaaaccatggcctacgcccgggagcaacaagagaccaatcccttgtttcacgcctttgtgcagtggtgtgagaaacataagcgatctggcaggcagatgctctgtgacctgctgataaagcctcatcagaggatcacaaagtaccctctactgctgcacgcagtgctgaaacgaagccccgaggcccgagctcaggaggcccttaacgccatgatcgaggccgtggaaagctttctgaggcatatcaacggacaggtccgccagggtgaagaacaggagagccttgccgccgcagctcagcggattggcccctatgaggtactggagcctccctctgacgaggtcgagaaaaacctcagacctttctcaacactggatttgaccagccctatgctcggagtcgccagtgagcatacaagacagctattgttagaaggccccgtgcgagttaaagaaggaagggagggcaagctcgacgtgtatctgttcctgttttcggacgttctgttggttaccaagccccaacgcaaggcagacaaagcaaaagtaattagaccccccctgatgctcgaaaagctcgtctgtcagcctctgagagatcccaactctttcctcctcattcacctcacagagttccaatgtgtttcctccgctctgctggtccattgcccttctccaaccgatcgagcacaatggctggagaagacccaacaggcacaggcggccctacagaagcttaaagcagaggaatacgtgcagcagaaacgcgagcttctgaccctctaccgggatcaagaccgggagtccccttcaacacgcccctccactcccagtctggagggttctcaatcatccgccgaggggcgaacaccggagttcagtacgataatacctcatttggtggttacggaggacaccgatgaagatgcgcccttggttccggacgatacatcagattccggttacggaaccctgattcctgggactcccactggcagcaggtcacctctgagccgattgaggcagcgggccctccgcagagacccgagactcaccttcagtacgctggaactgcgcgacatccccttgaggccacaccccccagatccccaggctccacagcgccggagtgcacccgaactgcccgagggaatcttgaagggcggaagcttaccgcaggaggacccccctacatggtccgaagaggaggacggcgcctctgaacgaggcaatgtggtggttgagacgctgcaccgagctcggctgcgggggcagctgccctcctcaccgacgcacgccgactctgccggtgagagcccatgggaatcgtctggagaggaagaggaggaggggccactctttctcaaggcggggcacacgtccctcagacccatgcgcgccgaagacatgctgcgtgagatcagagaagagctcgcatctcagcggatcgagggtgccgaagagccaagagacagcaggccaagaaaattaaccagagcacagctacaaagaatgaggggcccacatatcatccagctggatacccccctgagtgcctccgaagtttag

SEQ ID NO: 56179 - DNA, 1424 bp, Artificial Sequence
  derived and/or modified sequence
aaaagaatgtaggaaggaaggaaggaacgaatgaacatgggagcgcagaggggaggaggagagaggctggggtggattcagtttcagactggacaatctgatgtgccccagagagggaggcagagcctccaccatccatcagaagacagaaaaagcctttggccagctactgtgccagccactgggagagcccaagatacagcatcccctgaaggccgccctacagaagctgaaggcagaggagtatgttcaacagaagagggagctcctgaccctctatcgggaccaggacagggagtcccccagcaccaggccctccacgccttccctggagggctctcagagcagcgcagaggggaggactcctgagttctcgaccattatcccccacctggtggtgacagaagacacagatgaagatgctccccttgtgccagatgatacctcagactctggctacggcactttgatcccaggcacccccacggggtcccgctccccactgagccgtctacgccaaagagcccttcggcgggaccctcgcctcaccttctccaccctggaactccgggacatccctctgcgtccccaccctcccgacccccaagctcctcaacgccgaagcgcccccgaactgccggaaggaatcctaaaaggaggcagtcttccccaggaagacccaccaacctggtctgaggaagaagatggggcctccgagcgagggaatgtggtggtggaaacactccacagggcccggcttcggggccagcttccctcctccccaacccatgctgactctgccggggaaagcccctgggagtcctcaggggaggaggaagaagaggggcctctgttcctgaaagctggccacacatccctgcgcccaatgcgggctgaggacatgctcagagagatccgggaggagctggccagccaaaggattgagggggccgaggagccccgggacagcaggccacggaagctgactcgggcccagctgcagaggatgcgggggccccacatcattcagctggacacccctctgtccgcatcagaggtatgaggaatgcagaggacctttggcatgcatctctcccagaggagatctctccccagtagtgctggtcaccctccggcatctgtgactctacctcaaggaccacatttcccaaaggaagcctggcccaggcaccctgcctcctgctctgtttggggatcaagaactgtaaatttatgtatcataggtgcacctgagccccacagaaagttgtgcataaaaatgactgccctggctgggcatggctgcctgtaatcccagcactttgggaggctgaggtgggaggatcccttgagcccaggagttccagaccagcctgggcaatatagggaaaccctgtctttacaaaaaaaaattttaaaaatta

SEQ ID NO: 56180 - DNA, 3111 bp, Artificial Sequence
  derived and/or modified sequence
atcaaaccccagagctggcgcctcccaggctcccgcctctgcttggcaggagtttgaggccttcctgagatctgcctctccctgagtcaggatgaagatgagcaaaggttcagggtgtccctactcctccagtggtgggtagggacaggagggtgcctgccttggctccacccctggctccacctgcctggctctcctccagtcctaaccaagcagaggggtgtggaagccaggtctgtccctcagcctgcaggtttcccctccaccttgaggacagttctgcttgtggctgggacatcccctgcctcaatgcacgataattttgcctttggagatgggactttcctaggctgtgggtgagaagggagactagaaagtatgtggggtaattcaggccacaggcaaatgaaggaatgtgaccaggcctgccctgggaggagctgtgtggctgtggcttcagcctttcacacagaagggcagccactcccagctggatgggatgcaggctgcacgcccctggggagaaggctgcacatgatcccagtcgccgacgcctccagcagtatgtcccctttgccaggggttctggccaggcccgaggcctgtcacccatgagactgcgagatccagagcccgagaagaggcacgggggccatgtgggggctggcctgcttcactcccccaaactcaaggaactcaccaaggcccatgagctggaggtgaggctgcacactttcagcatgtttgggatgccccggctgccccctgaggaccggcggcactgggagataggagagggtggcgacagtggcctgaccatcgagaagtcctggagggagctggtgcctgggcacaaggagatgagccaggagctctgccaccaacaggaggccctgtgggagctcctgaccaccgagctgatctacgtgagaaagctcaagatcatgactgatctgctagccgccggcctgctgaacctgcagcgagtgggactgctgatggaagtgtcagctgagaccctgtttggaaatgtccccagcctgattcgaacccaccggagcttttgggatgaggtgctggggcccaccctggaggagactcgggcctcgggccagcctctggaccccattggtctgcaaagtggcttcctgacgtttggccagcggttccacccctatgtccagtactgcctccgagtgaagcagaccatggcttacgcccgagaacagcaagaaactaaccctctcttccatgccttcgtgcagtggtgtgagaagcacaagcgctctgggaggcagatgctctgtgacttgcttatcaagccccaccagcgcatcaccaagtacccactgctgctccatgctgtgctcaagaggagccccgaggcacgagcccaagaggccctgaatgccatgattgaagccgtggagtcattcctgcgacacatcaatgggcaggtccgccagggcgaagagcaagagagcttggcggctgcagcacaacgcatcgggccctacgaggtgctggagccacccagtgatgaggtggagaagaacctgcgcccattctccaccctggacctgacgtcccccatgctgggggttgcatctgagcacaccagacagctgctgctggaggggcctgtgcgagtgaaggagggacgagaagggaagctggacgtgtacctgttcctcttctctgatgtgctccttgtgaccaagccccagcgcaaggcggacaaagccaaggtcatccgaccccctctcatgctggagaagctcgtgtgccaacccctgcgagaccccaacagcttcctgctgatccacctcactgaattccagtgtgtctccagcgccctccttgtgcactgtcccagtcctacagaccgtgcccagtggctggagaagacccagcaggcccaggccgccctacagaagctgaaggcagaggagtatgttcaacagaagagggagctcctgaccctctatcgggaccaggacagggagtcccccagcaccaggccctccacgccttccctggagggctctcagagcagcgcagaggggaggactcctgagttctcgaccattatcccccacctggtggtgacagaagacacagatgaagatgctccccttgtgccagatgatacctcagactctggctacggcactttgatcccaggcacccccacggggtcccgctccccactgagccgtctacgccaaagagcccttcggcgggaccctcgcctcaccttctccaccctggaactccgggacatccctctgcgtccccaccctcccgacccccaagctcctcaacgccgaagcgcccccgaactgccggaaggaatcctaaaaggaggcagtcttccccaggaagacccaccaacctggtctgaggaagaagatggggcctccgagcgagggaatgtggtggtggaaacactccacagggcccggcttcggggccagcttccctcctccccaacccatgctgactctgccggggaaagcccctgggagtcctcaggggaggaggaagaagaggggcctctgttcctgaaagctggccacacatccctgcgcccaatgcgggctgaggacatgctcagagagatccgggaggagctggccagccaaaggattgagggggccgaggagccccgggacagcaggccacggaagctgactcgggcccagctgcagaggatgcgggggccccacatcattcagctggacacccctctgtccgcatcagaggtatgaggaatgcagaggacctttggcatgcatctctcccagaggagatctctccccagtagtgctggtcaccctccggcatctgtgactctacctcaaggaccacatttcccaaaggaagcctggcccaggcaccctgcctcctgctctgtttggggatcaagaactgtaaatttatgtatcataggtgcacctgagccccacagaaagttgtgcataaaaatgactgccctggctgggcatggctgcctgtaatcccagcactttgggaggctgaggtgggaggatcccttgagcccaggagttccagaccagcctgggcaatatagggaaaccctgtctttac

SEQ ID NO: 56181 - DNA, 963 bp, Artificial Sequence
  derived and/or modified sequence
atgtgcccaagggagggcggacgcgcaagtactatccaccagaagactgaaaaagcctttggtcaacttctgtgtcagccccttggtgagcccaagatccagcatccgctgaaagcggctctccagaaactcaaggcggaagaatatgttcagcaaaagcgggaactgctcacattatatcgagatcaggatcgggagtcaccaagcactcggccttcaacacctagtcttgaaggtagccagagctcagccgagggaagaacccccgagttctcaactatcattcctcacctcgtagtgacggaggacacggacgaagatgcgcctctcgtgcccgacgacacaagtgattctggctacgggaccctcattcccggtacaccaacaggtagcaggtctccgctcagtcggctgcgacagcgtgccctccgccgtgacccgagactgacgttttcaaccctggagctccgcgatatacccctccggcctcaccctcctgatccacaggctccccagagacggtcagctccagagctacccgaagggatcctgaaggggggatcactgccccaagaagaccccccaacttggtctgaggaggaggacggggcatccgagcgaggcaatgtggttgttgagaccctgcaccgggcaagactgcggggtcaactaccttctagccccactcatgctgattctgcaggggagtctccatgggaatctagtggcgaagaagaggaggaggggcctctgttcctcaaggccggacacacaagcttacgacctatgagagctgaagatatgctgcgagaaatacgcgaggaactggctagccagcgaattgagggtgcagaggaaccacgggattccaggcctcgcaaactcactagggcccagctgcagagaatgaggggacctcacatcatccagttggatacaccgctgtcagcttccgaggtttag

SEQ ID NO: 56182 - DNA, 2277 bp, Artificial Sequence
  derived and/or modified sequence
atgggctgccgtttacatgcccctggagagaaagctgcgcatgatccatctaggcggaggctgcagcagtacgttccattcgccagagggagcggccaggctcgagggctctcgcccatgagactgcgtgaccccgagccagaaaagagacatggcggtcatgtcggcgctgggcttctccatagcccgaagctcaaagagttaactaaggctcatgagttggaggtgaggttgcacaccttcagcatgttcggtatgccacgcctcccacccgaagatagacggcattgggagatcggagagggaggcgactccggactgacgatagaaaaatcatggcgcgaacttgttcccggtcacaaagagatgtcgcaggagttgtgtcaccaacaggaggcgctgtgggaacttctcaccactgagctaatatatgtccgcaagttgaagattatgacagatttgctcgccgctgggctgctgaacttacagcgggtaggcctcctgatggaggtttccgcggagacgctgttcggcaatgtgcccagcttaattaggactcacaggtctttttgggacgaggtactcgggcctactttggaagaaacacgcgcaagcgggcaacctcttgatcctatcggactgcagtcaggtttcctgacttttggccagcgtttccatccttacgtccaatactgtcttcgcgttaaacaaaccatggcttatgccagagagcagcaggagactaatcctttattccacgcattcgtgcagtggtgcgagaaacacaagcgcagtggacgacagatgctgtgtgacctcctgataaagccccatcagaggattactaaatatcctcttttgctccatgcggtgttgaagagatccccggaggccagggcccaagaggccctcaatgcgatgatagaagctgtagagagctttctgcgacatattaacggacaggtcaggcagggggaggaacaggagtctctggctgctgccgctcagagaatcggcccatacgaggtcctagagccaccctccgatgaagtggaaaaaaatttgcgcccattcagcactctggatcttacctctcccatgctcggtgtggcctccgaacatacacgacagttgctcttggaaggccctgtccgcgttaaagaggggcgtgaaggcaagctggatgtttacctgtttttgttctcagacgtgttattagtgacgaaaccgcagcgcaaggcagacaaagcaaaagtgataaggccccctcttatgctcgagaaattggtgtgccaacccctgcgagacccgaattccttcctgctgatacacttgacagagtttcaatgcgtgtcctcagccctgcttgtgcattgcccaagccctaccgaccgggctcagtggttagaaaaaacccagcaggctcaagcagccctgcagaaattgaaagcggaggaatatgttcagcaaaaacgcgaactgctgaccctttacagagaccaagatagagagagcccgtccactcgaccctcaacaccatccctggaaggcagccagtcttccgcggaggggagaactcctgaatttagcactattataccgcatctcgtggtgacagaggatacagatgaggacgccccattagtccctgatgacacatctgattcaggatacggcacgctcattccaggcaccccgacggggagccgttctccactcagtcgcctgaggcagagagcccttcgcagggatcctaggctgacattcagcaccctggaactgagggacattcccctccgaccacacccccctgatccacaggcacctcagcgaagaagtgcccctgaactccccgagggaattctaaaaggagggagcctgccccaggaggacccaccaacctggagtgaagaggaggatggcgcttccgagcggggaaatgtggtcgtggagaccctccacagggcacgattgagggggcagctgccaagttcccccacacatgccgatagtgctggcgaaagtccttgggaatctagtggtgaggaagaggaggagggacccctctttttaaaagccggacatacatccctccgtccaatgcgggcagaagacatgctgagagagatcagagaggaacttgccagccagaggatagaaggcgctgaagagccacgggactctcgcccacgaaagctgacgcgcgctcagctccagcggatgagagggccacacatcatccagctcgacacgcctctgtccgcatccgaggtctag

SEQ ID NO: 56183 - DNA, 963 bp, Artificial Sequence
  derived and/or modified sequence
atgtgccccagagagggcggcagagccagcaccatccaccagaagaccgagaaggccttcggccagctgctgtgccagcccctgggcgagcccaagatccagcaccccctgaaggccgccctgcagaagctgaaggccgaggagtacgtgcagcagaagagagagctgctgaccctgtacagagaccaggacagagagagccccagcaccagacccagcacccccagcctggagggcagccagagcagcgccgagggcagaacccccgagttcagcaccatcatcccccacctggtggtgaccgaggacaccgacgaggacgcccccctggtgcccgacgacaccagcgacagcggctacggcaccctgatccccggcacccccaccggcagcagaagccccctgagcagactgagacagagagccctgagaagagaccccagactgaccttcagcaccctggagctgagagacatccccctgagaccccacccccccgacccccaggccccccagagaagaagcgcccccgagctgcccgagggcatcctgaagggcggcagcctgccccaggaggacccccccacctggagcgaggaggaggacggcgccagcgagagaggcaacgtggtggtggagaccctgcacagagccagactgagaggccagctgcccagcagccccacccacgccgacagcgccggcgagagcccctgggagagcagcggcgaggaggaggaggagggccccctgttcctgaaggccggccacaccagcctgagacccatgagagccgaggacatgctgagagagatcagagaggagctggccagccagagaatcgagggcgccgaggagcccagagacagcagacccagaaagctgaccagagcccagctgcagagaatgagaggcccccacatcatccagctggacacccccctgagcgccagcgaggtgtag

SEQ ID NO: 56184 - DNA, 2277 bp, Artificial Sequence
  derived and/or modified sequence
atgggctgcagactgcacgcccccggcgagaaggccgcccacgaccccagcagaagaagactgcagcagtacgtgcccttcgccagaggcagcggccaggccagaggcctgagccccatgagactgagagaccccgagcccgagaagagacacggcggccacgtgggcgccggcctgctgcacagccccaagctgaaggagctgaccaaggcccacgagctggaggtgagactgcacaccttcagcatgttcggcatgcccagactgccccccgaggacagaagacactgggagatcggcgagggcggcgacagcggcctgaccatcgagaagagctggagagagctggtgcccggccacaaggagatgagccaggagctgtgccaccagcaggaggccctgtgggagctgctgaccaccgagctgatctacgtgagaaagctgaagatcatgaccgacctgctggccgccggcctgctgaacctgcagagagtgggcctgctgatggaggtgagcgccgagaccctgttcggcaacgtgcccagcctgatcagaacccacagaagcttctgggacgaggtgctgggccccaccctggaggagaccagagccagcggccagcccctggaccccatcggcctgcagagcggcttcctgaccttcggccagagattccacccctacgtgcagtactgcctgagagtgaagcagaccatggcctacgccagagagcagcaggagaccaaccccctgttccacgccttcgtgcagtggtgcgagaagcacaagagaagcggcagacagatgctgtgcgacctgctgatcaagccccaccagagaatcaccaagtaccccctgctgctgcacgccgtgctgaagagaagccccgaggccagagcccaggaggccctgaacgccatgatcgaggccgtggagagcttcctgagacacatcaacggccaggtgagacagggcgaggagcaggagagcctggccgccgccgcccagagaatcggcccctacgaggtgctggagccccccagcgacgaggtggagaagaacctgagacccttcagcaccctggacctgaccagccccatgctgggcgtggccagcgagcacaccagacagctgctgctggagggccccgtgagagtgaaggagggcagagagggcaagctggacgtgtacctgttcctgttcagcgacgtgctgctggtgaccaagccccagagaaaggccgacaaggccaaggtgatcagaccccccctgatgctggagaagctggtgtgccagcccctgagagaccccaacagcttcctgctgatccacctgaccgagttccagtgcgtgagcagcgccctgctggtgcactgccccagccccaccgacagagcccagtggctggagaagacccagcaggcccaggccgccctgcagaagctgaaggccgaggagtacgtgcagcagaagagagagctgctgaccctgtacagagaccaggacagagagagccccagcaccagacccagcacccccagcctggagggcagccagagcagcgccgagggcagaacccccgagttcagcaccatcatcccccacctggtggtgaccgaggacaccgacgaggacgcccccctggtgcccgacgacaccagcgacagcggctacggcaccctgatccccggcacccccaccggcagcagaagccccctgagcagactgagacagagagccctgagaagagaccccagactgaccttcagcaccctggagctgagagacatccccctgagaccccacccccccgacccccaggccccccagagaagaagcgcccccgagctgcccgagggcatcctgaagggcggcagcctgccccaggaggacccccccacctggagcgaggaggaggacggcgccagcgagagaggcaacgtggtggtggagaccctgcacagagccagactgagaggccagctgcccagcagccccacccacgccgacagcgccggcgagagcccctgggagagcagcggcgaggaggaggaggagggccccctgttcctgaaggccggccacaccagcctgagacccatgagagccgaggacatgctgagagagatcagagaggagctggccagccagagaatcgagggcgccgaggagcccagagacagcagacccagaaagctgaccagagcccagctgcagagaatgagaggcccccacatcatccagctggacacccccctgagcgccagcgaggtgtag

SEQ ID NO: 56185 - protein, 231 aa, Artificial Sequence
  derived and/or modified sequence
MRQPAVRLVRLGRVPYAELLGLQDRWLRRLQAEPGIEAPSGTEAGALLLCEPAGPVYTAGLRGGLTPEETARLRALGAEVRVTGRGGLATFHGPGQLLCHPVLDLRRLGLRLRMHVASLEACAVRLCELQGLQDARARPPPYTGVWLDDRKICAIGVRCGRHITSHGLALNCSTDLTWFEHIVPCGLVGTGVTSLSKELQRHVTVEEVMPPFLVAFKEIYKCTLISEDSPN

SEQ ID NO: 56186 - DNA, 696 bp, Artificial Sequence
  derived and/or modified sequence
atgagacagcccgccgtgagactggtgagactgggcagagtgccctacgccgagctgctgggcctgcaggacagatggctgagaagactgcaggccgagcccggcatcgaggcccccagcggcaccgaggccggcgccctgctgctgtgcgagcccgccggccccgtgtacaccgccggcctgagaggcggcctgacccccgaggagaccgccagactgagagccctgggcgccgaggtgagagtgaccggcagaggcggcctggccaccttccacggccccggccagctgctgtgccaccccgtgctggacctgagaagactgggcctgagactgagaatgcacgtggccagcctggaggcctgcgccgtgagactgtgcgagctgcagggcctgcaggacgccagagccagaccccccccctacaccggcgtgtggctggacgacagaaagatctgcgccatcggcgtgagatgcggcagacacatcaccagccacggcctggccctgaactgcagcaccgacctgacctggttcgagcacatcgtgccctgcggcctggtgggcaccggcgtgaccagcctgagcaaggagctgcagagacacgtgaccgtggaggaggtgatgccccccttcctggtggccttcaaggagatctacaagtgcaccctgatcagcgaggacagccccaactag

SEQ ID NO: 56187 - DNA, 696 bp, Artificial Sequence
  derived and/or modified sequence
atgagacagcccgcggtgagactggtgaggcttgggagggttccatatgccgagctcctgggactgcaagaccggtggctgcggaggttacaggcggagcctgggattgaagctccatctggaacggaagccggagctttacttctgtgcgaaccagccggccctgtttacaccgcaggcttgaggggtggcctgacaccggaggagactgcccgtcttagagcacttggggccgaagtgagagttaccggacgtggcggcctcgccacatttcacggtcctggccaactgctgtgccatcccgtcctggacctgcgaaggttagggctgcggctccgtatgcatgtcgcaagtctggaagcttgcgcagtgagactgtgtgaactgcagggcctgcaggacgctagggcccgaccacctccatacaccggcgtttggctggacgaccgcaagatctgcgctataggagtgcgctgcggcagacatataaccagccatggacttgcactgaactgcagcaccgatctgacttggttcgagcacatagtaccatgcggcttggtcggcaccggggtcacatctctatccaaagaacttcagaggcacgtaactgttgaggaggtgatgccacccttcctggtcgcattcaaggagatttacaaatgtactctgatttccgaggacagtcctaattag

SEQ ID NO: 56188 - DNA, 696 bp, Artificial Sequence
  derived and/or modified sequence
atgaggcagcctgctgtgcggctggtgcggctgggccgggtgccctatgcagagctgctgggcctgcaggaccgctggctgcggcggctgcaggccgagcccggcatcgaggcccccagcggcacagaggccggggccctgctgctgtgtgagcctgctggccctgtgtacacagctggcctgcggggcggcctgaccccagaggagacagcccggctgcgggccctgggcgctgaggtgcgggtgacaggccggggcggcctggccaccttccacggccctggccagctgctgtgccaccctgtgctggacctgcggcggctgggcctgcggctgaggatgcacgtggccagcctggaggcctgtgctgtgcggctgtgtgagctgcagggcctgcaggatgcccgggcccggcccccaccctacacaggagtgtggctggatgacaggaagatctgtgccatcggcgtgcgctgtggccgccacatcaccagccacggcctggccctgaactgcagcacagacctgacctggtttgagcacatcgtgccctgtggcctggtgggcaccggggtgaccagcctgagcaaggagctgcagagacatgtgacagtggaggaggtgatgccacccttcctggtggccttcaaggagatctacaagtgcaccctcatcagcgaggacagccccaactag

SEQ ID NO: 56189 - DNA, 1018 bp, Artificial Sequence
  derived and/or modified sequence
cggggccccgcggacgcaacggtgggcacgatgcggcaacccgccgttcggttggtgcgcctgggtcgggtgccgtacgccgagctactggggctgcaggaccgctggctgcggcggctgcaggccgagccaggcattgaggccccgtcggggactgaggcgggcgcgctcctgctctgcgagcccgcggggcccgtgtatacggccgggctgcgcggcggcctgacgcccgaggaaactgcgcggctacgggccttgggcgccgaggtgcgcgtcacaggccgcggtggcctggccaccttccacggcccgggccagctgctttgccacccggtactcgacctgcggcgtctcggcctgcgcttgcgcatgcacgtagcgtcgctggaggcgtgcgccgtgcgcctgtgcgagctccagggcctgcaggacgcccgcgcgcggcccccgccctacactggcgtctggctagacgatcgcaagatctgcgcgatcggagtccgctgtggaaggcacatcacatcccacggcctggctctcaactgctctaccgacctcacgtggtttgagcacatcgtgccctgtggactggttgggacaggcgtcacttccttgagtaaggagctccagaggcacgtcaccgtggaagaagtaatgccacctttccttgtggcctttaaggagatctacaagtgcacactgatctcagaggacagccccaactgaagagtactcataacagccaggatgctcctgccttgggaagcatgaagtctgacttgagtcacctactgaaacccagattttagacctggcctgtcattcactgatcatgaaactaaggacataccatgagctctgagccactattttcatatgtatcctgttttatttatatcttccccacctacctcagagatactagatgtgacaatactgtgaaaagcaacacatgctatataaaacattagcactgctattgacagcagtgtctcagagaaattcagatgtcatagat

SEQ ID NO: 56190 - DNA, 696 bp, Artificial Sequence
  derived and/or modified sequence
atgcggcagcccgccgtgcggctggtgcggctgggccgggtgccctacgctgaactgctcggtcttcaggaccggtggctgaggagactacaggctgaacctggcattgaggctccatctggaaccgaagctggcgccttgttgttgtgtgagcctgcaggccccgtgtacacagctggtttaaggggaggcctgacccctgaagagaccgcgcgccttcgcgctctaggcgctgaagtccgcgttacaggacgagggggccttgccacctttcacgggcccggacaactgctctgccatcccgttttagatcttcgaagactcggtctgcgcttacggatgcatgtcgcttcccttgaggcctgtgccgtaagactctgtgagctccaaggtctgcaagacgccagggcccgcccaccaccctataccggagtgtggctggacgatcgcaagatatgtgcaatcggcgtgagatgcgggcggcacattactagccacgggctcgccctgaattgcagcaccgatctgacttggttcgaacacatcgtgccatgcggtcttgtggggaccggcgtaacatcactgagcaaggaacttcaacgccacgtgacagtagaagaggtcatgccaccctttctggttgctttcaaggagatctataaatgtactttgatctccgaggactctccaaattag

SEQ ID NO: 56191 - DNA, 696 bp, Artificial Sequence
  derived and/or modified sequence
atgagacaaccggctgttcggctggtgagactaggacgggttccatacgccgaactgctcgggttgcaggacaggtggttgagaaggctgcaggctgagccaggtatcgaagctccttcgggcactgaagcgggagcgctcctgctctgtgaaccagctggacctgtatacaccgcaggactaagaggtggactgaccccagaggaaacagccaggctacgtgccctcggcgctgaggttcgtgtgacgggaaggggcggactggctactttccacggacccggtcagcttctgtgtcacccggtcctggatttgagacgtctcggcctgcgacttcggatgcatgtggcatctctcgaggcctgtgctgtacggctctgtgagttacaaggactccaggatgccagggccaggccaccaccatacactggggtttggctggacgataggaagatctgcgccattggagtgcggtgcggtaggcacattacatctcacgggctggcacttaactgcagcaccgatttgacgtggttcgagcacattgtgccctgcggtctggtggggactggagtgacaagcctctcaaaagaactacagcgccatgtgactgtggaggaggtcatgcccccttttctggtagctttcaaggagatttacaagtgcactttgataagtgaggacagtcctaactag

SEQ ID NO: 56192 - protein, 308 aa, Artificial Sequence
  derived and/or modified sequence
MAVPWEEYFRLALQEKLSTKLPEQAEDHVPPVLRLLEKRQELVDADQALQAQKEVFRTKTAALKQRWEQLEQKERELKGSFIRFDKFLQDSEARRNRALRRAAEERHQAGRREVEALRLWTQLQELRREHARLQRRLKRLEPCARLLEQALELLPGFQEVPELVARFDGLAETQAALRLREREQLAELEAARARLQQLRDAWPDEVLAQGQRRAQLQERLEAARERTLQWESKWIQIQNTAAEKTLLLGRSRMAVLNLFQLVCQHQGQPPTLDIEDTEGQLEHVKLFMQDLSAMLAGLGQAEPAAPAS

SEQ ID NO: 56193 - DNA, 927 bp, Artificial Sequence
  derived and/or modified sequence
atggccgtgccctgggaggagtacttcagactggccctgcaggagaagctgagcaccaagctgcccgagcaggccgaggaccacgtgccccccgtgctgagactgctggagaagagacaggagctggtggacgccgaccaggccctgcaggcccagaaggaggtgttcagaaccaagaccgccgccctgaagcagagatgggagcagctggagcagaaggagagagagctgaagggcagcttcatcagattcgacaagttcctgcaggacagcgaggccagaagaaacagagccctgagaagagccgccgaggagagacaccaggccggcagaagagaggtggaggccctgagactgtggacccagctgcaggagctgagaagagagcacgccagactgcagagaagactgaagagactggagccctgcgccagactgctggagcaggccctggagctgctgcccggcttccaggaggtgcccgagctggtggccagattcgacggcctggccgagacccaggccgccctgagactgagagagagagagcagctggccgagctggaggccgccagagccagactgcagcagctgagagacgcctggcccgacgaggtgctggcccagggccagagaagagcccagctgcaggagagactggaggccgccagagagagaaccctgcagtgggagagcaagtggatccagatccagaacaccgccgccgagaagaccctgctgctgggcagaagcagaatggccgtgctgaacctgttccagctggtgtgccagcaccagggccagccccccaccctggacatcgaggacaccgagggccagctggagcacgtgaagctgttcatgcaggacctgagcgccatgctggccggcctgggccaggccgagcccgccgcccccgccagctag

SEQ ID NO: 56194 - DNA, 1514 bp, Artificial Sequence
  derived and/or modified sequence
atggcggtgccctgggaggaatatttccgactggctttgcaagagaaactgtctacaaagctgccagagcaggctgaggatcatgtcccaccagtactgcgtctcctggagaagaggcaagagctggtagatgcagaccaggccctgcaggcccagaaggaggtgttccgcaccaagacggcagccctgaaacagcgttgggaacagctggaacaaaaggagcgggagctaaagggatcgttcatccgctttgacaagtttttgcaggactccgaggcccggcgcaatcgcgcgctgcggagggcggcggaggagaggcaccaggcgggccgtcgggaggtggaggcgctgcgtctgtggacccagctccaggagctacggcgggaacacgcgcggctgcagcgccggcttaagcgcctggagccctgcgcgcgcctgctggagcaagcgctggagctgctgcccgggttccaagaggttccggagctggtggcgcgcttcgacggcctggccgagacgcaggcggcgctgaggctcagggagcgcgagcagctcgcggagctggaggcggcgcgagcgcggctgcagcagctgcgggacgcctggccggacgaggtgctcgcacagggccagcggcgggcacagctgcaggagcgcctggaggctgccagggagcgtacgctgcagtgggaatccaagtggattcagattcagaacacagcagcggagaagactctgctcctgggacgcagcaggatggctgtgctcaacctgttccagctagtgtgccagcatcaggggcagcctcccaccctggacatcgaggacacggagggacagctagagcacgtgaagctgttcatgcaggacctctctgccatgctggccggcctgggtcaggctgagcctgcagcccctgcctcctagccctgacacaggctgacgcagctgctgcccttctgtggccatacagtgctccttttcacagatgatggctcctgcagggagtgcccccagtgcccagcacagggccaggcacacagtggtgcacgggaacgtctgctgatgcccaccctaaggccaatcaaggagccacggggctgggtcctggtcctcacatcctcttccgcatcttgcccttcttggagcgggcaccccggccgaaggcgccctgctgcagctcctggacgcggcggcggttgcgggcagagagctgcttgaggccaccacgctgcaggaagtgcagcttctgggcccggcgccgctgcttcaggatctgctgcttggtcttgagttccgggcggactcggcctgcaggggtgcctggggcgtggggccgggatgcacctgctgggacagggattcagggagctcagctgttgggatcactcccaagatcccctcctcccagaagcttgcagactcctcccctgcccctactcctgttctgtgcttattgctgtggcccagtgtctgtacacagtaggtggctaataaagttttaggcagcctca

SEQ ID NO: 56195 - DNA, 927 bp, Artificial Sequence
  derived and/or modified sequence
atggctgtgccttgggaggaatacttcagactggcgctgcaggaaaaactgagcactaaactccctgagcaggctgaagatcacgtgccgccagtactccggctcctggaaaaacggcaggagttagtggatgccgaccaggctcttcaggctcagaaggaggtctttcgcactaagacagcagctctgaagcagcggtgggagcagctagagcaaaaagagagggagctcaagggatcgttcatccgctttgacaaattcttgcaagatagcgaagctaggagaaaccgcgcattgaggcgggcagccgaggagagacaccaggcaggcagaagggaggtcgaggctttgagactgtggacacagttacaggaacttagaagagagcacgcccggttgcagcgccgtcttaagagactcgagccttgtgctaggctgctcgaacaagccctggaactgctgcctggcttccaagaggtgcccgagctcgtggccagatttgatgggttggctgagactcaagctgcacttcgcctgcgtgagcgcgagcagcttgccgaactggaggcagctcgggctcgcctccagcagcttcgggatgcatggcccgacgaggtgctggcacagggccagagacgggctcagcttcaggaaagattagaggcggcgagggagcgaaccctgcagtgggagagcaagtggatccaaatccagaatacggcggcggagaagacgctcctgctcggccggagtagaatggcagtcctaaacctgttccagctggtatgccagcatcaaggacagcccccgacactggacatcgaagataccgaaggccagctggagcatgttaagctgtttatgcaggacctgtcagccatgctggccgggctaggtcaggccgaaccagccgcccctgcaagctag

SEQ ID NO: 56196 - DNA, 927 bp, Artificial Sequence
  derived and/or modified sequence
atggctgtgccctgggaggagtacttccggctggccctgcaggagaagctgagcaccaagctgcctgagcaggccgaggaccacgtgccccctgtgctgcggctgctggagaagaggcaggagctggtggatgctgaccaggccctgcaggcccagaaggaggtgttccgcaccaagacagctgccctgaagcagcgctgggagcagctggagcagaaggagcgggagctgaagggcagcttcatccgctttgacaagttcctgcaggacagcgaggcccggaggaacagagccctgcggcgggctgctgaggagcggcaccaggccggcagaagagaggtggaggccctgcggctgtggacccagctgcaggagctgcggcgggagcacgcccggctgcagaggcggctgaagaggctggagccctgtgcccggctgctggagcaggccctggagctgctgcccggcttccaggaggtgcctgagctggtggccaggtttgatggcctggccgagacccaggccgccctgcggctgcgggagcgggagcagctggccgagctggaggccgcccgggcccggctgcagcagctgagagatgcctggccagatgaggtgctggcccagggccagaggcgggcccagctgcaggagcggctggaggccgcccgggagaggaccctgcagtgggagagcaagtggatccagatccagaacacagctgctgagaagaccctgctgctgggccgcagcaggatggctgtgctgaacctcttccagctggtgtgccagcaccagggccagccccccaccctggacatcgaggacacagagggccagctggagcacgtgaagctgttcatgcaggacctgagcgccatgctggccggcctgggccaggccgagcctgctgccccagccagctag

SEQ ID NO: 56197 - DNA, 927 bp, Artificial Sequence
  derived and/or modified sequence
atggccgtgccctgggaggagtacttccggctggccctgcaggagaaactgagtactaaattgcctgagcaggcagaggatcacgtcccccctgtgttacgactgctggagaagcggcaggagctggtggatgcggatcaggctttgcaggcccagaaagaagttttcaggactaagaccgcagctctgaagcagcgctgggagcaactcgagcagaaggagagggaacttaaaggatcatttatcaggttcgataagttcctgcaggattccgaagcacggcgaaatagagcccttcgccgtgccgccgaagaaaggcatcaagctggaagaagggaggtcgaagctcttagactatggacccagctgcaggagcttaggcgcgagcacgccaggctgcagcgacggctcaaacgccttgaaccatgcgctagactcttggagcaggccctcgagctgttgccgggtttccaagaggtgccagaactggtggcaagatttgatgggcttgccgaaacccaggcggcactgaggctcagggagagggaacaacttgctgagctcgaagctgcacgcgcgaggcttcagcagctccgggacgcatggcctgacgaggtactggcccaggggcagcgacgagctcagctgcaggaaagattggaggctgctcgagagcggaccttacagtgggagtccaagtggatccaaatccagaacacggctgccgagaaaactctccttttagggaggtctcgcatggcggtcctcaacctgttccaactggtttgccagcaccagggccagccacctacactggacatcgaagacaccgaaggccagctggagcacgtgaaactctttatgcaggatttgtccgccatgctcgctgggctgggccaagcagagcctgccgctccagcctcctag

SEQ ID NO: 56198 - DNA, 927 bp, Artificial Sequence
  derived and/or modified sequence
atggccgtgccatgggaggagtacttcaggctggctctgcaagaaaagttgtccacgaagctgccggaacaggcagaggatcacgtgcctccagtactccgactgcttgaaaagcgtcaggagcttgtagatgccgatcaggcccttcaggcccagaaagaggtgtttaggaccaaaacagctgccttaaagcagaggtgggagcagttggagcagaaagagagggaattaaaggggtctttcattcggttcgacaagttccttcaggacagcgaggctagaagaaaccgggctctgcggagggctgccgaagagcggcaccaggcaggccgaagagaggtggaggccctccgcctatggacgcagctccaggagctcaggcgggaacatgctcgtcttcaaaggaggctcaagcggttggagccatgtgcacgcctcctggaacaagccctggaactcttgccagggttccaggaggtgccggagcttgtggctcgcttcgatggactggccgaaactcaggccgctttgcggctgcgtgagagggaacagttggctgagctggaggccgctcgcgctcgactgcaacagctcagggatgcttggcctgacgaggtgttggcccagggacagcgtcgagcccaactgcaggaaaggctggaggccgctcgtgagagaacacttcaatgggagagcaaatggatacagatacagaacacagctgccgagaagacacttttactcggaagaagtcgcatggctgtgttgaatctgttccagctggtgtgtcagcaccaggggcagccacctacgcttgatatcgaagacacagaaggacaactggagcatgtgaagctttttatgcaggacctcagcgctatgttagccggactgggtcaggccgaacctgctgccccagccagctag

SEQ ID NO: 56199 - protein, 330 aa, Artificial Sequence
  derived and/or modified sequence
MDPLETPIKDGILYQQHVKFGKKCWRKVWALLYAGGPSGVARLESWEVRDGGLGAAGDRSAGPGRRGERRVIRLADCVSVLPADGESCPRDTGAFLLTTTERSHLLAAQHRQAWMGPICQLAFPGTGEASSGSTDAQSPKRGLVPMEENSIYSSWQEVGEFPVVVQRTEAATRCQLKGPALLVLGPDAIQLREAKGTQALYSWPYHFLRKFGSDKILLGTPGVSLLICKGERTDDVSGIILDESLLRAYSVPGAGGHSRVQDSLGPVLREPTFQGERSFLKTSMLRSLLCSCSWRHPRSQPRTQASCLQGSDCPAPHRNSTSAAHTLGTS

SEQ ID NO: 56200 - protein, 13 aa, Artificial Sequence
  derived and/or modified sequence
MDPLETPIKDGIL

SEQ ID NO: 56201 - DNA, 993 bp, Artificial Sequence
  derived and/or modified sequence
atggatccattagaaacccctattaaagacggcatcctttatcagcaacacgttaaattcggcaagaaatgctggagaaaggtgtgggccttgctctacgcaggggggccttccggggttgcaaggttagaaagctgggaggtgagggatgggggtttgggggccgctggagatcgctcagctggacccggaagacgaggagagcggcgcgtcatacgactggcagactgtgtctctgtgctgccagctgacggggagagctgccctagagatactggggcattcctccttactacgacagaacgatcccacctccttgccgcccagcacaggcaggcctggatgggccccatttgccagctggcctttccaggcacaggagaggcttccagtgggtccacagatgcccagagcccaaagagaggacttgtacctatggaagagaactctatctattcttcctggcaggaggtgggagaattccctgttgtcgtgcagagaactgaggctgccacaagatgtcagctcaaaggacctgccctcctggtgctgggccctgatgcaattcagctccgtgaggcaaaggggactcaggctctctacagctggccgtaccatttcctgcgtaaatttgggtctgataagatcttgctcggtaccccaggtgtaagcttacttatttgtaaaggagagcgtaccgatgacgtgtcaggcataatcctcgacgaatcgctgctacgagcgtactccgtgccaggggccggcggacattccagggtgcaagattcattaggcccagtgctccgggaacctacattccagggtgagaggtcctttctgaagactagcatgctgcgatccctactctgttcttgttcatggcgccaccctcgatcccaaccaagaacacaagcgtcctgcctgcaagggtccgactgtccagcacctcatagaaattctacatctgcagcccacaccctgggaacctcttag

SEQ ID NO: 56202 - DNA, 435 bp, Artificial Sequence
  derived and/or modified sequence
atggatcccctggaaacacctatcaaagatggcatcctttaccagcaacacgtcaagtttgggaagaaatgctggcgtaaggtgtgggctctgctgtatgcaggggggccaagtggggtcgcgcggctggaaagctgggaggtacgggatggggggcttggtgctgccggagaccgcagcgctgggcccggaaggaggggtgaacggcgggttatcaggttggcagattgtgtgtccgtcctgcctgctgatggggagtcttgtccacgtgatactggtgcattcctcctaacaacaactgaaaggtcgcacctcctcgcagcccagcaccgccaggcctggatgggtccaatctgccagcttgcctttcccgggaccggagaggcatcaagtggttccaccgacgcgcagagcccaaagcgagggctggtctag

SEQ ID NO: 56203 - DNA, 471 bp, Artificial Sequence
  derived and/or modified sequence
atggaccctctcgaaacgccgattaaggacggcatcttgtatcaacagcatgttaaatttggcaaaaagtgttggcgcaaggtctgggctctgttgtacgcgggggggccgagcggagttgctcgccttgagtcctgggaagtgcgagacggcgggcttggtgccgccggcgatcgcagcgccggtcccggcagaagaggtgaacggcgagtcatacgccttgcagattgcgtctccgtgctccccgcagacggggaatcttgtcctcgtgataccggtgcattcctgctgaccacaaccgaacggtcgcacttgctggcggcacagcataggcaggcctggatggggcctatctgtcagctcgcgtttccaggtacaggtgaggcctctagtggatccaccgacgcccagtcccccaaacgcggcctcgtcccaatggaggagaatagtatttactcatcctggcagtag

SEQ ID NO: 56204 - DNA, 132 bp, Artificial Sequence
  derived and/or modified sequence
atggatccactagaaacccctatcaaggatggcatcctttatcagcagcacgtgaagtttggcaaaaagtgctggcgaaaagtgtgggcgttgctgtacgcaggaggcccctccggagtggcacggttgtag

SEQ ID NO: 56205 - DNA, 642 bp, Artificial Sequence
  derived and/or modified sequence
atggaccctctggagacccccattaaagatggaatcctttaccagcaacacgttaagttcgggaagaaatgttggagaaaagtgtgggccttactgtacgcgggtggccctagcggcgtcgcccgcctggaatcctgggaggtgcgggatggtggcctgggcgccgccggagatcggagcgcagggcccgggaggcgaggcgagaggcgcgtgattaggctcgcagattgtgtttcagtgctgccggcagatggggagtcatgccctagggatacaggagcctttctccttacaactacagagagatctcatttactggccgcccagcaccggcaggcttggatggggccgatctgccagctcgcattcccaggaaccggcgaggcttcgtccgggtccacagacgcccagtctcccaaaagaggcttagtgcccatggaagaaaattccatatacagctcctggcaagaagtgggtgaatttcctgttgtggtgcagcgaactgaggctgcaaccaggtgccagcttaaaggccctgcccttctcgtcctgggtccagacgctattcagttgcgagaggccaagggtacccaggccctgtattcatggccataccatttcctcagaaaattcgggtcgtag

SEQ ID NO: 56206 - DNA, 258 bp, Artificial Sequence
  derived and/or modified sequence
atggacccgcttgaaacacctattaaagatgggattttgtatcagcagcatgtcaagttcggcaagaagtgctggagaaaggtctgggctctattgtatgccggtggtccctcaggagtcgcccggctagagtcctgggaggttcgcgatggcggcttaggggccgcgggcgatcggagcgcaggcccaggccgccggggcgagagacgagtgatacgcctggctgattgtgtgagcgttctgcccgccgacggctag

SEQ ID NO: 56207 - DNA, 993 bp, Artificial Sequence
  derived and/or modified sequence
atggaccccctggagacccccatcaaggatggcatcctgtaccagcagcacgtgaagtttgggaagaagtgctggaggaaggtgtgggccctgctgtatgctgggggccccagcggcgtggcccggctggagagctgggaggtgagagatggcggcctgggcgccgccggggacagatctgctggccctggaagaagaggagagaggagggtcatccggctggccgactgtgtgtctgtgctgcctgcagatggagagagctgcccccgggacaccggggccttcctgctgaccaccacagagaggagccacctgctggccgcccagcaccggcaggcctggatgggccccatctgccagctggccttccctggcaccggggaggccagcagcggcagcacagatgcccagagccccaagaggggcctggtgcccatggaggagaacagcatctacagctcctggcaggaggtgggggagttccctgtggtggtgcagaggacagaggccgccacccgctgccagctgaagggccctgccctgctggtgctgggcccagatgccatccagctgcgggaggccaagggcacccaggccctgtacagctggccctaccacttcctgaggaagtttggaagtgacaagatcctgctgggcaccccaggagtgtccctgctgatctgcaagggggagaggacagatgatgtgtctggcatcatcctggatgagagcctgctgcgggcctacagcgtgcctggggccggcggccacagccgggtgcaggacagcctgggccctgtgctgcgggagcccaccttccagggcgagaggagcttcctgaagacctccatgctgcggagcctgctgtgcagctgctcctggaggcaccccaggagccagcccaggacccaggccagctgcctgcagggcagtgactgcccagccccccacaggaacagcaccagcgctgcccacaccctgggcaccagctag

SEQ ID NO: 56208 - DNA, 435 bp, Artificial Sequence
  derived and/or modified sequence
atggaccccctggagacccccatcaaggatggcatcctgtaccagcagcacgtgaagtttgggaagaagtgctggaggaaggtgtgggccctgctgtatgctgggggccccagcggcgtggcccggctggagagctgggaggtgagagatggcggcctgggcgccgccggggacagatctgctggccctggaagaagaggagagaggagggtcatccggctggccgactgtgtgtctgtgctgcctgcagatggagagagctgcccccgggacaccggggccttcctgctgaccaccacagagaggagccacctgctggccgcccagcaccggcaggcctggatgggccccatctgccagctggccttccctggcaccggggaggccagcagcggcagcacagatgcccagagccccaagaggggcctggtgtag

SEQ ID NO: 56209 - DNA, 471 bp, Artificial Sequence
  derived and/or modified sequence
atggaccccctggagacccccatcaaggatggcatcctgtaccagcagcacgtgaagtttgggaagaagtgctggaggaaggtgtgggccctgctgtatgctgggggccccagcggcgtggcccggctggagagctgggaggtgagagatggcggcctgggcgccgccggggacagatctgctggccctggaagaagaggagagaggagggtcatccggctggccgactgtgtgtctgtgctgcctgcagatggagagagctgcccccgggacaccggggccttcctgctgaccaccacagagaggagccacctgctggccgcccagcaccggcaggcctggatgggccccatctgccagctggccttccctggcaccggggaggccagcagcggcagcacagatgcccagagccccaagaggggcctggtgcccatggaggagaacagcatctacagctcctggcagtag

SEQ ID NO: 56210 - DNA, 132 bp, Artificial Sequence
  derived and/or modified sequence
atggaccccctggagacccccatcaaggatggcatcctgtaccagcagcacgtgaagtttgggaagaagtgctggaggaaggtgtgggccctgctgtatgctgggggccccagcggcgtggcccggctgtag

SEQ ID NO: 56211 - DNA, 642 bp, Artificial Sequence
  derived and/or modified sequence
atggaccccctggagacccccatcaaggatggcatcctgtaccagcagcacgtgaagtttgggaagaagtgctggaggaaggtgtgggccctgctgtatgctgggggccccagcggcgtggcccggctggagagctgggaggtgagagatggcggcctgggcgccgccggggacagatctgctggccctggaagaagaggagagaggagggtcatccggctggccgactgtgtgtctgtgctgcctgcagatggagagagctgcccccgggacaccggggccttcctgctgaccaccacagagaggagccacctgctggccgcccagcaccggcaggcctggatgggccccatctgccagctggccttccctggcaccggggaggccagcagcggcagcacagatgcccagagccccaagaggggcctggtgcccatggaggagaacagcatctacagctcctggcaggaggtgggggagttccctgtggtggtgcagaggacagaggccgccacccgctgccagctgaagggccctgccctgctggtgctgggcccagatgccatccagctgcgggaggccaagggcacccaggccctgtacagctggccctaccacttcctgaggaagtttggcagctag

SEQ ID NO: 56212 - DNA, 258 bp, Artificial Sequence
  derived and/or modified sequence
atggaccccctggagacccccatcaaggatggcatcctgtaccagcagcacgtgaagtttgggaagaagtgctggaggaaggtgtgggccctgctgtatgctgggggccccagcggcgtggcccggctggagagctgggaggtgagagatggcggcctgggcgccgccggggacagatctgctggccctggaagaagaggagagaggagggtcatccggctggccgactgtgtgtctgtgctgcctgcagatggatag

SEQ ID NO: 56213 - DNA, 993 bp, Artificial Sequence
  derived and/or modified sequence
atggaccccctggagacccccatcaaggacggcatcctgtaccagcagcacgtgaaattcggcaaaaaatgttggcgcaaggtatgggccctgctctacgcaggcggtccctctggggttgctaggctcgaaagctgggaggtgcgcgatggcggactcggcgccgcaggggatcgctccgccggcccaggaaggcgcggcgagaggcgagtgatccggctggcggattgtgttagtgtgcttcccgcagacggggaatcttgcccgcgtgacacaggtgctttcctgctgaccacaaccgagcgctctcacctcttggctgctcagcatcgacaagcctggatgggaccgatctgccagctcgcatttccagggactggcgaggcctctagcggttcaaccgacgcccagagccctaagaggggcctagtccccatggaggaaaatagcatatactcctcatggcaggaagtgggggagttcccagtggttgtgcaaaggacagaggctgccactcggtgtcagctgaaggggcccgccttgcttgtcctagggccagatgcaatccaactccgcgaggccaaaggcacacaagcactttacagttggccctaccacttcctgcgcaagtttggtagtgacaaaatattattgggtactcccggcgtatccttactgatctgtaagggggagaggacagacgatgtgtctgggatcatactggacgaatcactgctgcgggcatattccgtgcccggtgccggcggacatagcagggtgcaggattctttaggtcctgtccttagggaaccaaccttccagggagaacggagtttccttaagacgagtatgcttagatccctgttatgttcatgctcatggagacaccctaggagccagccccggacacaggcctcttgcctgcagggctcagattgtcctgcaccacaccggaactcgactagtgccgcccacactctggggaccagttag

SEQ ID NO: 56214 - DNA, 435 bp, Artificial Sequence
  derived and/or modified sequence
atggaccccctggagacccccatcaaggacggcatcctgtaccagcagcatgtgaagtttggaaagaagtgctggaggaaagtgtgggccttgttgtacgcaggaggcccttccggggtggctagacttgagtcctgggaggtgagagacggaggactcggggctgccggggacagatcagccgggcccggtcggcggggtgaacgaagggtaatcagactggccgattgtgtttctgtgctcccggcagatggggagtcttgcccacgagacacaggcgcatttttactgaccaccacggaacgctctcatcttttggctgctcaacatcgtcaggcatggatgggccccatttgccagctggcatttcccggcaccggggaggcctcgagtggttctacggacgcgcaaagtccgaagaggggtctggtgtag

SEQ ID NO: 56215 - DNA, 471 bp, Artificial Sequence
  derived and/or modified sequence
atggaccccctggagacccccatcaaggacggcatcctgtaccagcagcatgtcaagtttggaaagaaatgctggcgaaaggtgtgggccttgctttatgccggaggtccgtcaggggtggcgcgcctagaaagttgggaagtaagggacgggggtttaggagccgctggcgataggtcagctggacccggtcgccgaggagagcgtagagtgattagattggccgattgtgtctccgtgctccctgccgatggtgaatcatgtcccagagataccggcgctttcctactgactaccactgagaggagtcaccttctggcagcccagcatcgccaagcatggatgggtcccatatgccaactggcatttcccggcacaggagaggcgtcctcagggagcacagacgcccagtctcccaaacgaggactggttcctatggaggaaaattcgatatactcctcttggcagtag

SEQ ID NO: 56216 - DNA, 132 bp, Artificial Sequence
  derived and/or modified sequence
atggaccccctggagacccccatcaaggacggcatcctgtaccagcaacacgtgaagttcgggaaaaaatgctggcgcaaggtgtgggccctcctgtatgccggtggaccgtccggagtagctcgcctttag

SEQ ID NO: 56217 - DNA, 642 bp, Artificial Sequence
  derived and/or modified sequence
atggaccccctggagacccccatcaaggacggcatcctgtaccagcaacatgtcaagtttggaaagaagtgctggaggaaggtgtgggcacttctatatgctggtggtccttcaggtgtggcacgcttggaaagctgggaagtacgggacgggggtctgggagctgcaggggatcgatcagccggccctggccgccggggcgagcgtagagttatccgcttagccgactgcgtgtccgttctgcccgccgacggagagtcgtgtccccgggataccggagccttcctgctcactactacagagagaagccacctcctagccgcccagcatcggcaggcatggatggggccaatttgccagctggctttccctgggaccggagaggcatctagcggttctacggatgctcagagcccaaagcgggggctcgttcctatggaagaaaatagtatctattcatcttggcaggaagtgggagagtttccagtggttgtccagcggacagaggcggctaccaggtgtcagctcaagggacctgctctgctggtgctaggcccagacgccattcaattacgggaggcgaagggaacacaggccctgtacagctggccataccatttcctccgtaagttcggctcatag

SEQ ID NO: 56218 - DNA, 258 bp, Artificial Sequence
  derived and/or modified sequence
atggaccccctggagacccccatcaaggacggcatcctgtaccagcagcacgtgaagtttggcaaaaagtgttggcggaaggtatgggccctgctatatgcggggggcccatccggtgtggctagactggaatcgtgggaggtgcgagacggagggctgggggcagctggggatcggtccgcaggccctggcagacggggggagcggagagtgatcaggctcgctgactgtgtcagtgtcttgccggcggacggctag

SEQ ID NO: 56219 - DNA, 993 bp, Artificial Sequence
  derived and/or modified sequence
atggaccccctggagactccaatcaaggatgggatactctaccagcagcacgtgaagttcggtaagaaatgctggcggaaagtttgggctttgctgtacgcaggcggaccttcaggcgtggcgagactcgaatcatgggaggtccgggacggcggactcggcgcagccggagatagaagtgcgggacctggacgaaggggcgagagacgcgtcatccgcctggcggattgcgtatccgtgctgcccgctgatggcgagtcttgccccagggatacaggtgccttccttctaaccactaccgagaggtcccacctgctcgcagcccaacatcgacaggcgtggatggggcctatatgccagcttgcatttcctgggacgggtgaggcctcctctggtagtaccgacgctcagtctccaaagagagggttagtccccatggaagaaaatagcatttactcaagctggcaggaagttggcgagttcccagttgtggtgcagagaactgaagctgccacacgctgtcagttaaaaggcccagcgctcctcgtgctgggaccagatgccatccagcttagggaagccaagggcactcaggccctctactcttggccgtaccactttctaagaaagttcgggtccgataagattcttctgggaacccctggtgtgagtctcctgatatgcaaaggtgagaggactgacgacgtatccgggataatcctggacgaaagcttgcttcgagcgtactctgtcccaggggctggcggacactcaagggtgcaagactctctggggccagtgttacgggaacccaccttccaaggggagcgctcgtttctcaaaacttcaatgctcagaagccttctgtgcagttgtagctggcgacatcctcggtctcaaccgagaacgcaagcctcttgcctgcaagggagcgattgtcccgcaccccacagaaactccacaagcgctgcacacacactcggtacgtcttag

SEQ ID NO: 56220 - DNA, 435 bp, Artificial Sequence
  derived and/or modified sequence
atggacccactggagacaccaatcaaggatggaattctgtatcaacagcatgtgaaattcggcaagaagtgctggagaaaagtgtgggccttgttgtatgctggaggtccaagcggtgtcgctaggctcgagtcgtgggaggtgagggacgggggtctgggagcagcgggagatcgcagtgcaggacccggtagacgcggtgagaggcgtgtcattcggctggccgattgtgtctctgtgctgcccgcagacggggagtcatgcccacgggacacaggcgcttttctgctgactaccacagaacgcagccacctcctggccgctcagcacagacaggcatggatggggcctatctgtcagcttgccttcccaggtacaggcgaggcgtcttctggatccactgacgcacaatcaccgaagaggggccttgtttag

SEQ ID NO: 56221 - DNA, 471 bp, Artificial Sequence
  derived and/or modified sequence
atggaccctttggaaactcctatcaaagacggcattctataccagcagcacgttaagtttggaaagaagtgttggcggaaagtctgggcactcctctacgctggaggcccttcgggcgtcgctcgcttagagtcatgggaagttcgtgacggtggactgggtgctgcaggcgaccgaagtgccggtcctggtcggagaggggaacgcagggtcattagattggccgactgtgtatctgtcctcccggctgacggcgagtcctgtccaagggacaccggcgcattccttttaacgacaactgagcgtagtcacctgctggctgcacagcaccgccaggcctggatggggccaatttgccagcttgcattccccggaactggcgaggcctctagtggttccaccgatgctcagtctccgaaaagagggctggttcccatggaggaaaactctatctattctagctggcagtag

SEQ ID NO: 56222 - DNA, 132 bp, Artificial Sequence
  derived and/or modified sequence
atggacccactagagacccccatcaaggacggtatcctttaccaacaacatgtcaagtttggcaaaaaatgctggcgaaaggtgtgggcactgttatatgctggtggcccttctggcgtcgcacgactgtag

SEQ ID NO: 56223 - DNA, 642 bp, Artificial Sequence
  derived and/or modified sequence
atggacccactcgagacaccgattaaagatgggatcctgtaccagcaacacgtgaagttcggcaagaaatgttggcgaaaagtatgggccctcttatacgctggaggaccgtcaggcgtagcacgcctggagagctgggaggtgagggatgggggtctgggggctgcgggtgatagatcagcaggaccaggcagacggggagagaggagggtcatcagacttgcagactgcgtctcggtattgcctgcagatggggaatcctgccctcgggatacaggcgctttcctacttaccactactgaacggagccatctgcttgctgcccagcatcgacaagcctggatgggtccaatctgtcagcttgccttccctggcaccggagaggcctcctccggtagtaccgacgcccaaagtccgaaacgagggctcgtgcctatggaggaaaactccatttacagttcttggcaggaggtaggcgagttcccagtcgtggtccagcgcactgaggccgcaactagatgccaactgaaaggacctgccttactcgtactgggcccagatgcgatccagcttagggaggcaaagggtacacaagcactgtactcttggccctatcactttctgcgcaagtttgggagctag

SEQ ID NO: 56224 - DNA, 258 bp, Artificial Sequence
  derived and/or modified sequence
atggatcctctagagacaccgatcaaagacgggatactgtaccaacaacatgtgaagttcggcaagaagtgttggaggaaggtgtgggcactcctgtatgccggaggtccgtcaggtgtagccaggttagagagttgggaggtgcgggatgggggactgggggctgctggtgatagaagcgctggtcccggacggaggggggaaaggcgagtcatccgactggctgattgtgtgagcgtacttccagccgatgggtag

SEQ ID NO: 56225 - DNA, 993 bp, Artificial Sequence
  derived and/or modified sequence
atggaccccctggagacccccatcaaggacggcatcctgtaccagcagcacgtgaagttcggcaagaagtgctggagaaaggtgtgggccctgctgtacgccggcggccccagcggcgtggccagactggagagctgggaggtgagagacggcggcctgggcgccgccggcgacagaagcgccggccccggcagaagaggcgagagaagagtgatcagactggccgactgcgtgagcgtgctgcccgccgacggcgagagctgccccagagacaccggcgccttcctgctgaccaccaccgagagaagccacctgctggccgcccagcacagacaggcctggatgggccccatctgccagctggccttccccggcaccggcgaggccagcagcggcagcaccgacgcccagagccccaagagaggcctggtgcccatggaggagaacagcatctacagcagctggcaggaggtgggcgagttccccgtggtggtgcagagaaccgaggccgccaccagatgccagctgaagggccccgccctgctggtgctgggccccgacgccatccagctgagagaggccaagggcacccaggccctgtacagctggccctaccacttcctgagaaagttcggcagcgacaagatcctgctgggcacccccggcgtgagcctgctgatctgcaagggcgagagaaccgacgacgtgagcggcatcatcctggacgagagcctgctgagagcctacagcgtgcccggcgccggcggccacagcagagtgcaggacagcctgggccccgtgctgagagagcccaccttccagggcgagagaagcttcctgaagaccagcatgctgagaagcctgctgtgcagctgcagctggagacaccccagaagccagcccagaacccaggccagctgcctgcagggcagcgactgccccgccccccacagaaacagcaccagcgccgcccacaccctgggcaccagctag

SEQ ID NO: 56226 - DNA, 435 bp, Artificial Sequence
  derived and/or modified sequence
atggaccccctggagacccccatcaaggacggcatcctgtaccagcagcacgtgaagttcggcaagaagtgctggagaaaggtgtgggccctgctgtacgccggcggccccagcggcgtggccagactggagagctgggaggtgagagacggcggcctgggcgccgccggcgacagaagcgccggccccggcagaagaggcgagagaagagtgatcagactggccgactgcgtgagcgtgctgcccgccgacggcgagagctgccccagagacaccggcgccttcctgctgaccaccaccgagagaagccacctgctggccgcccagcacagacaggcctggatgggccccatctgccagctggccttccccggcaccggcgaggccagcagcggcagcaccgacgcccagagccccaagagaggcctggtgtag

SEQ ID NO: 56227 - DNA, 471 bp, Artificial Sequence
  derived and/or modified sequence
atggaccccctggagacccccatcaaggacggcatcctgtaccagcagcacgtgaagttcggcaagaagtgctggagaaaggtgtgggccctgctgtacgccggcggccccagcggcgtggccagactggagagctgggaggtgagagacggcggcctgggcgccgccggcgacagaagcgccggccccggcagaagaggcgagagaagagtgatcagactggccgactgcgtgagcgtgctgcccgccgacggcgagagctgccccagagacaccggcgccttcctgctgaccaccaccgagagaagccacctgctggccgcccagcacagacaggcctggatgggccccatctgccagctggccttccccggcaccggcgaggccagcagcggcagcaccgacgcccagagccccaagagaggcctggtgcccatggaggagaacagcatctacagcagctggcagtag

SEQ ID NO: 56228 - DNA, 132 bp, Artificial Sequence
  derived and/or modified sequence
atggaccccctggagacccccatcaaggacggcatcctgtaccagcagcacgtgaagttcggcaagaagtgctggagaaaggtgtgggccctgctgtacgccggcggccccagcggcgtggccagactgtag

SEQ ID NO: 56229 - DNA, 642 bp, Artificial Sequence
  derived and/or modified sequence
atggaccccctggagacccccatcaaggacggcatcctgtaccagcagcacgtgaagttcggcaagaagtgctggagaaaggtgtgggccctgctgtacgccggcggccccagcggcgtggccagactggagagctgggaggtgagagacggcggcctgggcgccgccggcgacagaagcgccggccccggcagaagaggcgagagaagagtgatcagactggccgactgcgtgagcgtgctgcccgccgacggcgagagctgccccagagacaccggcgccttcctgctgaccaccaccgagagaagccacctgctggccgcccagcacagacaggcctggatgggccccatctgccagctggccttccccggcaccggcgaggccagcagcggcagcaccgacgcccagagccccaagagaggcctggtgcccatggaggagaacagcatctacagcagctggcaggaggtgggcgagttccccgtggtggtgcagagaaccgaggccgccaccagatgccagctgaagggccccgccctgctggtgctgggccccgacgccatccagctgagagaggccaagggcacccaggccctgtacagctggccctaccacttcctgagaaagttcggcagctag

SEQ ID NO: 56230 - DNA, 258 bp, Artificial Sequence
  derived and/or modified sequence
atggaccccctggagacccccatcaaggacggcatcctgtaccagcagcacgtgaagttcggcaagaagtgctggagaaaggtgtgggccctgctgtacgccggcggccccagcggcgtggccagactggagagctgggaggtgagagacggcggcctgggcgccgccggcgacagaagcgccggccccggcagaagaggcgagagaagagtgatcagactggccgactgcgtgagcgtgctgcccgccgacggctag

SEQ ID NO: 56231 - DNA, 2292 bp, Artificial Sequence
  derived and/or modified sequence
cccatgtggactggatgcccagcgtgagtgtataccgtgagggcctttgagctctcggacagcgtggagtggtcaagggaggcctccaggaggaagaggtggccaaccgccccaggcagcacagtggtcttgaagcggcggccctgctcctggccgtgaccatggaccctctggagacccctatcaaggatggcatcctctaccagcagcatgtcaagtttggcaagaagtgctggcggaaggtgtgggctctgctgtatgcaggaggcccatcaggcgtggcacggctggagagctgggaggtccgggatggtggcctgggagcagcgggtgacaggtcggcagggcctggccggcgaggggagcgacgggtcatccgcctggctgactgtgtgtccgtgctgccggctgacggcgagagctgcccccgggacaccggtgccttcctgctcaccaccaccgagcgaagccatctactggctgctcagcaccgccaggcctggatgggccccatctgccagctggccttcccggggacaggggaggcctcctcaggatccacagatgcccagtctcccaagaggggcctggtccccatggaggaaaactccatctactcctcctggcaggaagtgggcgagtttcccgtggtggtgcagaggactgaggccgccacccgctgccagctgaaggggccggccctgctggtgctgggcccagacgccatccagctgagggaggccaagggcacccaggccctctacagctggccctaccacttcctgcgcaagttcggctccgacaagatacttctgggaaccccaggcgtcagtctcctcatctgtaaaggagagagaaccgatgacgtatcaggcataatccttgatgagagtttgctgcgtgcctactcagtgccaggcgctgggggacacagccgtgttcaggacagccttggtcctgttctccgggagccgacattccagggggagagaagtttcctgaagacttccatgctgcgttccctcctctgctcctgctcctggcgccatcctaggagccagccacgcacgcaagcgtcatgcctccagggctctgactgcccagcccctcaccgcaactccacctcagctgcacacacccttggcacatcctgaacctcattttcatgacggacacacaatttttgctctctcctgtccaagcctcatcctctggccgccacctccttccagctcacttcctttagtgcggccagtaccgcccctgcctaggcatgtcgacctgcagggacccttttctggctcttcgaggcctctgcccaccatcccctctttgttctccatagtcccttccccctgttctctctcgtttcatcttactggtctggcaaagtccccggccttgggcgagcccagacctcctcagtgcctgcacacagctgcccacagccagagaaatccatttaagcagactgcctgcatccttcttaacagtgcaaggcaggcactccctgccacaagagaccctgttccctagtagggcagcttttctcctccccagaacctcctgtctatccccacccaatgtctcctcacaggcatattggggaaacaggtcgggctctcccaccgtatctgcaagtgtactggcatccatctgtcttcttcctacccctacagtagaaacagtgtctgtccccagctgtgctctgatcccggctcctttcacctcagagcttggaaaattgagctgtccccactctctcctgcgcccattcatcctaccagcagcttttccagccacacgcaaacatgctctgtaatttcacattttaaaccttcccttgacctcacattcctcttcggccacctctgtttctctgttcctcttcacagcaaaaactgttcaaaagagttgttgattactttcatttccactttctcacccccattctcccctcaattaactctccttcatccccatgatgccattatgtggcttttattagagtcaccaaccttattctccaaaacaaaagcaacaaggactttgacttctcagcagcactcggctctggttcttgaaacacccccgttacttgctattcctcctacctcataacaatctccttcccagcctctactgctgccttctctgagttcttcccagggtcctaggctcagatgtagtgtagctcaaccctgctacacaaagaatctcctgaaagcctgtaaaaatgtccatgcatgttctgtgagtgatctaccaagaaaataaaaaattttaaaaatc

SEQ ID NO: 56232 - DNA, 577 bp, Artificial Sequence
  derived and/or modified sequence
atcagacgcgcgtgcccagctgaaccaggtgcgtgagaaggctgccttcaggtggccgggggctccctccaggtcttgaagcggcggccctgctcctggccgtgaccatggaccctctggagacccctatcaaggatggcatcctctaccagcagcatgtcaagtttggcaagaagtgctggcggaaggtgtgggctctgctgtatgcaggaggcccatcaggcgtggcacggctggagagctgggaggtccgggatggtggcctgggagcagcgggtgacaggtcggcagggcctggccggcgaggggagcgacgggtcatccgcctggctgactgtgtgtccgtgctgccggctgacggcgagagctgcccccgggacaccggtgccttcctgctcaccaccaccgagcgaagccatctactggctgctcagcaccgccaggcctggatgggccccatctgccagctggccttcccggggacaggggaggcctcctcaggatccacagatgcccagtctcccaagaggggcctggtccccatggaggaaaactccatctactcctcctggcagga

SEQ ID NO: 56233 - DNA, 721 bp, Artificial Sequence
  derived and/or modified sequence
cggggagccagactgcgatcagacgcgcgtgcccagctgaaccaggtcttgaagcggcggccctgctcctggccgtgaccatggaccctctggagacccctatcaaggatggcatcctctaccagcagcatgtcaagtttggcaagaagtgctggcggaaggtgtgggctctgctgtatgcaggaggcccatcaggcgtggcacggctggagagctgggaggtccgggatggtggcctgggagcagcgggtgacaggtcggcagggcctggccggcgaggggagcgacgggtcatccgcctggctgactgtgtgtccgtgctgccggctgacggcgagagctgcccccgggacaccggtgccttcctgctcaccaccaccgagcgaagccatctactggctgctcagcaccgccaggcctggatgggccccatctgccagctggccttcccggggacaggggaggcctcctcaggatccacagatgcccagtctcccaagaggggcctggtccccatggaggaaaactccatctactcctcctggcaggaagtgggcgagtttcccgtggtggtgcagaggactgaggccgccacccgctgccagctgaaggggccggccctgctggtgctgggcccagacgccatccagctgagggaggccaagggcacccaggccctctacagctggccctaccacttcctgcgcaagttcggctccga

SEQ ID NO: 56234 - protein, 228 aa, Artificial Sequence
  derived and/or modified sequence
MDPLETPIKDGILYQQHVKFGKGTGEASSGSTDAQSPKRGLVPMEENSIYSSWQEVGEFPVVVQRTEAATRCQLKGPALLVLGPDAIQLREAKGTQALYSWPYHFLRKFGSDKILLGTPGVSLLICKGERTDDVSGIILDESLLRAYSVPGAGGHSRVQDSLGPVLREPTFQGERSFLKTSMLRSLLCSCSWRHPRSQPRTQASCLQGSDCPAPHRNSTSAAHTLGTS

SEQ ID NO: 56235 - DNA, 687 bp, Artificial Sequence
  derived and/or modified sequence
atggaccctctcgagacccccataaaggacggcattctgtaccagcagcacgttaagttcggaaagggcaccggggaggccagctcgggctccaccgacgctcagtccccaaaacgcggtcttgttccgatggaggagaacagtatctacagcagctggcaggaagtcggtgagtttcctgtggtggtgcagaggactgaagctgccacaaggtgccagctgaaggggcctgcactgctggtcctggggccagatgccatacagctgagagaagccaagggaacacaagccttatactcctggccttaccacttcctgaggaagtttggatctgacaagatattgcttggcacaccgggagtatcattgttaatttgcaaaggggaacggactgacgatgtttccgggattattctggatgaaagtcttctgcgcgcctactcagtgcccggtgcgggcggccatagccgcgtgcaggactccttgggccccgtgctgcgggaacctacttttcaaggtgaacgatcatttctgaagacaagcatgcttcggtcattattgtgctcgtgttcctggcgtcaccctcggagccagccacggactcaggcctcatgcctccagggttcagattgtccagccccgcatcggaacagcacgtccgccgcccacaccctcggcacctcatag

SEQ ID NO: 56236 - DNA, 687 bp, Artificial Sequence
  derived and/or modified sequence
atggaccccctggagacccccatcaaggatggcatcctgtaccagcagcacgtgaagtttgggaagggcaccggggaggccagcagcggcagcacagatgcccagagccccaagaggggcctggtgcccatggaggagaacagcatctacagctcctggcaggaggtgggggagttccctgtggtggtgcagaggacagaggccgccacccgctgccagctgaagggccctgccctgctggtgctgggcccagatgccatccagctgcgggaggccaagggcacccaggccctgtacagctggccctaccacttcctgaggaagtttggaagtgacaagatcctgctgggcaccccaggagtgtccctgctgatctgcaagggggagaggacagatgatgtgtctggcatcatcctggatgagagcctgctgcgggcctacagcgtgcctggggccggcggccacagccgggtgcaggacagcctgggccctgtgctgcgggagcccaccttccagggcgagaggagcttcctgaagacctccatgctgcggagcctgctgtgcagctgctcctggaggcaccccaggagccagcccaggacccaggccagctgcctgcagggcagtgactgcccagccccccacaggaacagcaccagcgctgcccacaccctgggcaccagctag

SEQ ID NO: 56237 - DNA, 687 bp, Artificial Sequence
  derived and/or modified sequence
atggaccccctggagacccccatcaaggacggcatcctgtaccagcaacatgtgaaattcgggaagggcactggcgaagcctcatcgggctccactgatgcccaatctcccaaacgcggccttgtccctatggaggagaacagtatttactcctcgtggcaggaggtgggcgagttccccgtcgtggttcagagaacagaagctgccacccgctgtcagctaaagggcccagctctgttggttctcggtcctgatgcgatccagctgagggaggcgaagggtacacaagccctctattcatggccctaccacttcttacgcaaattcgggtccgacaaaatcctgctgggaacgcccggagtatctctactgatctgcaaaggggagaggacggacgacgttagcggcattatattagacgaaagcttgttgcgcgcctacagcgtgcctggcgctgggggccatagtagagttcaggacagcttaggacctgtcctgcgggagcccacattccagggagagcgatcattcttgaagacttccatgcttcgaagcttattgtgttcctgcagctggcgccatcccaggagtcagcccagaactcaggcctcttgtttacaggggtctgactgccccgctccccacaggaattccacatcagcagcccacactttgggaacctcgtag

SEQ ID NO: 56238 - DNA, 687 bp, Artificial Sequence
  derived and/or modified sequence
atggacccactggagacccccataaaggatggcattctctaccagcagcacgtgaagtttgggaaaggaacgggcgaggccagctctggatccaccgacgcccagagtcctaaacgaggacttgtccccatggaggaaaattcaatttacagtagttggcaggaggtgggtgagttccccgtcgttgtgcagcggaccgaagccgctacccgctgccagttgaagggccctgccttgctggtgctgggccctgatgcaatccaattaagagaggccaaggggacccaggcactctactcctggccttatcattttctgcgtaagtttggaagcgataaaatccttcttggaactcccggagtgtctctcctcatctgtaaaggcgaacggaccgacgacgtgtctgggatcattctggacgaatctctcctgcgggcttatagcgtaccgggtgctgggggtcactctcgggtccaggactctctgggccctgtgttacgggaaccaactttccaaggagaacgctcattcctgaagaccagcatgctgaggtcattgttatgtagctgtagttggcgtcatcctaggagtcaaccacgtacgcaagcgtcttgtctgcaaggcagcgattgccctgctcctcatcggaactctacctctgccgctcatacgctcggcacctcctag

SEQ ID NO: 56239 - DNA, 687 bp, Artificial Sequence
  derived and/or modified sequence
atggaccccctggagacccccatcaaggacggcatcctgtaccagcagcacgtgaagttcggcaagggcaccggcgaggccagcagcggcagcaccgacgcccagagccccaagagaggcctggtgcccatggaggagaacagcatctacagcagctggcaggaggtgggcgagttccccgtggtggtgcagagaaccgaggccgccaccagatgccagctgaagggccccgccctgctggtgctgggccccgacgccatccagctgagagaggccaagggcacccaggccctgtacagctggccctaccacttcctgagaaagttcggcagcgacaagatcctgctgggcacccccggcgtgagcctgctgatctgcaagggcgagagaaccgacgacgtgagcggcatcatcctggacgagagcctgctgagagcctacagcgtgcccggcgccggcggccacagcagagtgcaggacagcctgggccccgtgctgagagagcccaccttccagggcgagagaagcttcctgaagaccagcatgctgagaagcctgctgtgcagctgcagctggagacaccccagaagccagcccagaacccaggccagctgcctgcagggcagcgactgccccgccccccacagaaacagcaccagcgccgcccacaccctgggcaccagctag

SEQ ID NO: 56240 - DNA, 1884 bp, Artificial Sequence
  derived and/or modified sequence
atgtggactggatgcccagcgtgagtgtataccgtgagggcctttgagctctcggacagcgtggagtggtcaagggaggcctccaggaggaagaggtggccaaccgccccaggcagcacagtgctgtctctagacggagggacgggaagtggccagaaggggaagtgtgaggagttcccgtccagcctgtcatcagtctccccaggtcttgaagcggcggccctgctcctggccgtgaccatggaccctctggagacccctatcaaggatggcatcctctaccagcagcatgtcaagtttggcaaggggacaggggaggcctcctcaggatccacagatgcccagtctcccaagaggggcctggtccccatggaggaaaactccatctactcctcctggcaggaagtgggcgagtttcccgtggtggtgcagaggactgaggccgccacccgctgccagctgaaggggccggccctgctggtgctgggcccagacgccatccagctgagggaggccaagggcacccaggccctctacagctggccctaccacttcctgcgcaagttcggctccgacaagatacttctgggaaccccaggcgtcagtctcctcatctgtaaaggagagagaaccgatgacgtatcaggcataatccttgatgagagtttgctgcgtgcctactcagtgccaggcgctgggggacacagccgtgttcaggacagccttggtcctgttctccgggagccgacattccagggggagagaagtttcctgaagacttccatgctgcgttccctcctctgctcctgctcctggcgccatcctaggagccagccacgcacgcaagcgtcatgcctccagggctctgactgcccagcccctcaccgcaactccacctcagctgcacacacccttggcacatcctgaacctcattttcatgacggacacacaatttttgctctctcctgtccaagcctcatcctctggccgccacctccttccagctcacttcctttagtgcggccagtaccgcccctgcctaggcatgtcgacctgcagggacccttttctggctcttcgaggcctctgcccaccatcccctctttgttctccatagtcccttccccctgttctctctcgtttcatcttactggtctggcaaagtccccggccttgggcgagcccagacctcctcagtgcctgcacacagctgcccacagccagagaaatccatttaagcagactgcctgcatccttcttaacagtgcaaggcaggcactccctgccacaagagaccctgttccctagtagggcagcttttctcctccccagaacctcctgtctatccccacccaatgtctcctcacaggcatattggggaaacaggtcgggctctcccaccgtatctgcaagtgtactggcatccatctgtcttcttcctacccctacagtagaaacagtgtctgtccccagctgtgctctgatcccggctcctttcacctcagagcttggaaaattgagctgtccccactctctcctgcgcccattcatcctaccagcagcttttccagccacacgcaaacatgctctgtaatttcacattttaaaccttcccttgacctcacattcctcttcggccacctctgtttctctgttcctcttcacagcaaaaactgttcaaaagagttgttgattactttcatttccactttctcacccccattctcccctcaattaactctccttcatccccatgatgccattatgtggcttttattagagtcaccaaccttattctccaaaacaaaagcaacaaggactttgacttctcagcagcactcggctctggttcttgaaacacccccgttacttgctattcctcc

SEQ ID NO: 56241 - protein, 606 aa, Artificial Sequence
  derived and/or modified sequence
MVRGARQPQQPRSRLAPRLTGTVEKPPRKRRSRTEFALKEIMSSGGAEDDIPQGERKTVTDFCYLLDKSKQLFNGLRDLPQYGQKQWQSYFGRTFDVYTKLWKFQQQHRQVLDNRYGLKRWQIGEIASKIGQLYYHYYLRTSETSYLNEAFSFYSAIRQRSYYSQVNKEDRPELVVKKLRYYARFIVVCLLLNKMDVVKDLVKELSDEIEDYTHRFNTEDQVEWNLVLQEVAAFIEADPVMVLNDDNTIVITSNRLAETGAPLLEQGMIVGQLSLADALIIGNCNNQVKFSELTVDMFRMLQALEREPMNLASQMNKPGMQESADKPTRRENPHKYLLYKPTFSQLYTFLAASFKELPANSVLLIYLSATGVFPTGRSDSEGPYDFGGVLTNSNRDIINGDAIHKRNQSHKEMHCLHPGDLYPFTRKPLFIIVDSSNSVAYKNFTNLFGQPLVCLLSPTAYPKALQDQSQRGSLFTLFLNNPLMAFLFVSGLSSMRRGLWEKCQEYLRKINRDIAQLLTHSRSIDQAFLQFFGDEFLRLLLTRFIFCSATMRMHKIFRETRNYPESYPQLPRDETVENPHLQKHILELASILDVRNVFFENTIDDY

SEQ ID NO: 56242 - DNA, 1821 bp, Artificial Sequence
  derived and/or modified sequence
atggtgagaggcgccagacagccccagcagcccagaagcagactggcccccagactgaccggcaccgtggagaagccccccagaaagagaagaagcagaaccgagttcgccctgaaggagatcatgagcagcggcggcgccgaggacgacatcccccagggcgagagaaagaccgtgaccgacttctgctacctgctggacaagagcaagcagctgttcaacggcctgagagacctgccccagtacggccagaagcagtggcagagctacttcggcagaaccttcgacgtgtacaccaagctgtggaagttccagcagcagcacagacaggtgctggacaacagatacggcctgaagagatggcagatcggcgagatcgccagcaagatcggccagctgtactaccactactacctgagaaccagcgagaccagctacctgaacgaggccttcagcttctacagcgccatcagacagagaagctactacagccaggtgaacaaggaggacagacccgagctggtggtgaagaagctgagatactacgccagattcatcgtggtgtgcctgctgctgaacaagatggacgtggtgaaggacctggtgaaggagctgagcgacgagatcgaggactacacccacagattcaacaccgaggaccaggtggagtggaacctggtgctgcaggaggtggccgccttcatcgaggccgaccccgtgatggtgctgaacgacgacaacaccatcgtgatcaccagcaacagactggccgagaccggcgcccccctgctggagcagggcatgatcgtgggccagctgagcctggccgacgccctgatcatcggcaactgcaacaaccaggtgaagttcagcgagctgaccgtggacatgttcagaatgctgcaggccctggagagagagcccatgaacctggccagccagatgaacaagcccggcatgcaggagagcgccgacaagcccaccagaagagagaacccccacaagtacctgctgtacaagcccaccttcagccagctgtacaccttcctggccgccagcttcaaggagctgcccgccaacagcgtgctgctgatctacctgagcgccaccggcgtgttccccaccggcagaagcgacagcgagggcccctacgacttcggcggcgtgctgaccaacagcaacagagacatcatcaacggcgacgccatccacaagagaaaccagagccacaaggagatgcactgcctgcaccccggcgacctgtaccccttcaccagaaagcccctgttcatcatcgtggacagcagcaacagcgtggcctacaagaacttcaccaacctgttcggccagcccctggtgtgcctgctgagccccaccgcctaccccaaggccctgcaggaccagagccagagaggcagcctgttcaccctgttcctgaacaaccccctgatggccttcctgttcgtgagcggcctgagcagcatgagaagaggcctgtgggagaagtgccaggagtacctgagaaagatcaacagagacatcgcccagctgctgacccacagcagaagcatcgaccaggccttcctgcagttcttcggcgacgagttcctgagactgctgctgaccagattcatcttctgcagcgccaccatgagaatgcacaagatcttcagagagaccagaaactaccccgagagctacccccagctgcccagagacgagaccgtggagaacccccacctgcagaagcacatcctggagctggccagcatcctggacgtgagaaacgtgttcttcgagaacaccatcgacgactactag

SEQ ID NO: 56243 - DNA, 1821 bp, Artificial Sequence
  derived and/or modified sequence
atggtgcgaggggctcgacagccacagcagccaaggagccggctggctccccggctcaccggaaccgtcgaaaaacccccacggaagcgaagatctaggacagagtttgcacttaaagagatcatgagctccggcggcgcagaagacgatattcctcagggcgagcggaagactgtcactgatttctgctatctcctcgataagtctaagcagctgttcaatggcctccgcgacctcccacagtatgggcaaaaacagtggcagtcctacttcggacggacgttcgacgtgtacactaagctttggaagttccagcagcagcaccggcaggttctcgacaaccgctacggcttaaagcgatggcagatcggcgaaattgcctcaaagatcggacaattatattatcactactacctgcgtacatccgagacatcatacctgaacgaagcattcagcttctactcggccatcaggcagcgaagttactactcccaggtcaataaggaggacagacccgagctcgtcgtgaagaagttaaggtactacgcacggttcattgtggtctgcctcctcttgaacaagatggacgtcgtgaaggacctggttaaagaactttccgacgagatcgaggactatacacatagatttaatacagaggaccaagtggagtggaacctcgtgctccaggaggtcgccgccttcatagaggctgatccggtcatggttttgaacgatgacaacactatcgtgattacaagcaacagactggccgagacaggcgctccactccttgaacaagggatgatagtcggccagttgtccctagcagacgccctcattatcggtaattgtaacaaccaggtgaagtttagcgaattaacagttgacatgtttcggatgctgcaggctttagagcgagagccaatgaatctcgcatctcagatgaataaacccggtatgcaggagtcagccgacaaacctacgcgcagagagaaccctcacaagtacttgttgtataagccgactttcagtcagctttacacgttcctcgctgccagcttcaaagaacttcctgccaattctgtgctcttgatctatctgagtgccactggagttttccctaccggccggagtgactcggaaggaccgtacgatttcggcggagtcctcacaaattcaaaccgtgacatcattaatggggatgccattcacaaaaggaatcagagtcataaggagatgcactgtctgcatcccggcgatttatatccttttactagaaagcccctctttatcatcgtggattctagtaactctgtcgcgtacaaaaactttacaaatctctttggtcagccacttgtttgcctcttgtcacccaccgcatacccaaaagccctgcaggaccagtcacagagggggagcctgttcacgctgttcctgaacaaccctctgatggcattcctgtttgtttccggcctctccagcatgcggcgtggactgtgggaaaagtgccaggaatatctgcgcaaaattaaccgggatatagcccagctcctgacacactcaagatctatcgaccaggcctttctgcaattctttggggacgagttcctgcggctgcttctcaccaggtttatattttgttcggcgacaatgcgaatgcacaaaatcttccgcgagactcgtaactaccccgagtcctaccctcagctgccccgggacgaaacagtcgaaaatccacacctccagaaacacatcctcgagctggcctctatactggacgtgcgaaatgtgttcttcgaaaatacaatcgatgattactag

SEQ ID NO: 56244 - DNA, 1821 bp, Artificial Sequence
  derived and/or modified sequence
atggtgcggggggcccggcagccccagcagcccaggagccggctggccccccggctgaccggcaccgtggagaagccacccaggaagaggaggagcaggacagaatttgccctgaaggagatcatgagcagcggcggcgcagaagatgacatcccccagggcgagaggaagacagtgacagacttctgctacctgctggacaagagcaagcagctgttcaacggcctgcgggacctgccccagtatggccagaagcagtggcagagctactttggaagaacatttgatgtgtacaccaagctgtggaagttccagcagcagcaccggcaggtgctggacaacagatatggcctgaagcgctggcagattggagagatcgccagcaagattggccagctgtactaccactactacctgcggaccagcgagaccagctacctgaatgaggccttctccttctacagcgccatccggcagaggagctactacagccaggtgaacaaggaggacaggcctgagctggtggtgaagaagctgcgctactatgcccgcttcatcgtggtgtgcctgctgctgaacaagatggatgtggtgaaggacctggtgaaggagctgagtgatgaaattgaggactacacccaccgcttcaacacagaggaccaggtggagtggaacctggtgctgcaggaggtggccgccttcattgaagctgaccctgtgatggtgctgaatgatgacaacaccatcgtcatcaccagcaaccggctggccgagactggagcccccctgctggagcagggcatgattgtgggccagctgagcctggctgatgccctgatcatcggcaactgcaacaaccaggtgaagttcagcgagctgactgtggacatgttcaggatgctgcaggccctggagcgggagcccatgaacctggccagccagatgaacaagccaggcatgcaggagagcgctgacaagcccacccggcgggagaacccccacaagtacctgctgtacaagcccaccttcagccagctgtacaccttcctggccgccagcttcaaggagctgcctgccaacagcgtgctgctgatctacctgagcgccaccggggtcttccccaccggccgcagtgacagcgagggcccctatgactttggaggagtgctgaccaacagcaacagagacatcatcaatggagatgccatccacaagaggaaccagagccacaaggagatgcactgcctgcaccctggggacctgtaccccttcaccaggaagcccctcttcatcatcgtggacagcagcaacagcgtggcctacaagaacttcaccaacctgtttggccagcccctggtgtgcctgctgagccccacagcctaccccaaggccctgcaggaccagagccagaggggcagcctcttcaccctcttcctgaacaaccccctgatggccttcctgtttgtgtctggcctgagctccatgaggcggggcctgtgggagaagtgccaggagtacctgaggaagatcaacagagacatcgcccagctgctgacccacagccgcagcattgaccaggccttcctgcagttctttggagatgagttcctgcggctgctgctgacccgcttcatcttctgcagcgccaccatgaggatgcacaagatcttccgggagaccaggaactacccagagagctacccccagctgcccagagatgaaacagtggagaacccccacctgcagaagcacatcctggagctggccagcatcctggatgtgagaaatgtgttctttgagaacaccattgatgactactag

SEQ ID NO: 56245 - DNA, 1821 bp, Artificial Sequence
  derived and/or modified sequence
atggtgcggggcgcccggcagccccagcagccccggagccggctggcgccccggttaacagggaccgtagaaaaacccccacgcaagcgtcgctctaggacagaattcgccttaaaggagatcatgtcaagtggcggagctgaagatgatattccacagggggaacgtaagaccgtaactgatttctgctatctgcttgataagtctaaacagttgttcaatggactgcgggatctcccacagtacggacagaagcagtggcagtcatactttggccggacttttgacgtgtacaccaagctctggaaatttcagcagcaacacagacaggtgctggacaatagatatggcctgaaaagatggcagattggcgagatcgcctcaaaaatcggtcagctctactatcactattacctgagaacatctgagacgtcttacttgaacgaggccttttccttctactccgcaattcgccagcggtcatactatagccaagtcaataaagaggaccggccagagctggtggtgaagaaactccgctactatgctcgattcatagtggtgtgcctcttactcaataaaatggacgtggttaaagatctggttaaggaactcagcgatgagatcgaagactacacccacagatttaatacggaggatcaggtggagtggaatttggtcttgcaagaagtagccgcctttatagaagccgaccccgtgatggtgttaaacgatgataacacaatagtcataacttccaatagacttgccgagacgggagcgcccctgctggaacaagggatgatcgttggccagttatcattggccgacgccctgataattggcaattgcaacaaccaggtgaagttctccgagttaaccgttgacatgttccgaatgctccaggcactcgaacgagaacctatgaacttagcctctcagatgaacaagccgggtatgcaggaatccgcagataagcctacccgacgcgaaaatcctcataagtatttactgtataagcctacattctcccaattgtatacattccttgccgcgtccttcaaagagctccccgcaaattctgtgcttctgatttatctgtcggctactggcgtattccccaccggaaggagcgacagtgagggcccctatgactttggcggcgtgctcacaaacagtaacagagatatcataaatggagatgcgatccataagcgtaatcagagccataaggaaatgcactgcctccatcccggggacttgtatccatttacaaggaagcccctcttcatcatcgtggactccagtaactctgttgcgtacaagaacttcaccaatttgtttgggcagccattagtttgtttgctgagccccacagcctatccaaaagccctccaagaccagtcacagcgtgggagcttattcacactcttcctgaacaacccactcatggcgttcctgtttgtctcggggctgagctctatgagaagaggactctgggaaaaatgccaggaatacctgcggaagatcaatcgagacatcgcacagcttctgactcattcaagatccatcgatcaggccttcctacagttttttggggatgaatttctgagactcctccttaccagatttattttctgctccgcaacaatgcgaatgcacaagatctttcgcgagactcgcaattacccagagagctaccctcagcttccaagggatgagactgtcgaaaatcctcaccttcagaagcacattctagagttggcttcaatcttagacgtacgcaacgtgttctttgagaacactatcgatgactactag

SEQ ID NO: 56246 - DNA, 1821 bp, Artificial Sequence
  derived and/or modified sequence
atggtgcgtggcgctaggcagcctcagcaaccgagatccagacttgcgcctcgcttaacaggcaccgtggagaagccacctagaaagagacgctctcgcacagagttcgcgttaaaagaaattatgtccagcggcggtgcagaggacgacataccacagggagagcggaagactgtgaccgatttttgctacctgctggacaagagcaaacaactgttcaatggactcagggatctcccccaatatggacagaaacagtggcaatcatacttcggaagaaccttcgacgtctatacaaaactctggaagtttcagcagcagcaccgccaggtactagacaatagatatgggctcaagaggtggcagattggagaaattgctagcaagatcgggcaactctactaccactattacctgcggactagcgagacctcatacctcaacgaggccttctctttttattctgctataaggcagagaagctattacagtcaagtgaataaagaggacagacctgagctggttgtgaagaagctgagatactatgccaggttcatagtagtctgtctgttgctaaacaaaatggacgtggttaaagatctggtgaaagagctgtccgacgaaattgaggattacactcatagattcaacactgaggaccaggtcgagtggaatttggtactacaggaggtcgccgcattcatagaagccgacccggtgatggtcttgaatgatgataacactatcgtcattacatctaatcgtctcgctgagacaggagctccgctcctggaacaagggatgattgtaggccagctgagcctggcagatgccttaattattggaaactgcaacaatcaggtgaaatttagcgaactgacagtcgacatgtttcggatgcttcaagctttagagagggagcccatgaacctggcaagccaaatgaataagcctgggatgcaagagagcgccgataaacccacccggagggagaatcctcataaatacctgctatacaaaccaactttttctcagctgtatactttcctggctgcctctttcaaggagttacccgcaaacagcgtgcttcttatttatttgtccgctacaggcgtcttccccactggacggtctgatagcgaagggccatacgactttggaggcgtcctgacaaactccaatagggacattatcaatggggatgccatccataaaagaaaccaatcacacaaagaaatgcattgtctgcacccaggagacctttacccattcaccaggaaaccgttgtttattattgtggactcttccaattcagttgcttacaagaatttcacaaacctgtttggtcagcccctggtatgtcttttaagcccaacagcatatcctaaagctctgcaggatcaatcccagcgcggtagcctgttcactctgttcttgaacaacccactgatggctttcctgtttgtttctggtctgagctcgatgcggcgaggactttgggaaaaatgtcaagagtacctgagaaagataaatagggatatcgcccaactactgacccattccagatctattgatcaggccttcttgcaattttttggcgacgaattcctcagactccttctcacgaggttcatcttttgctccgcaactatgaggatgcataagattttcagagagactaggaactacccagagtcctatccccagctgccaagggacgaaacggtggaaaatccacatctgcagaagcacatccttgaactcgccagtatactagatgttaggaatgtgttctttgagaatacaatcgacgactactag

SEQ ID NO: 56247 - DNA, 2586 bp, Artificial Sequence
  derived and/or modified sequence
agcttcccgagcgagccctgcggccgccggagcagctcccgcggcggagcaggagccggatggtcagaggagcccggcagccccagcagccgcggagtcgcctggcccccagactgactggcacagtggagaaaccgcctcgaaaacggagaagcaggactgaatttgctcttaaagaaatcatgtcctctggaggtgctgaagatgatatcccacagggagagaggaaaacagttacagatttttgttatcttctggataaatctaagcaactgttcaatgggttaagagatttgccacaatatggacagaagcagtggcagtcctattttggaagaacttttgatgtttacaccaaactctggaagttccagcagcagcatcgacaagtcttggataatcggtatggcttgaagcgctggcaaataggagaaattgcttccaagattgggcagctatactatcattattacttacgcacatcggaaaccagctatctgaatgaggctttttccttctattctgcaatcagacagagatcatattattctcaagtcaataaagaggacagacctgaattggtagttaagaagttacgatattatgcaagatttatagtagtttgtcttcttctcaacaaaatggatgttgtaaaggatctggtaaaggaattgtcagatgaaattgaagattatactcaccgatttaatactgaagatcaagtggaatggaacttggtgcttcaagaagtagcagctttcattgaggcggatcctgtaatggtattaaatgatgataataccattgttatcacatcgaatcgccttgctgaaacaggagccccattgctggaacagggcatgattgtgggacagttgtctctggctgacgcactcattattggtaattgtaataatcaggttaagttcagtgaactaactgttgacatgttccggatgttacaagctctggaaagggagccaatgaatttagcttcccagatgaataaaccaggaatgcaggaatcagctgacaagcctactagacgagaaaacccccacaagtatctgctctacaaaccaaccttcagccagctatataccttcttagcagcgtcttttaaggagctgcctgccaatagcgtgcttctgatttacctgtcggccactggcgttttccccacaggtcgttctgatagtgaaggtccttatgattttggaggtgtacttactaatagtaaccgggatattattaatggagatgccatccacaaacgaaatcagtcccacaaggaaatgcactgccttcatcccggggatctctatcctttcaccaggaagccactgttcatcattgtggattcgtctaatagtgttgcgtataagaatttcacaaacttgtttggacagccactagtctgcttgctttctcctacagcatatccaaaagctttacaagatcaatctcagcgaggtagcctcttcactctctttttgaacaatcctctaatggccttcctatttgtctctggattgtcaagcatgcgcagaggcctatgggaaaagtgtcaagaatatcttcgaaaaatcaaccgtgatattgcccagctactgactcattcacgttcaatagatcaggcatttctccagttttttggagatgaatttcttcgcttgctcctcacaagatttatcttttgttcagccaccatgaggatgcacaagatttttcgggaaacacgaaattatccagaatcatatccacaactgccaagggatgaaacagtggagaatcctcatctccagaagcacattttggaattagcatccattctggatgttcgaaacgtgttctttgagaataccattgatgactattaaaacaaaaaccctgttgtcgaaacaagttttcattttccacaaattttaaatggtgcagttttctaacgtgataagacacatagtggtgttacttagtttttattttttaatttagggccaccattttaaaaacaaacaaaaaaatgttcacacttttagggtaactgttttaaaatgcaacctttcaggtcttttaaaatcttaaccttggaatttttattttttgattttgagggatggatatttacctccaacttctaatcctacactcaaatagtcactattctcaccctgagaagagtaaatcatttatttttgtataatgaggtaaatccaactcttatacttggacctaagttaaatgtctggatttggaaatatgtaatggttcataatgatgaagctagccaccatggactactgaaaatcaagaacagagtccctccataatatattttttctcattccaacttagctggtagaaaaatgtttgatcctttgaaacatgatcaagccagttttttgaaatcatttaatttctttcaatactgtcataatttcagaaattggattgaattgcatctgaaagctacatcttgattgaggacttgaggtggtaatattacttggaatgtatgagtattatgagatttatttgcatattttctttgtagtctgtgaatgctggaaatgaaaaaggaaacaa

SEQ ID NO: 56248 - protein, 336 aa, Artificial Sequence
  derived and/or modified sequence
MGQRPGPVLPAVAVLGQVAKRKVAWLLRWKAVTRTETAGNSSGVYGFGKMKIFVKYFQKMADPWQECMDYAVTLARQAGEVVCEAIKNEMNVMLKSSPVDLVTATDQKVEKMLISSIKEKYPSHSFIGEESVAAGEKSILTDNPTWIIDPIDGTTNFVHRFPFVAVSIGFAVNKKIEFGVVYSCVEGKMYTARKGKGAFCNGQKLQVSQQEDITKSLLVTELGSSRTPETVRMVLSNMEKLFCIPVHGIRSVGTAAVNMCLVATGGADAYYEMGIHCWDVAGAGIIVTEAGGVLMDVTGGPFDLMSRRVIAANNRILAERIAKEIQVIPLQRDDED

SEQ ID NO: 56249 - protein, 211 aa, Artificial Sequence
  derived and/or modified sequence
MGQRPGPVLPAVAVLGQVAKRKVAWLLRWKAVTRTETAGNSSGVYGFGKMKIFVKYFQKMADPWQECMDYAVTLARQAGEVVCEAIKNEMNVMLKSSPVDLVTATDQKVEKMLISSIKEKYPSHSFIGEESVAAGEKSILTDNPTWIIDPIDGTTNFVHRFPFVAVSIGFAVNKKIEFGVVYSCVEGKMYTARKGKGAFCNGQKLQVSQQE

SEQ ID NO: 56250 - DNA, 1011 bp, Artificial Sequence
  derived and/or modified sequence
atgggccagcggcccggacccgtgcttccagccgtggccgttctgggacaggtggcaaaacgtaaggtcgcatggttgctgcggtggaaggcggtaaccagaactgagactgccgggaactcctcaggtgtgtatggtttcgggaaaatgaagatttttgttaagtatttccagaagatggcggacccctggcaggaatgtatggactatgcggtaacactcgctaggcaagccggcgaggtcgtttgtgaggccattaagaacgaaatgaacgtcatgctgaaatcctcaccagtcgatttggtaaccgccactgaccagaaggtcgaaaaaatgcttatttcctccattaaagagaagtacccaagccattcattcatcggcgaggagagcgtcgccgccggagagaaatcaattctgacagacaaccctacctggatcatagatccaattgacggcaccacaaactttgtgcaccgcttcccattcgtggcagtttccatcggctttgccgtcaataagaagatcgagttcggagtcgtgtactcgtgcgtcgagggaaaaatgtacacagccaggaaaggaaaaggggccttttgcaacggacagaagctgcaggtgtctcagcaggaagacataacaaagagtctactggtgacggagctgggtagctccaggaccccggagaccgtgcgcatggtgctgtctaacatggaaaaacttttctgcatccccgtccacgggattcgctctgtaggaacagctgcagtgaacatgtgtctggtggccactggaggcgccgatgcctactatgagatgggaattcattgttgggacgtggcaggcgccgggatcatagtcactgaggctggaggagttctcatggacgtaaccggtggaccatttgatctgatgtcacggcgagttatcgcagccaacaaccgtatccttgccgagcgcatcgccaaagagatacaggtgatccctttgcaacgagatgatgaggactag

SEQ ID NO: 56251 - DNA, 636 bp, Artificial Sequence
  derived and/or modified sequence
atggggcagagacctggccccgttctgcctgccgtggccgtccttggacaggtggccaagcgcaaagtcgcctggttgctgcggtggaaggccgtgacaaggaccgagacagcaggtaacagctcgggcgtgtacggctttggaaaaatgaaaatcttcgtgaagtattttcagaagatggccgacccatggcaagaatgtatggattacgctgtgacgcttgctaggcaggctggcgaagtcgtctgtgaagcgatcaagaatgagatgaacgtaatgttgaagtcaagccccgtggaccttgtgactgccacagaccagaaagtggagaaaatgctgatttctagtattaaagaaaagtacccttctcacagtttcatcggggaggagagtgtagctgccggagaaaagtccatcttgaccgacaatccgacttggattattgatcccatcgacggcaccaccaacttcgttcatcgatttcccttcgtagccgtctctataggatttgcagtaaataaaaagatagaattcggagtggtctacagctgtgtggagggaaagatgtacacagcccgcaagggcaaaggtgccttctgcaacgggcagaagttgcaagtcagccagcaggaatag

SEQ ID NO: 56252 - DNA, 2690 bp, Artificial Sequence
  derived and/or modified sequence
gttagcacctaaaagctgcataatcggaatcatatctgcaatctgggttttgtcaaaatagtactatagaataaatgggagaaagaagaaagcaagctaaatgggaaaccgtgaatgaatggaggacgaaagaagaaaaaggcaaagtaaagagagaagtaatgtttaaaaactgagagatgaaaagacaagcaggagaaaagaaccagaagctagaatgaagaggcagtatcccatgctccagcgcgggtcaggacccggcccggcctggcagaggctcgcagggcgcagctcggggcggggcccagcaaagcaaccacgccccctcaggaatggagtttttaagggcggaacttcctgttgcgagtagcccctctacctccggaagagacgagtgcggtaacaccgttcacagagctagccggacgtcctccgactcaagatatttgtcaaatattttcagaagatggctgatccttggcaggaatgcatggattatgcagtaactctagcaagacaagctggagaggtagtttgtgaagctataaaaaatgaaatgaatgttatgctgaaaagttctccagttgatttggtaactgctacggaccaaaaagttgaaaaaatgcttatctcttccataaaggaaaagtatccatctcacagtttcattggtgaagaatctgtggcagctggggaaaaaagtatcttaaccgacaaccccacatggatcattgaccctattgatggaacaactaactttgtacatagatttccttttgtagctgtttcaattggctttgctgtaaataaaaagatagaatttggagttgtgtacagttgtgtggaaggcaagatgtacactgccagaaaaggaaaaggtgccttttgtaatggtcaaaaactacaagtttcacaacaagaagatattaccaaatctctcttggtgactgagttgggctcttccagaacaccagagactgtgagaatggttctttctaatatggaaaagcttttttgcattcctgttcatgggatccggagtgttggaacagcagctgttaatatgtgccttgtggcaactggcggagcagatgcatattatgaaatgggaattcactgctgggatgttgcaggagctggcattattgttactgaagctggtggcgtgctaatggatgttacaggtggaccatttgatttgatgtcacgaagagtaattgctgcaaataatagaatattagcagaaaggatagctaaagaaattcaggttatacctttgcaacgagacgacgaagattaattaaggcagcctcatagtcaatcccagttgcttttccccagatttggtgactcatcaatggatatgtgttttggatgtatgatatgcttggtttaaattctctttgtccaggtcaaaaatttggaacttgtttcttattttactatgtctaggtttgcaagaattgacataatgtttgtttcactgatttaaaaaattttgcatgtaagaatgtactttaggaaacatacccaggaagtacagttgataaatataacatcaactgaaatagtcaattagcaattttgtgtttctaaatatctatggtcccctgaaattttgacttagtatataggtgcagagacacccacttagaaagttaactgtttggaaaaacatttctctttagtttcaaaaaccatatataattaaatttgtaaggatatactgagtaccctaggccaacttttttttctttgcagagaaccttttttgttttattcttcagtgttcatatagcacctggcccattacatatctaggcaactaaaaacaaacattgtaagaatgaatatttttaatgtagtaattcctagttacaatagatacataaagtaatgaactcagcattctgtacttttgcttcaggtttgaagtaaaaattatctagttaaattttttttatttcacgttaccatgccatttcacattaccataccatcagatagcatggcttattgtgggcatttctgcagtgaatacattttccaaaacagttaaattgtctgtttggatttgctttaaagtcttgtgtaagagagaagaaactatttctataataaaaagcactctcatcagatatctgacataattagatacaatataacattttactaagttcagtattcatgttttaaaggtgtttatactgatttgattgtgctggcaaatatactgtattgttaatattgaactgtttatttttctcttagtcttcttatttaattaacttcattgccgctggattctgttcagcctttaaaaatatttcttagtggtcattgctctgcagaactcaaaaagaaaattgtacttgttcatagacatttttaaagggttaatttattgttcagccttatcccttggcacgtaaacagactactagacttattgtaggttcgtttgagctttgtgttgtaaaattaaaaatgcttctgtaaagttttcaaggtagggagtgattttattattgtgtatatctaatatattaagtatgtgtgatactaaggtttgactgctataattatttgtactgttgatcacatgtacttaaaacatctgatactgtattctaagacaggttgtttttgcaattaaatttattttaataagacgatcatgaataaaactt

SEQ ID NO: 56253 - DNA, 1106 bp, Artificial Sequence
  derived and/or modified sequence
gagtgcggtaacaccgttcacagagctagccggacgtcctccgactcaagatatttgtcaaatattttcagaagatggctgatccttggcaggaatgcatggattatgcagtaactctagcaagacaagctggagaggtagtttgtgaagctataaaaaatgaaatgaatgttatgctgaaaagttctccagttgatttggtaactgctacggaccaaaaagttgaaaaaatgcttatctcttccataaaggaaaagtatccatctcacagtttcattggtgaagaatctgtggcagctggggaaaaaagtatcttaaccgacaaccccacatggatcattgaccctattgatggaacaactaactttgtacatagatttccttttgtagctgtttcaattggctttgctgtaaataaaaagatagaatttggagttgtgtacagttgtgtggaaggcaagatgtacactgccagaaaaggaaaaggtgccttttgtaatggtcaaaaactacaagtttcacaacaagaaggatccggagtgttggaacagcagctgttaatatgtgccttgtggcaactggcggagcagatgcatattatgaaatgggaattcactgctgggatgttgcaggagctggcattattgttactgaagctggtggcgtgctaatggatgttacaggtggaccatttgatttgatgtcacgaagagtaattgctgcaaataatagaatattagcagaaaggatagctaaagaaattcaggttatacctttgcaacgagacgacgaagattaattaaggcagcctcatagtcaatcccagttgcttttccccagatttggtgactcatcaatggatatgtgttttggatgtatgatatgcttggtttaaattctctttgtccaggtcaaaaatttggaacttgtttcttattttactatgtctaggtttgcaagaattgacataatgtttgtttcactgatttaaaaaattttgcatgtaagaatgtactttaggaaacatacccaggaagtacagttgataaatataacatcaactgaaatagtcaattagcaattttgtgtttctaaatatctatggt

SEQ ID NO: 56254 - DNA, 1180 bp, Artificial Sequence
  derived and/or modified sequence
cacagagctagccggacgtcctccgactcaagctcctagaaacttggtgcatccccaggcccaggtagtcactctaagtgatggggcagcgcccaggtcctgtgctgcccgcagtcgcggtgctgggacaggtggcaaaaaggaaggtggcctggctcctacgctggaaggctgtgaccaggacagaaacagcaggaaacagttcaggtgtttatggctttgggaaaatgaaaatatttgtcaaatattttcagaagatggctgatccttggcaggaatgcatggattatgcagtaactctagcaagacaagctggagaggtagtttgtgaagctataaaaaatgaaatgaatgttatgctgaaaagttctccagttgatttggtaactgctacggaccaaaaagttgaaaaaatgcttatctcttccataaaggaaaagtatccatctcacagtttcattggtgaagaatctgtggcagctggggaaaaaagtatcttaaccgacaaccccacatggatcattgaccctattgatggaacaactaactttgtacatagatttccttttgtagctgtttcaattggctttgctgtaaataaaaagatagaatttggagttgtgtacagttgtgtggaaggcaagatgtacactgccagaaaaggaaaaggtgccttttgtaatggtcaaaaactacaagtttcacaacaagaagatattaccaaatctctcttggtgactgagttgggctcttccagaacaccagagactgtgagaatggttctttctaatatggaaaagcttttttgcattcctgttcatgggatccggagtgttggaacagcagctgttaatatgtgccttgtggcaactggcggagcagatgcatattatgaaatgggaattcactgctgggatgttgcaggagctggcattattgttactgaagctggtggcgtgctaatggatgttacaggtggaccatttgatttgatgtcacgaagagtaattgctgcaaataatagaatattagcagaaaggatagctaaagaaattcaggttatacctttgcaacgagacgacgaagattaattaaggcagcctcatagtcaatcccagttgcttttccccagatttggtgactcatcaatggatatgtgttttggatgtatgatatgctt

SEQ ID NO: 56255 - DNA, 543 bp, Artificial Sequence
  derived and/or modified sequence
ggaagagacgagtgcggtaacaccgttcacagagctagccggacgtcctccgactcaagatatttgtcaaatattttcagaagatggctgatccttggcaggaatgcatggattatgcagtaactctagcaagacaagctggagaggtagtttgtgaagctataaaaaatgaaatgaatgttatgctgaaaagttctccagttgatttggtaactgctacggaccaaaaagttgaaaaaatgcttatctcttccataaaggaaaagtatccatctcacagatttccttttgtagctgtttcaattggctttgctgtaaataaaaagatagaatttggagttgtgtacagttgtgtggaaggcaagatgtacactgccagaaaaggaaaaggtgccttttgtaatggtcaaaaactacaagtttcacaacaagaagatattaccaaatctctcttggtgactgagttgggctcttccagaacaccagagactgtgagaatggttctttctaatatggaaaagcttttttgcattcctgttcatg

SEQ ID NO: 56256 - DNA, 770 bp, Artificial Sequence
  derived and/or modified sequence
gtagcggttcgctcacgcgacctcacttaacctctgtggcggcttctgtggaataattgcccctttttatgtccccaactccgaaaagctcctagaaacttggtgcatccccaggcccaggtagtcactctaagtgatggggcagcgcccaggtcctgtgctgcccgcagtcgcggtgctgggacaggtggcaaaaaggaaggtggcctggctcctacgctggaaggctgtgaccaggacagaaacagcaggaaacagttcaggtgtttatggctttgggaaaatgaaaatatttgtcaaatattttcagaagatggctgatccttggcaggaatgcatggattatgcagtaactctagcaagacaagctggagaggtagtttgtgaagctataaaaaatgaaatgaatgttatgctgaaaagttctccagttgatttggtaactgctacggaccaaaaagttgaaaaaatgcttatctcttccataaaggaaaagtatccatctcacagtttcattggtgaagaatctgtggcagctggggaaaaaagtatcttaaccgacaaccccacatggatcattgaccctattgatggaacaactaactttgtacatagatttccttttgtagctgtttcaattggctttgctgtaaataaaaagatagaatttggagttgtgtacagttgtgtggaaggcaagatgtacactgccagaaaaggaaaaggtgccttttgtaatggtcaaaaactacaagtttcacaacaagaag

SEQ ID NO: 56257 - DNA, 1011 bp, Artificial Sequence
  derived and/or modified sequence
atgggccagaggcctggccctgtgctgcctgctgtggccgtgctgggccaggtggccaagaggaaggtggcctggctgctgcgctggaaggctgtgaccaggacagaaacagctggcaacagcagcggcgtgtatggctttgggaagatgaagatctttgtgaagtacttccagaagatggctgacccctggcaggagtgcatggactatgctgtgaccctggcccggcaggccggggaggtggtgtgtgaggccatcaagaatgagatgaatgtgatgctgaagagcagccctgtggacctggtgacagccacagaccagaaggtggagaagatgctgatcagcagcatcaaggagaagtaccccagccacagcttcatcggggaggagagcgtggccgccggggagaagagcatcctgacagacaaccccacctggatcatcgaccccattgatggcaccaccaactttgtgcaccgcttcccctttgtggccgtgtccatcggctttgctgtgaacaagaagattgaatttggagtggtgtacagctgtgtggagggcaagatgtacacagccaggaagggcaagggggccttctgcaatggccagaagctgcaggtgtcccagcaggaggacatcaccaagagcctgctggtgacagagctgggcagcagcaggaccccagagaccgtgaggatggtgctgagcaacatggagaagctgttctgcatccctgtgcacggcatccgctctgtgggcacagctgctgtgaacatgtgcctggtggccaccggcggcgcagatgcctactatgagatgggcatccactgctgggatgtggccggggccggcatcatcgtgacagaggccggcggcgtgctgatggatgtgactggaggcccctttgacctgatgagcagaagagtgattgctgccaacaaccgcatcctggccgagagaattgccaaggagatccaggtgatccccctgcagagagatgatgaagattag

SEQ ID NO: 56258 - DNA, 636 bp, Artificial Sequence
  derived and/or modified sequence
atgggccagaggcctggccctgtgctgcctgctgtggccgtgctgggccaggtggccaagaggaaggtggcctggctgctgcgctggaaggctgtgaccaggacagaaacagctggcaacagcagcggcgtgtatggctttgggaagatgaagatctttgtgaagtacttccagaagatggctgacccctggcaggagtgcatggactatgctgtgaccctggcccggcaggccggggaggtggtgtgtgaggccatcaagaatgagatgaatgtgatgctgaagagcagccctgtggacctggtgacagccacagaccagaaggtggagaagatgctgatcagcagcatcaaggagaagtaccccagccacagcttcatcggggaggagagcgtggccgccggggagaagagcatcctgacagacaaccccacctggatcatcgaccccattgatggcaccaccaactttgtgcaccgcttcccctttgtggccgtgtccatcggctttgctgtgaacaagaagattgaatttggagtggtgtacagctgtgtggagggcaagatgtacacagccaggaagggcaagggggccttctgcaatggccagaagctgcaggtgtcccagcaggagtag

SEQ ID NO: 56259 - DNA, 1011 bp, Artificial Sequence
  derived and/or modified sequence
atgggccagcggcccggccccgtgctgcccgccgtggccgtgctgggacaggtggccaagcgaaaagtggcttggctattgcgctggaaagctgtgacccgcacagagacagcagggaactcctctggcgtatatggttttggaaaaatgaagatttttgttaagtacttccagaaaatggctgacccttggcaagaatgcatggactatgcggttacactggccaggcaggcaggcgaagtggtatgcgaagccattaagaacgaaatgaatgtgatgctgaaaagcagcccagtggatctcgttacagccactgaccagaaagtggaaaaaatgttgatctcctcaataaaggaaaaatatccttcccacagctttatcggagaggagagtgtggctgccggagagaaatccatccttaccgacaaccccacttggataatcgacccgattgacggtactaccaattttgtgcatcgcttcccattcgtcgcggtatcaatagggttcgccgtcaacaaaaagattgagttcggtgtggtttattcatgcgtggaagggaaaatgtatactgcccgcaaaggtaagggcgcattttgcaacggccagaagctgcaagtgtcccaacaggaagacataacaaaaagtctgctcgttactgaattggggtctagccggacccccgagaccgtccggatggtgctgagcaatatggaaaaactcttctgtattcctgttcatgggattaggtctgtggggactgcagcagtaaatatgtgcctggtggctacaggaggtgcagacgcctattacgaaatgggaatccattgttgggatgttgccggggctggtatcattgttactgaagccggcggcgtgctaatggacgtgacagggggccccttcgatctcatgagcaggagggtgatcgcagccaataacagaatacttgccgagcgaatagccaaggagattcaggtcattcccctgcaacgggatgatgaggactag

SEQ ID NO: 56260 - DNA, 636 bp, Artificial Sequence
  derived and/or modified sequence
atgggccagcggcccggccccgtgctgcccgccgtggccgtgctgggccaagtggcaaagcggaaggtggcgtggttgctgcgttggaaggcagtgactcgtacagagacagccggaaactcctctggcgtatatgggttcggtaaaatgaaaatctttgttaaatacttccagaagatggccgacccttggcaggaatgcatggactatgcagttactcttgcacgccaggcgggagaggttgtctgcgaggctattaaaaacgaaatgaatgtgatgttaaagagctcccccgttgacctggtgacggcaaccgaccagaaggtggaaaagatgctcatcagcagtatcaaagagaaatatccttctcattcctttatcggagaagagagtgtggctgccggggagaaatccatcctcacagacaaccccacatggattatcgatccaatcgacgggactactaacttcgtgcataggtttccctttgtggcagtttctatcggattcgctgtgaataaaaagatagaatttggagtcgtgtatagttgcgtggagggcaagatgtacacagcaaggaaagggaagggcgctttctgcaatgggcaaaaactgcaggtgtcccagcaagaatag

SEQ ID NO: 56261 - DNA, 1011 bp, Artificial Sequence
  derived and/or modified sequence
atgggtcagagaccagggccagtgctgcccgctgtcgcagtattagggcaagttgcaaagcggaaagtcgcctggttgcttcggtggaaagccgtaaccagaaccgaaaccgccggtaattccagcggcgtatacggctttgggaaaatgaaaatctttgtcaaatactttcagaagatggccgacccctggcaggagtgtatggactacgctgttacactggctagacaggccggagaggtcgtatgcgaggccataaaaaacgagatgaacgtgatgctgaaaagcagccccgtggacctcgtcactgccacagaccagaaggtggagaaaatgctcatcagctccattaaagaaaaatacccatcccacagcttcattggagaagagtccgtggctgctggagagaagtctatactcaccgataacccaacctggattatcgacccaatcgatggaactactaatttcgtgcatcggtttcctttcgtagccgtctccattgggttcgctgttaacaagaagatagaatttggggtggtctactcgtgcgtggaggggaagatgtataccgcacgtaagggtaagggcgcattctgtaatgggcagaaactgcaggtatcccagcaggaagatataacaaaaagcttgctggtaacagaactgggaagctcccgtactccagaaactgtcagaatggtccttagtaatatggaaaaactgttctgtatccctgtccatgggattcggagcgtgggaactgcggctgtgaacatgtgcttggttgccacgggtggcgcagatgcatattacgagatgggcattcactgctgggatgtggccggtgcaggaattatcgtgaccgaggcgggaggagtcctgatggacgtgacaggagggccttttgatctgatgtctaggagagtgattgcagccaataatcggatactggccgagcgaattgcgaaggaaattcaggttattcctttacaacgagacgacgaggactag

SEQ ID NO: 56262 - DNA, 636 bp, Artificial Sequence
  derived and/or modified sequence
atggggcagcggccagggcctgttctccctgcagtggcagtgctggggcaggtggccaaaagaaaggtcgcctggctgcttcggtggaaggctgtaacgcggaccgagacagcagggaatagcagcggtgtatacggtttcggcaagatgaagatttttgtgaagtacttccaaaagatggcagacccctggcaagagtgtatggactatgccgtgacactcgccagacaggcgggagaagtcgtctgcgaggctattaaaaatgaaatgaatgttatgctgaagtcatcacccgtagatctagtaaccgcaacggaccagaaagtggagaagatgctgattagcagcatcaaggaaaaatacccaagtcactcttttattggcgaagaatcagttgctgccggtgagaagagcattctgacagataatcctacatggattattgaccccattgacggcaccaccaattttgtgcaccgctttccctttgtcgccgtaagcatcggcttcgcagtaaacaagaagatcgaatttggagttgtgtattcctgcgtcgaggggaagatgtatacagccagaaaaggaaaaggagccttttgtaatggtcagaagctccaggtgtcgcagcaagaatag

SEQ ID NO: 56263 - DNA, 1011 bp, Artificial Sequence
  derived and/or modified sequence
atgggccagagacccggccccgtgctgcccgccgtggccgtgctgggccaggtggccaagagaaaggtggcctggctgctgagatggaaggccgtgaccagaaccgagaccgccggcaacagcagcggcgtgtacggcttcggcaagatgaagatcttcgtgaagtacttccagaagatggccgacccctggcaggagtgcatggactacgccgtgaccctggccagacaggccggcgaggtggtgtgcgaggccatcaagaacgagatgaacgtgatgctgaagagcagccccgtggacctggtgaccgccaccgaccagaaggtggagaagatgctgatcagcagcatcaaggagaagtaccccagccacagcttcatcggcgaggagagcgtggccgccggcgagaagagcatcctgaccgacaaccccacctggatcatcgaccccatcgacggcaccaccaacttcgtgcacagattccccttcgtggccgtgagcatcggcttcgccgtgaacaagaagatcgagttcggcgtggtgtacagctgcgtggagggcaagatgtacaccgccagaaagggcaagggcgccttctgcaacggccagaagctgcaggtgagccagcaggaggacatcaccaagagcctgctggtgaccgagctgggcagcagcagaacccccgagaccgtgagaatggtgctgagcaacatggagaagctgttctgcatccccgtgcacggcatcagaagcgtgggcaccgccgccgtgaacatgtgcctggtggccaccggcggcgccgacgcctactacgagatgggcatccactgctgggacgtggccggcgccggcatcatcgtgaccgaggccggcggcgtgctgatggacgtgaccggcggccccttcgacctgatgagcagaagagtgatcgccgccaacaacagaatcctggccgagagaatcgccaaggagatccaggtgatccccctgcagagagacgacgaggactag

SEQ ID NO: 56264 - DNA, 636 bp, Artificial Sequence
  derived and/or modified sequence
atgggccagagacccggccccgtgctgcccgccgtggccgtgctgggccaggtggccaagagaaaggtggcctggctgctgagatggaaggccgtgaccagaaccgagaccgccggcaacagcagcggcgtgtacggcttcggcaagatgaagatcttcgtgaagtacttccagaagatggccgacccctggcaggagtgcatggactacgccgtgaccctggccagacaggccggcgaggtggtgtgcgaggccatcaagaacgagatgaacgtgatgctgaagagcagccccgtggacctggtgaccgccaccgaccagaaggtggagaagatgctgatcagcagcatcaaggagaagtaccccagccacagcttcatcggcgaggagagcgtggccgccggcgagaagagcatcctgaccgacaaccccacctggatcatcgaccccatcgacggcaccaccaacttcgtgcacagattccccttcgtggccgtgagcatcggcttcgccgtgaacaagaagatcgagttcggcgtggtgtacagctgcgtggagggcaagatgtacaccgccagaaagggcaagggcgccttctgcaacggccagaagctgcaggtgagccagcaggagtag

SEQ ID NO: 56265 - protein, 198 aa, Artificial Sequence
  derived and/or modified sequence
MADPWQECMDYAVTLARQAGEVVCEAIKNEMNVMLKSSPVDLVTATDQKVEKMLISSIKEKYPSHSFIGEESVAAGEKSILTDNPTWIIDPIDGTTNFVHRFPFVAVSIGFAVNKKIEFGVVYSCVEGKMYTARKGKGAFCNGQKLQVSQQEGSGVLEQQLLICALWQLAEQMHIMKWEFTAGMLQELALLLLKLVAC

SEQ ID NO: 56266 - DNA, 597 bp, Artificial Sequence
  derived and/or modified sequence
atggccgatccttggcaggaatgcatggattatgcagtgacactggcccgacaggctggcgaggtggtctgtgaagccataaaaaatgagatgaatgtgatgctcaagtcttcaccagtagatttggtgactgctactgatcagaaggtagagaagatgctgatctccagcatcaaggaaaagtatcctagccactcttttattggtgaggagagcgtcgcagccggcgagaaatctattctgacagacaatcctacctggattatcgaccctatagacggcacgactaactttgtgcataggttccctttcgtcgcagtgtccatcgggttcgccgttaacaagaaaattgaattcggcgtggtctactcctgtgtagaagggaagatgtacaccgcacgtaagggcaagggtgcattctgcaacgggcagaagctgcaggtctctcaacaagaagggtctggcgtactagagcagcaactgctcatctgcgcgttgtggcagttggcagagcagatgcacatcatgaagtgggagttcacagcagggatgttgcaggaactcgccctgcttctcctcaagttggtggcttgctag

SEQ ID NO: 56267 - DNA, 597 bp, Artificial Sequence
  derived and/or modified sequence
atggctgacccctggcaggagtgcatggactatgctgtgaccctggcccggcaggccggggaggtggtgtgtgaggccatcaagaatgagatgaatgtgatgctgaagagcagccctgtggacctggtgacagccacagaccagaaggtggagaagatgctgatcagcagcatcaaggagaagtaccccagccacagcttcatcggggaggagagcgtggccgccggggagaagagcatcctgacagacaaccccacctggatcatcgaccccattgatggcaccaccaactttgtgcaccgcttcccctttgtggccgtgtccattggatttgctgtgaacaagaagattgaatttggagtggtgtacagctgtgtggagggcaagatgtacacagccaggaaaggaaaaggagccttctgcaatggccagaagctgcaggtgtcccagcaggagggcagcggcgtgctggagcagcagctgctgatctgtgccctgtggcagctggccgagcagatgcacatcatgaagtgggagttcaccgctggcatgctgcaggagctggccctgctgctgctgaagctggtggcctgctag

SEQ ID NO: 56268 - DNA, 597 bp, Artificial Sequence
  derived and/or modified sequence
atggccgacccctggcaggagtgcatggactacgccgtgaccctggcacggcaggccggggaagtggtgtgcgaagccattaaaaacgagatgaatgtgatgctcaagtcatctcctgtcgacctggtcacagccaccgatcaaaaggtagaaaagatgctcatttcctctatcaaggagaagtacccgtctcactcatttatcggagaagaatccgtagccgcaggggaaaaatcaatcctaacagacaatcccacctggataattgacccaatagacggcactactaacttcgtccatagatttccattcgtggccgtttctattggcttcgcagtaaacaagaaaattgagtttggtgtagtctacagctgcgttgagggaaagatgtacacggcgcggaaggggaagggcgccttttgcaacggacaaaaactgcaggtgtctcagcaagaaggatccggtgtgctggagcaacagctattgatttgtgctctgtggcaattggccgaacaaatgcatatcatgaaatgggagtttaccgccggcatgttgcaggaacttgctctcctacttcttaagctggtggcttgctag

SEQ ID NO: 56269 - DNA, 597 bp, Artificial Sequence
  derived and/or modified sequence
atggctgacccttggcaggaatgcatggattatgccgtcaccttggccagacaggcaggcgaggtggtgtgtgaggccatcaaaaacgaaatgaacgtcatgctgaagtcttcacccgttgacttagttacggctacagaccagaaagtggagaagatgctgattagctctatcaaggaaaaatacccgagccacagctttattggcgaggagagcgtcgccgctggtgaaaaatccattttgacagataatcccacttggatcatagacccgattgacggaaccaccaactttgttcatcgcttccctttcgtggccgtgtctatcggatttgccgtgaataagaagattgagtttggcgtggtgtattcatgcgtcgagggaaagatgtacaccgcccgtaagggcaaaggcgcattctgcaacgggcagaaactccaggttagccagcaggaaggttccggcgtactggagcagcagttgctgatatgcgccctgtggcagctggcagagcagatgcatattatgaagtgggaattcacagccggtatgctgcaagagctcgccctcctcttactgaagttagttgcttgctag

SEQ ID NO: 56270 - DNA, 597 bp, Artificial Sequence
  derived and/or modified sequence
atggccgacccctggcaggagtgcatggactacgccgtgaccctggccagacaggccggcgaggtggtgtgcgaggccatcaagaacgagatgaacgtgatgctgaagagcagccccgtggacctggtgaccgccaccgaccagaaggtggagaagatgctgatcagcagcatcaaggagaagtaccccagccacagcttcatcggcgaggagagcgtggccgccggcgagaagagcatcctgaccgacaaccccacctggatcatcgaccccatcgacggcaccaccaacttcgtgcacagattccccttcgtggccgtgagcatcggcttcgccgtgaacaagaagatcgagttcggcgtggtgtacagctgcgtggagggcaagatgtacaccgccagaaagggcaagggcgccttctgcaacggccagaagctgcaggtgagccagcaggagggcagcggcgtgctggagcagcagctgctgatctgcgccctgtggcagctggccgagcagatgcacatcatgaagtgggagttcaccgccggcatgctgcaggagctggccctgctgctgctgaagctggtggcctgctag

SEQ ID NO: 56271 - protein, 831 aa, Artificial Sequence
  derived and/or modified sequence
MPLEMEPKMSKLAFGCQRSSTSDDDSGCALEEYAWVPPGLRPEQIQLYFACLPEEKVPYVNSPGEKHRIKQLLYQLPPHDNEVRYCQSLSEEEKKELQVFSAQRKKEALGRGTIKLLSRAVMHAVCEQCGLKINGGEVAVFASRAGPGVCWHPSCFVCFTCNELLVDLIYFYQDGKIHCGRHHAELLKPRCSACDEIIFADECTEAEGRHWHMKHFCCLECETVLGGQRYIMKDGRPFCCGCFESLYAEYCETCGEHIGVDHAQMTYDGQHWHATEACFSCAQCKASLLGCPFLPKQGQIYCSKTCSLGEDVHASDSSDSAFQSARSRDSRRSVRMGKSSRSADQCRQSLLLSPALNYKFPGLSGNADDTLSRKLDDLSLSRQGTSFASEEFWKGRVEQETPEDPEEWADHEDYMTQLLLKFGDKSLFQPQPNEMDIRASEHWISDNMVKSKTELKQNNQSLASKKYQSDMYWAQSQDGLGDSAYGSHPGPASSRRLQELELDHGASGYNHDETQWYEDSLECLSDLKPEQSVRDSMDSLALSNITGASVDGENKPRPSLYSLQNFEEMETEDCEKMSNMGTLNSSMLHRSAESLKSLSSELCPEKILPEEKPVHLPVLRRSKSQSRPQQVKFSDDVIDNGNYDIEIRQPPMSERTRRRVYNFEERGSRSHHHRRRRSRKSRSDNALNLVTERKYSPKDRLRLYTPDNYEKFIQNKSAREIQAYIQNADLYGQYAHATSDYGLQNPGMNRFLGLYGEDDDSWCSSSSSSSDSEEEGYFLGQPIPQPRPQRFAYYTDDLSSPPSALPTPQFGQRTTKSKKKKGHKGKNCIIS

SEQ ID NO: 56272 - protein, 110 aa, Artificial Sequence
  derived and/or modified sequence
MPLEMEPKMSKLAFGCQRSSTSDDDSGCALEEYAWVPPGLRPEQIQLYFACLPEEKVPYVNSPGEKHRIKQLLYQLPPHDNEVRYCQSLSEEEKKELQVFSAQRKKEALG

SEQ ID NO: 56273 - protein, 119 aa, Artificial Sequence
  derived and/or modified sequence
MPLEMEPKMSKLAFGCQRSSTSDDDSGCALEEYAWVPPGLRPEQIQLYFACLPEEKVPYVNSPGEKHRIKQLLYQLPPHDNEVRYCQSLSEEEKKELQVFSAQRKKEALGRGTIKLLSR

SEQ ID NO: 56274 - protein, 159 aa, Artificial Sequence
  derived and/or modified sequence
MPLEMEPKMSKLAFGCQRSSTSDDDSGCALEEYAWVPPGLRPEQIQLYFACLPEEKVPYVNSPGEKHRIKQLLYQLPPHDNEVRYCQSLSEEEKKELQVFSAQRKKEALGRGTIKLLSRAVMHAVCEQCGLKINGGEVAVFASRAGPGVCWHPSCFVCF

SEQ ID NO: 56275 - DNA, 2496 bp, Artificial Sequence
  derived and/or modified sequence
atgcccctggagatggagcctaagatgagcaagctcgcctttggatgtcagcggtcctctacctccgacgacgacagtggctgtgctctggaagagtatgcctgggtacccccggggcttcggcccgagcagatccagctgtactttgcatgtttgcctgaggaaaaagttccctacgttaatagtccaggggagaagcatagaattaaacagttactgtatcagctgccccctcacgataatgaggtcaggtattgccagagcttgtccgaggaggaaaaaaaggaactgcaggtgttttctgctcagaggaaaaaggaagccctgggccgtggcactattaagcttctgagcagggcggtcatgcatgcggtatgcgagcagtgcggtcttaaaatcaatggaggggaggttgccgttttcgcgtcaagagctggccctggcgtctgctggcacccctcatgtttcgtttgtttcacttgtaacgaacttctggttgatctcatatacttctaccaggatggcaagatccattgtggccgccaccacgcggaattgcttaagccccggtgctccgcatgtgacgaaattatcttcgccgacgaatgcactgaggctgagggcagacactggcacatgaaacatttctgctgtctagagtgcgagacagtgttaggaggccagaggtatatcatgaaagatgggcgacctttttgctgtggctgtttcgaatctctgtatgcagagtactgtgaaacctgcggcgaacatattggagttgatcacgcccagatgacctatgatggccagcactggcatgccactgaggcctgcttctcctgcgcccagtgtaaggcttcactcttaggttgcccttttctccctaaacaagggcaaatctactgtagcaaaacctgctcccttggagaggacgttcacgcaagcgacagcagcgattccgcattccaaagcgcacgctcacgcgactctcggagatccgtaaggatgggcaagtcttccaggtccgcagaccagtgtcggcagagcctcctgctgtcacccgcccttaactataagtttccaggcctctcaggcaacgccgatgacacgctgtccaggaagttggacgacctttctttgtccagacaggggacctctttcgcctcagaggaattttggaaaggtcgggtggaacaggagactcccgaggaccctgaggaatgggccgatcacgaggactatatgacacagctgctcctaaaatttggcgacaagtccttgttccagcctcaaccgaacgaaatggacattcgggcttcagaacactggatctcagacaacatggttaagagtaagaccgagctgaaacagaacaaccagagcctggcatccaagaagtatcagtctgacatgtattgggcccagagccaggacggcctgggtgactctgcctacggatcgcaccctgggcccgcctcaagccggcgtctgcaggagcttgagttagaccacggcgcttctggatataaccatgatgaaacccaatggtatgaggactctctggaatgcctatccgatttaaaaccggaacagtcagtcagagacagtatggacagtctggctctgagcaacattactggcgctagtgttgatggggaaaacaaaccccgaccttccctttactctctgcaaaacttcgaggaaatggagactgaagattgtgagaagatgagcaatatggggaccctgaattcctcaatgctgcatcggagcgcagagtctctgaaaagcctaagttcggaactgtgtcccgagaaaatactgcccgaagagaaacctgtgcacttgcctgtgctacgcaggtctaagagccaatctagaccccagcaggtgaaatttagcgatgacgtgatagataacgggaactacgatatcgagatcaggcaaccaccaatgtccgagcggactcggcggcgcgtgtacaacttcgaagaacgcggtagcagaagccatcaccaccgaaggagacggtccaggaagagccgctcagataatgccctaaatctggtgacagagcgcaagtactcccccaaggatcggctcaggctgtatacgcccgacaactacgagaagtttatccagaataagtccgctagagaaattcaagcgtacatccagaatgcagatttgtatggccagtacgcccatgccacctccgactatggtcttcagaatccaggaatgaaccggtttcttggactctacggcgaagacgatgactcatggtgctcctcatcatccagcagctccgactcggaggaggagggatatttcttgggtcagccaatcccacagccaaggccccagcgcttcgcttactacaccgatgatctgtccagccctccttcagcccttcctaccccccaatttggtcagagaaccaccaagtccaagaagaagaaaggccataaaggaaaaaattgcattatctcctag

SEQ ID NO: 56276 - DNA, 2496 bp, Artificial Sequence
  derived and/or modified sequence
atgcctcttgagatggagccgaaaatgtctaagcttgccttcgggtgccagcggagctctacttccgatgatgactccggctgtgctctagaggaatatgcatgggttcccccggggttgcggcccgaacagatacagctgtattttgcctgcttaccagaggaaaaggtgccgtacgtgaactccccgggcgagaagcatcggataaagcagctgctgtatcagctacccccccacgacaatgaggtgcgatactgccagagtttatccgaggaggagaagaaagagttgcaggtgttttcagcacagcgaaagaaagaggccctgggccgcggtaccatcaagctcctgtcccgggcggtcatgcacgctgtgtgtgaacagtgcggtctcaaaatcaatggaggtgaggtcgcagtgttcgctagcagggccggcccgggggtatgttggcacccatcttgtttcgtgtgttttacgtgcaacgagctacttgtggatctgatctatttctatcaggatggaaaaatccactgcggccggcaccatgccgagctcctaaagcctcgctgctcagcttgcgacgagatcattttcgcggacgagtgtactgaggccgaaggccgccactggcacatgaagcatttttgctgcctggagtgcgaaaccgtcctaggtggacagagatatatcatgaaggatggccgacctttttgctgcggctgcttcgagtccctatacgccgagtactgcgagacttgcggtgagcacatcggtgtggaccacgctcagatgacttacgatggtcagcactggcacgctacagaggcctgtttctcttgcgctcagtgtaaagcttccctcctcggctgtccttttctgcctaagcagggacagatctattgcagtaaaacatgcagtctgggcgaagatgtgcacgcctccgatagcagcgacagcgcctttcagagcgcacgatcccgcgactcaaggcgaagcgttaggatgggcaagagcagtaggagcgctgaccagtgcaggcagtcactgttattgagcccagccttgaattataaatttcccggcctctctggaaacgctgatgacaccttaagcagaaagctagatgatctttctctcagccgtcagggcacctcttttgcctctgaggagttctggaaaggaagagtcgaacaagaaacgcccgaggacccagaggagtgggctgaccacgaagactatatgacccagttgcttcttaaattcggagacaaaagcttgttccagcctcaacctaatgagatggatattagggctagtgagcactggatcagcgataatatggtaaagtccaaaaccgaactaaagcagaacaaccagtccctggccagcaagaagtaccagagcgacatgtactgggctcagagccaagatggtttgggagattccgcatacgggtcccatccgggcccagcatcaagccgaaggctacaagaactggaactggatcatggagccagcggttataaccatgacgaaacgcagtggtacgaggactcactcgaatgcctcagcgacttaaagccggaacagtcagtaagggattccatggactctctggcactgagcaatatcaccggggcctccgtggacggcgaaaacaagccccggccttccttatactcgctccaaaatttcgaggagatggaaacggaggactgtgagaaaatgtctaacatgggaactcttaattccagtatgctgcacaggtctgcagagagcttgaagtctctgtcaagcgagttatgtcctgagaagatcctgcctgaggaaaaacccgttcacctgcccgtcttgagacggtcaaaatcgcagtcccgtccacaacaggtaaaattcagtgacgacgtgattgacaatggtaattatgacattgaaatccgtcagcccccaatgagcgagaggacacgcagaagagtatataacttcgaggagagaggaagcaggtctcatcatcataggcgccgacggtcaagaaaatctagaagcgataacgcgctgaatcttgtcacggagcgcaagtatagtccgaaagatcgcctgcgattatatactccggacaattacgaaaagtttattcaaaataaatcggcacgcgagatccaggcttacatccagaacgcagatctctatggccagtacgcccacgctacaagtgactacggtctgcagaatcccgggatgaaccggttcttggggctgtacggagaagacgatgactcatggtgttcatccagctccagttcaagtgattcagaggaagaagggtacttcctgggacagcctatccctcagccccgacctcagcggttcgcttattacactgacgacctttcaagcccgcctagcgccctgcctaccccacaatttggacaacggactaccaagtctaagaagaagaaagggcacaaaggaaaaaattgtatcatatcttag

SEQ ID NO: 56277 - DNA, 2496 bp, Artificial Sequence
  derived and/or modified sequence
atgcctttggaaatggagcccaaaatgagtaagttagcttttgggtgtcaacgctccagtacatcagacgacgactcaggatgcgctcttgaagagtatgcatgggtgccgccagggctccgcccggaacagattcagctgtacttcgcttgcctccccgaggagaaagtcccttacgtcaattcaccgggggaaaagcaccgaattaaacagctgctgtaccagctcccgccccacgacaacgaagttcgatattgtcaatccttatcggaggaagagaagaaggagctgcaggtgttttcggcccagagaaagaaggaggctctcggccgcggcaccataaagttactatctagagctgtaatgcacgctgtttgtgagcaatgcggtttaaagatcaatggcggagaggtagcggtgttcgcctccagagcaggacccggagtctgctggcacccgagctgtttcgtctgtttcacttgtaatgaactcctcgtggacctgatttacttttaccaggatggcaaaattcactgcggccgtcaccacgctgagctcctcaaaccaaggtgttctgcctgcgacgagatcatcttcgcagacgaatgcaccgaggctgagggtcgacattggcacatgaaacacttctgctgcctagaatgtgagaccgttttgggcgggcagcgctatatcatgaaggatgggaggccattctgttgcgggtgtttcgaatctctttatgcagaatattgtgagacctgcggcgagcatatcggagtagaccatgctcagatgacgtacgacggacagcactggcacgccactgaagcgtgttttagttgtgcgcagtgtaaagcttcactgttgggctgtcccttcctccccaaacagggtcagatctactgctcaaaaacttgctccctcggggaagatgtgcacgcctccgatagcagcgacagcgccttccagtcagcccgatcccgcgactctcggagatctgtgaggatggggaaatccagccgcagcgccgaccagtgtcgccagagtctgctgctgagcccagcactcaactataagttcccgggcctgagcgggaacgcggatgacacgctgtcccgaaaactcgacgacttaagcttatccaggcagggcaccagcttcgccagcgaggagttttggaaaggcagagtagaacaggagacccccgaagatcctgaggagtgggctgaccatgaagattacatgactcagctcctgctaaaatttggcgacaagtccctgtttcagccgcaacccaatgaaatggacattagagcatcagaacattggatctccgacaatatggtgaagagcaagacggaactcaagcaaaataatcaatctctggctagtaagaaataccagtccgatatgtactgggctcaatctcaggacggcctcggggatagtgcctacggcagccatcctggccccgcatctagtcggaggctccaggagcttgagttagatcatggggcgagtggttataaccacgacgaaacacagtggtatgaagactcgcttgaatgcttgtccgacttgaagccagagcagtctgtgagggatagcatggatagtctggcactgtcaaatatcacaggagcctcggtcgatggggaaaataaaccacggccaagtctatatagtttacaaaattttgaagaaatggagacggaggactgtgagaagatgagcaatatggggaccttaaatagctcgatgctgcacagatccgccgaatcactgaagtccttgtccagtgagctatgtccagaaaagatccttcccgaggaaaaaccagttcaccttcccgtcctgcgtaggtctaaatcgcagtcccgtccccagcaagtcaagttttctgatgacgtgatagacaacggtaattatgacatcgaaatcaggcagccacctatgagcgaacgaaccagaaggcgtgtgtacaactttgaagaaagggggagtagatcccaccaccaccgtcgccgacgatcaagaaaatccaggagcgataacgcccttaatttggtgaccgagaggaaatattccccaaaagataggctgaggctatacacccccgacaattacgagaaattcatccaaaataaatcagccagggagatccaggcctatatccaaaatgcagatctatatggccagtatgcccatgccacaagcgattacggactgcagaacccggggatgaaccggtttctgggtctgtatggggaggatgacgactcctggtgtagttcctcctcctccagctctgacagcgaggaagagggctacttccttggacagccaattccccagccacgcccccagagattcgcatattataccgatgacttgagctcaccacccagtgcattacctactcctcagttcggccagcgaacgactaagtctaagaaaaaaaaagggcacaaagggaagaattgtattatctcgtag

SEQ ID NO: 56278 - DNA, 333 bp, Artificial Sequence
  derived and/or modified sequence
atgcccctggaaatggagccaaagatgagcaaactggcctttggctgtcagcgctccagtacgtcggacgacgattctgggtgcgctctggaggaatacgcttgggtgcccccagggcttagacctgaacagattcagctctattttgcatgtctccccgaggagaaagttccctacgtcaacagcccaggagagaaacatagaattaagcaattgttgtaccagctccccccccacgacaatgaagtccgttattgtcagtcattgtctgaagaagaaaagaaggagcttcaagttttttccgctcagcgcaaaaaagaggctctcggctag

SEQ ID NO: 56279 - DNA, 2496 bp, Artificial Sequence
  derived and/or modified sequence
atgcccctcgaaatggagcctaagatgtccaagcttgccttcggttgccagcgcagttcaacaagtgatgatgactctggatgtgccctagaggagtacgcctgggtgcctcctggacttagaccagagcagatccagctgtactttgcatgcctgccggaagagaaagtgccttacgtgaattccccaggagaaaagcataggattaaacaattgctatatcagctcccaccccacgataatgaggtgcggtattgccagtctcttagcgaggaggaaaagaaggaacttcaggtgttctctgcgcagcgaaaaaaggaggcgctcggacgtggcactatcaaactgctgagcagagccgtgatgcatgccgtttgtgaacaatgtggactgaagattaatggcggcgaggtggccgtgtttgcatctcgcgccggtccaggagtctgttggcatcccagttgcttcgtgtgcttcacttgcaacgagctgctggtagatctgatatatttttaccaggacggcaaaatccactgcggtaggcatcacgccgagctactgaagccgcgatgctctgcttgcgatgagataatattcgctgacgagtgtaccgaagctgagggacggcattggcacatgaagcacttttgctgcctcgagtgtgagactgtgctgggcggccagagatatatcatgaaggacggccgtccattctgttgcggatgcttcgaaagtctttatgcagagtattgcgagacctgcggagaacacattggagtagaccacgcacaaatgacatacgacgggcagcactggcatgccaccgaggcttgctttagctgcgcccaatgtaaggcttcacttctggggtgtccttttctgcctaagcaagggcagatttactgctctaagacttgtagtctcggagaagacgtccatgcctcagactcgagtgactctgccttccagtcagcacgcagtagagattcaaggaggagtgttcggatgggcaaatcctcccggagcgcagaccagtgtcgccagtcactgttactctctccagctcttaattacaaatttcccgggttgtcaggaaacgctgacgacacattaagccgcaagctcgatgacctatccctctcgagacaaggaacctcctttgcctccgaggaattttggaagggacgagttgaacaggagacccctgaggacccggaggagtgggctgatcacgaggactacatgacccagttgctcctgaagttcggggataaatctttgtttcagccccaacccaatgaaatggatatccgggcatccgagcactggatttctgataatatggtgaaaagcaagaccgaactgaaacagaacaatcaaagccttgctagcaagaaataccagagtgacatgtactgggcacaatcccaggacggtctcggggattctgcatatggttcgcatccaggccccgcttcatccaggagattgcaggagctggaacttgaccatggggcctccgggtataatcatgatgagacgcagtggtatgaggactcattggagtgccttagtgacctaaagccagagcagagtgtaagagattccatggatagccttgccctcagcaatatcaccggcgctagtgtggatggcgagaataaacccagacccagtctctactcactgcagaattttgaggagatggagaccgaggactgcgagaaaatgtccaatatgggcactttgaactctagtatgttgcatcggagtgcagaatctttgaaatccctttcaagcgaactgtgccccgagaagatcttgcctgaagagaaaccagttcacctgccagttctcagacgctcaaaatcacaatctcgccctcagcaggtaaaatttagcgacgacgtgatagacaatggaaattatgatatcgagatcaggcagccaccaatgtcggaacggacccggaggcgagtatataactttgaggaacggggcagccgctcgcaccaccatagacgtaggcgctcaagaaagtcccggtccgacaacgcactcaatctggtgaccgaacgtaagtatagcccaaaggataggctgcggctgtacaccccagacaactatgaaaaattcatccagaataaatctgcgagagaaatccaggcttatatccaaaacgcagatctgtacgggcagtacgcccacgccacctcagattatgggctccaaaatcccggaatgaatcgctttctgggcctctacggcgaggatgatgattcctggtgtagctcatctagttcttcatcggatagcgaggaagaaggctacttcctgggacaacctattcctcagccgcgcccacaacgatttgcttattatacagatgacctctcttctcccccatctgctttaccaaccccacaattcggacagcgtaccactaagagtaagaaaaaaaaagggcacaaggggaaaaattgcattatcagttag

SEQ ID NO: 56280 - DNA, 360 bp, Artificial Sequence
  derived and/or modified sequence
atgcccctcgagatggaacctaaaatgtctaagcttgcctttgggtgtcaacggtcttccacttcagacgacgattctggttgtgctctcgaggaatatgcttgggttccccctgggcttcgaccagagcagatccagctgtacttcgcctgtctgcctgaggaaaaagtgccatatgtgaattcccccggagagaagcacagaattaagcaactgctctaccagctcccccctcacgataatgaggttcgttactgccagtccctgagcgaggaagaaaagaaggaactccaggtgttttcagcacagcgcaagaaggaggctctaggtcgaggaaccattaagctactgagtaggtag

SEQ ID NO: 56281 - DNA, 480 bp, Artificial Sequence
  derived and/or modified sequence
atgcccctggaaatggaaccaaaaatgagcaaactggccttcggttgtcagcgaagctcgaccagtgacgacgatagtggctgcgcccttgaggagtacgcttgggtccctcccggccttaggcctgagcaaattcagttatactttgcctgcctgcccgaggagaaggtgccgtacgtgaactctcccggagagaaacacaggatcaagcagctcctgtaccaactgccaccacacgacaatgaggtaagatactgtcagtccctgagtgaggaagagaagaaggaactccaagtgttttccgcccagcggaaaaaagaagctctcggccgggggaccatcaaactactatctagagctgtcatgcacgccgtttgcgagcaatgcggtctaaagatcaatggcggggaagtggctgtgtttgcgagtcgagccggtccgggcgtgtgctggcatccttcttgcttcgtctgtttctag

SEQ ID NO: 56282 - DNA, 2496 bp, Artificial Sequence
  derived and/or modified sequence
atgcccctagagatggaacccaagatgtccaagttagcattcggctgtcagcggagctctacctcagatgatgacagcgggtgcgccttggaggaatacgcctgggtgccccctgggctgagaccagagcagatacagttatacttcgcatgcctgccagaggagaaagtgccctacgttaactccccaggcgagaaacataggatcaagcagttgctttatcaacttccgccccacgataatgaggtccgatactgtcagagcctttccgaggaagaaaaaaaggaactccaggtgttttcggcccagcggaaaaaagaagctctgggtagaggtactattaaactgttgtctcgagctgttatgcacgccgtatgtgagcagtgcgggctgaagattaatgggggtgaggttgctgttttcgcttcgcgggccggcccaggggtctgctggcaccccagctgtttcgtttgcttcacatgcaacgagctgctggtcgacctgatctatttttaccaggacgggaagatccactgtgggagacaccatgctgagctcctgaagcccaggtgttccgcttgtgacgaaatcatttttgctgatgaatgcactgaagccgagggtcgacattggcatatgaagcatttttgttgcctcgaatgtgagaccgtcctgggcggacagaggtacatcatgaaggatgggagacctttttgctgcggctgctttgagagcctgtacgccgaatactgcgagacttgcggagaacacattggagtcgatcatgcacagatgacctatgatgggcagcattggcacgccaccgaagcctgcttctcctgcgcccagtgtaaagcctctctgctgggatgccccttcttaccaaagcagggacagatctattgctctaagacttgttcacttggagaagatgtgcacgcgagcgattcaagcgactccgcattccagtccgcccgcagcagagacagccgaaggtcagttcgtatgggcaaaagctctaggtcagcagaccaatgtcgccagtcacttctgttgagtccagcactaaattacaagtttccgggcctttccggcaatgccgatgacaccctttcccgaaagctcgacgatctgtcactgagccggcaagggactagttttgccagcgaggaattttggaaaggacgagtcgaacaagagacaccggaagatcccgaggaatgggcggatcatgaagactacatgacccagctcctcctcaaatttggggacaaatccttgttccagcctcagccaaatgaaatggacataagagctagtgaacactggatcagtgacaacatggttaagagcaagaccgagctgaagcagaacaaccagtccctcgcatccaagaagtaccagagcgatatgtattgggcccaatctcaagacggattgggggactccgcatatggaagtcacccaggtcctgcaagctcccgaagactgcaggagctggagctggatcacggggcttccgggtacaaccacgacgagacacagtggtatgaggacagtctcgagtgcttgagcgacctgaagcccgaacagagcgtgcgggactctatggattcactagccctatccaatatcaccggcgctagcgtagacggcgagaacaagccccgcccgtccttgtactcgttgcaaaactttgaagagatggaaactgaagattgtgaaaaaatgtcaaacatgggcacactgaactcctccatgctgcacaggtcagccgagtccttgaaatcacttagctctgaattatgccccgaaaagatcctgcctgaggaaaaaccagttcaccttcctgtcctgcgtagatccaagagccagagcagacctcagcaggtaaaatttagcgatgatgtcatcgataacgggaactatgacatcgagattcgtcagccacctatgagcgaacgcactaggagaagagtgtataatttcgaggaacgggggtctaggagtcatcaccataggcgccggagatcccggaagagccgttccgacaacgccctaaacttggtgacagaaagaaagtatagtccaaaggaccgcctgcgactctacacccctgacaattatgaaaaattcatacaaaataagtccgcccgcgagatacaggcttacatccagaatgccgacttatacggccagtacgcgcatgccacctctgattatggacttcagaacccagggatgaacaggttcctgggactttacggcgaggacgatgattcctggtgcagttcatctagttcaagctcagactcagaggaagaaggatacttcctcggccagcccatcccacaaccccggccccagcggttcgcttattacaccgacgacctgtccagccctccttctgctttgccaactccccaattcgggcaacggacgacgaagtctaagaagaaaaaaggccacaagggaaaaaactgtattatcagctag

SEQ ID NO: 56283 - DNA, 2496 bp, Artificial Sequence
  derived and/or modified sequence
atgcccctggagatggagcccaagatgagcaagctggccttcggctgccagaggagcagcaccagtgatgatgacagcggctgtgccctggaggagtatgcctgggtgcccccaggcctgcggcctgagcagatccagctgtactttgcctgcctgcctgaggagaaggtgccctacgtgaacagccctggagagaagcaccgcatcaagcagctgctgtaccagctgccccctcatgacaatgaggtgcgctactgccagagcctgtctgaggaggagaagaaggagctgcaggtgttttctgcccagaggaagaaggaggccctgggccggggcaccatcaagctgctgagcagagctgtgatgcatgctgtgtgtgagcagtgtggcctgaagatcaatggaggagaggtggccgtgtttgccagcagagctggccctggggtgtgctggcaccccagctgctttgtgtgcttcacctgcaatgagctgctggtggacctgatctacttctaccaggacggcaagatccactgcggccgccaccacgccgagctgctgaagccccgctgcagcgcctgtgatgagatcatctttgctgatgagtgcacagaggccgagggccgccactggcacatgaagcacttctgctgcctggagtgtgaaacagtgctgggcggccagcgctacatcatgaaggatggccggcccttctgctgcggctgctttgagagcctgtatgcagagtactgtgagacctgtggggagcacatcggcgtggaccacgcccagatgacctatgatggccagcactggcacgccacagaggcctgcttcagctgtgcccagtgcaaggccagcctgctgggctgccccttcctgcccaagcagggccagatctactgcagcaagacctgcagcctgggggaggatgtgcacgccagtgacagcagtgacagcgccttccagagcgcccggagccgggacagcagaagatctgtgaggatgggcaagagcagccgctctgctgaccagtgccggcagagcctgctgctgagccctgccctgaactacaagtttcctggcctgtctggaaatgctgatgacaccctgagcaggaagctggatgacctgagcctgagccggcagggcaccagctttgccagcgaggagttctggaagggccgggtggagcaggagaccccagaagatcctgaggagtgggccgaccacgaggactacatgacccagctgctgctgaagtttggagacaagagcctcttccagccccagcccaatgagatggacatccgggccagcgagcactggatcagtgacaacatggtgaagagcaagacagagctgaagcagaacaaccagagcctggccagcaagaagtaccagagcgacatgtactgggcccagagccaggacggcctgggggacagcgcctacggcagccaccctggccctgccagcagccggcggctgcaggagctggagctggaccacggggccagcggctacaaccatgatgagacccagtggtatgaggacagcctggagtgcctgagtgacctgaagccagagcagagcgtgcgggacagcatggacagcctggccctgagcaacatcaccggggcctctgtggatggagagaacaagccccggcccagcctgtacagcctgcagaactttgaggagatggagacagaggactgtgagaagatgagcaacatgggcaccctgaacagctccatgctgcacaggtctgctgagagcctgaagagcctgagcagcgagctgtgcccagagaagatcctgcctgaggagaagcctgtgcacctgcctgtgctgcggcgcagcaagagccagagccggccccagcaggtgaagttcagtgatgatgtgattgacaatggaaattatgacatcgagatccggcagccccccatgtctgagaggacccggcggcgggtgtacaactttgaggagcggggcagccgcagccaccaccacagaagaagaagaagcaggaagagcagaagtgacaatgccctgaacctggtgacagagaggaagtacagccccaaggaccggctgcggctgtacaccccagacaactatgagaagttcatccagaacaagagcgcccgggagatccaggcctacatccagaatgctgacctgtatggccagtatgcccacgccaccagtgactatggcctgcagaaccctggcatgaaccgcttcctgggcctgtatggagaagatgatgacagctggtgcagcagcagcagcagcagcagtgacagcgaggaggagggctacttcctgggccagcccatcccccagccccggccccagagatttgcctactacacagatgacctgagcagccccccatctgccctgcccaccccccagtttggccagaggaccaccaagagcaagaagaagaagggccacaagggcaagaactgcatcatctcctag

SEQ ID NO: 56284 - DNA, 333 bp, Artificial Sequence
  derived and/or modified sequence
atgcccctggagatggagcccaagatgagcaagctggccttcggctgccagaggagcagcaccagtgatgatgacagcggctgtgccctggaggagtatgcctgggtgcccccaggcctgcggcctgagcagatccagctgtactttgcctgcctgcctgaggagaaggtgccctacgtgaacagccctggagagaagcaccgcatcaagcagctgctgtaccagctgccccctcatgacaatgaggtgcgctactgccagagcctgtctgaggaggagaagaaggagctgcaggtgttttctgcccagaggaagaaggaggccctgggctag

SEQ ID NO: 56285 - DNA, 360 bp, Artificial Sequence
  derived and/or modified sequence
atgcccctggagatggagcccaagatgagcaagctggccttcggctgccagaggagcagcaccagtgatgatgacagcggctgtgccctggaggagtatgcctgggtgcccccaggcctgcggcctgagcagatccagctgtactttgcctgcctgcctgaggagaaggtgccctacgtgaacagccctggagagaagcaccgcatcaagcagctgctgtaccagctgccccctcatgacaatgaggtgcgctactgccagagcctgtctgaggaggagaagaaggagctgcaggtgttttctgcccagaggaagaaggaggccctgggccggggcaccatcaagctgctgagcaggtag

SEQ ID NO: 56286 - DNA, 480 bp, Artificial Sequence
  derived and/or modified sequence
atgcccctggagatggagcccaagatgagcaagctggccttcggctgccagaggagcagcaccagtgatgatgacagcggctgtgccctggaggagtatgcctgggtgcccccaggcctgcggcctgagcagatccagctgtactttgcctgcctgcctgaggagaaggtgccctacgtgaacagccctggagagaagcaccgcatcaagcagctgctgtaccagctgccccctcatgacaatgaggtgcgctactgccagagcctgtctgaggaggagaagaaggagctgcaggtgttttctgcccagaggaagaaggaggccctgggccggggcaccatcaagctgctgagcagagctgtgatgcatgctgtgtgtgagcagtgtggcctgaagatcaatggaggagaggtggccgtgtttgccagcagagctggccctggggtgtgctggcaccccagctgctttgtgtgcttctag

SEQ ID NO: 56287 - DNA, 2496 bp, Artificial Sequence
  derived and/or modified sequence
atgcccctggagatggagcccaagatgagcaagctggccttcggctgccagaggagcagcaccagtgatgatgattccggttgtgcattggaggagtacgcgtgggtccccccagggttaaggcccgaacagatccagctgtacttcgcttgcctgcctgaggagaaggtcccttacgtgaatagccccggcgagaaacacagaataaaacagctgctataccagctcccaccgcacgacaatgaagtgagatattgccagtcgctgtccgaagaagagaaaaaggaactccaggttttctctgcacagcgcaagaaagaggctttggggcgcggtactatcaagctattgagcagagccgtgatgcacgccgtctgtgaacagtgtggattaaaaatcaatgggggtgaggtcgccgtgtttgcgtcacgggcgggccccggggtctgttggcacccttcttgcttcgtttgctttacgtgcaacgaactgctggtggatctgatctatttctatcaggatgggaaaatccactgcggtcgccaccatgccgagttgctgaagcctcggtgttctgcctgtgatgaaatcattttcgctgacgagtgcacagaggccgaaggcaggcactggcacatgaaacatttctgctgcttggaatgtgaaaccgtgctgggcggtcagagatatattatgaaagacgggaggccattttgctgtgggtgctttgagtccctctatgccgagtattgtgagacatgtggcgaacacatcggagtagaccacgcacagatgacttacgacgggcagcattggcatgcgaccgaggcttgcttctcgtgtgctcagtgcaaggcctccctcctaggttgccctttcctacctaaacagggtcagatttattgctccaagacctgctcactgggggaggatgtccatgccagtgactccagcgattcagcctttcagagtgcacgcagtcgtgattccagaagaagtgtgaggatgggtaagtcctcgcggtctgcagaccagtgccggcagtccttgctcctctcccctgctctaaactacaaatttcccgggctgagcggtaatgcagatgatacgctgagccgcaaactagacgatctcagtctctctcggcaggggactagcttcgcctcagaggaattctggaaggggcgggtcgagcaggaaacgccagaggacccagaagaatgggccgaccatgaagactacatgacacagttattgctcaaatttggagacaagtccctcttccagccccagccaaacgaaatggatataagggcctctgaacattggatcagcgacaacatggttaagagcaagaccgagcttaagcagaacaaccaatcattggccagcaaaaaataccaaagcgatatgtattgggctcagagccaggacggtctgggagactctgcctacggatctcaccctggaccagcgtccagcaggcgactgcaggaactggaactggatcacggcgctagtggctacaatcacgatgaaacacagtggtatgaggacagtcttgagtgcttgagcgatctgaaacccgaacagagtgtgagagacagcatggactcattggctctcagtaatattaccggcgcctccgtcgatggggaaaacaagccgcggcctagcctgtattccctacagaatttcgaagagatggagaccgaggactgtgaaaaaatgtcgaatatgggcactctcaacagctccatgctccacagaagcgcagagagcctgaagtctctgtcaagtgaactgtgccctgagaaaatccttcccgaggaaaaaccagtccaccttccagtactcaggcggtccaaaagccagtcacgtccacagcaagtgaaattttcagatgacgtcattgataatggcaactacgacatagaaattaggcagcctccgatgagtgaaaggacgagacggcgcgtttacaattttgaggaacgggggagtcgatcgcaccaccacaggcgacgacgcagtagaaagtcaaggtccgataatgcactcaacctcgttacagagaggaagtactcacctaaggaccggctccgactgtatacaccggataactacgaaaagtttattcagaacaagtcagctagagagatccaggcttacattcagaacgctgacctttacggacagtatgcccacgccacctccgactacggactccagaaccctggaatgaatcgcttcttgggcctgtacggggaagatgatgatagttggtgtagtagtagcagcagttccagcgatagtgaagaagaggggtatttcctcgggcagccaattccccagccgcggccacaaaggttcgcgtactatactgatgacctgagctctcccccatccgccctccctactcctcagttcggccagagaacaacaaaaagcaagaagaagaagggacacaaaggaaaaaattgcatcatatcctag

SEQ ID NO: 56288 - DNA, 2496 bp, Artificial Sequence
  derived and/or modified sequence
atgcccctggagatggagcccaagatgagcaagctggccttcggctgccaacggtcaagtacaagtgacgatgacagcggctgcgcgctcgaggaatatgcttgggtgccgccagggctcagaccagaacagatccagctgtattttgcatgcctgcccgaggagaaagtcccttacgtgaatagccctggtgaaaagcacaggattaaacaactgctgtaccagctcccccctcatgacaacgaggttcgatattgccaatccctgagtgaggaggaaaaaaaagagctgcaggtgttctctgcacagaggaagaaggaagccctggggagaggaactatcaagctgctgtcaagagcggtcatgcacgctgtgtgtgagcagtgcgggttaaagattaatggtggcgaggtggccgtcttcgcaagtagagcaggccctggcgtgtgttggcacccgagctgttttgtttgcttcacttgcaacgagctcctggtcgatttgatctacttttaccaggatggcaagattcattgtggtcggcatcacgccgagttgctgaagcctcggtgtagcgcctgcgacgagatcatattcgccgacgagtgcactgaggctgaaggtcgccattggcatatgaaacacttctgctgcctggagtgtgagaccgtattgggcggacaacgatacattatgaaagacggccgccccttctgctgcggctgctttgagagtctatatgcggaatactgcgagacgtgcggagagcacattggggtggatcacgcacagatgacctatgatggccagcattggcatgccacggaggcctgcttctcatgtgctcagtgcaaggcgtccctcctgggatgtccctttctacccaagcaggggcagatttactgtagtaagacttgctccctaggagaggacgttcatgcatcagacagttccgactccgcctttcagagcgctagaagccgggactccagaaggagcgttaggatgggaaaaagtagtagatcagcagaccagtgcaggcagagtctgctgctgtctccagctttgaattataagttccccggactgtcgggtaatgcagatgatacactgtcaaggaagctagacgatctgagcctgtccaggcaggggaccagctttgcgtctgaggaattctggaagggccgagtcgaacaggaaaccccagaggatccagaggagtgggctgatcatgaggactatatgacacaactattgttgaaatttggcgacaagagcctctttcagccacaacccaacgaaatggatattcgagcttcggagcattggatcagcgacaacatggtaaagtctaagacagagttaaagcagaataatcagagtctggccagtaagaaatatcagtctgatatgtattgggctcaatcccaggacggtctaggggattcagcatatggttcccaccccgggcctgcgagctcccgccggctgcaagagttagaacttgaccatggtgcatccggttataatcacgatgagactcagtggtacgaggattcgctcgaatgtctttcggatctgaaacctgaacaatcggtgagagactctatggattccctggctctatctaacatcactggagcatccgtcgatggggaaaataaaccgcggccctcattgtatagcctgcagaactttgaggagatggagaccgaggactgcgagaagatgtcaaatatgggcaccctcaatagcagcatgcttcatcgatctgcagaatccctgaagtcactcagtagcgagttgtgtcccgagaaaattcttcctgaggagaaacccgtgcatttgcctgtgctgaggagaagcaaaagccagtcgcggccacaacaggttaaatttagtgatgatgttattgacaatggaaactacgatatagagatcaggcagccacccatgtccgagaggacaaggcggcgcgtgtataatttcgaggagagaggatctcgttctcaccatcatagacggaggcgaagcaggaagagccgctctgacaatgccttaaacctggtgactgagagaaaatatagtcctaaagacagacttcggctgtacacaccagataactatgagaaattcattcagaataagtccgcgcgcgagatacaggcatatatacagaatgctgatctttacggccagtacgcccacgccacctccgattatgggctgcagaaccccggtatgaaccgatttttgggattatacggggaagacgatgattcctggtgctccagtagttcttcctctagcgattctgaggaggagggctatttccttggccagccaattcctcaaccaagacctcaaaggtttgcctattacaccgacgacttgtccagtcccccgtccgccctccccacaccccagtttggccagcgtacaaccaaatctaagaagaaaaaggggcataaagggaaaaactgcatcatcagttag

SEQ ID NO: 56289 - DNA, 2496 bp, Artificial Sequence
  derived and/or modified sequence
atgcccctggagatggagcccaagatgagcaagctggccttcggctgtcaaaggtcatctacatcagacgatgactctggatgcgctctggaagagtatgcgtgggtacctcctggtttacggcccgagcagatccaactatacttcgcctgccttccggaagagaaggtgccctacgtcaactcccctggcgaaaagcatagaatcaaacaactgctatatcagttgccccctcatgataatgaagtaagatactgtcagtcgctctcagaagaagagaaaaaagaactgcaagttttttccgcacagagaaaaaaagaggctttggggcggggcaccatcaaactgctgtcccgggccgtgatgcatgccgtttgcgaacagtgtggcctcaaaatcaatggcggagaggtggccgtgtttgcttcaagagctggccctggtgtctgttggcatcccagctgttttgtgtgttttacatgtaacgaactgcttgtggacctcatttacttctatcaggacggaaagattcactgcggcaggcatcacgctgagctgttgaaacctcggtgcagtgcctgtgacgagatcatcttcgctgatgagtgtactgaggctgagggccgacactggcatatgaagcacttctgctgtcttgagtgtgaaacagtgttaggtggtcaacgttacatcatgaaagacggcagacctttctgctgcgggtgcttcgagtctctttacgccgaatattgtgagacatgcggcgagcatattggggttgaccacgcccagatgacctacgatggccagcattggcacgctacggaagcttgcttctcttgtgcgcagtgtaaagccagcttgctgggatgtcccttcctgccgaagcagggccagatttattgctccaaaacctgctcactgggcgaagatgtgcatgcatccgatagctctgactcagcctttcagtccgcacggagccgcgattccaggcgctcggtgcgcatgggaaagagctcccgctcagctgatcagtgccgtcagtctttgctactgtccccagccctcaactacaagttccccggactgagcggcaacgcagacgatacgttaagtagaaagttagatgacttatccctgtctaggcagggcacatcctttgcaagcgaggaattctggaaggggagagtggagcaggaaacccccgaggatccagaggaatgggctgatcacgaggactacatgacgcaattgctgctgaaatttggggacaagagtctgttccaaccacaacctaatgagatggacatacgggcatccgaacattggatcagcgacaacatggtgaagtcgaagacggaactcaaacagaataatcagtctttagcctccaagaaatatcagtctgatatgtattgggcgcagtcacaggatggacttggcgactccgcctatgggtcccatcccggcccggcgagttcccgtcgtctgcaggagctcgaacttgaccacggagcatccggctataatcatgatgaaacccagtggtacgaggatagtctggaatgtttgtctgacttgaaacctgagcagtccgtgcgcgattctatggactctctggcactctcaaatattaccggggcctctgtggatggcgagaataagcccaggcctagtctgtactctttgcagaacttcgaggaaatggagaccgaggactgcgaaaagatgagcaatatggggacccttaatagttccatgctgcaccgatccgccgagagcctgaagagcctgtcatccgagctgtgtccagagaaaatcctccccgaagagaaacctgtgcaccttcccgtgctcagacgttccaaatcacagagcagacctcaacaggtgaaattctcagatgacgtcattgacaacgggaactatgatatcgaaatacgtcagccacctatgtctgagcggaccaggcgtagagtatacaactttgaagagagggggtctcgctctcatcaccacaggcgacgccggtccaggaagtcccgctcagataacgccctgaatttggtcaccgagagaaagtacagtcccaaagatcgactcagactatatacaccagataattatgaaaagtttatccagaacaagtccgcgagagagattcaagcttatattcagaatgctgatctgtacgggcagtatgcgcatgctacctcggattacggcttgcagaacccaggaatgaacaggttcctggggctttatggcgaggacgatgatagttggtgctcttcttcctctagcagtagcgattccgaggaagagggttactttctcggacagcctatcccccaaccacggccccaaagattcgcatattacacagatgatttgtcgagccctccgtcagcattgcccacaccacagtttggccagcggaccactaagagtaaaaagaaaaagggacacaagggcaaaaactgtatcatttcatag

SEQ ID NO: 56290 - DNA, 333 bp, Artificial Sequence
  derived and/or modified sequence
atgcccctggagatggagcccaagatgagcaagctggccttcggctgtcagcggagcagtacaagcgacgacgatagtgggtgtgccttagaggagtatgcctgggttccacccggcctgcggcccgagcagatccaactgtattttgcttgcttgcctgaagagaaagtgccgtacgttaacagccccggagagaaacatcgaattaaacagctattatatcagctcccaccacatgataacgaagtgcgctactgtcaatctctgtcagaagaggagaaaaaagagttgcaagtttttagcgctcagcggaaaaaagaagcgctcggctag

SEQ ID NO: 56291 - DNA, 2496 bp, Artificial Sequence
  derived and/or modified sequence
atgcccctggagatggagcccaagatgagcaagctggccttcggctgtcagcgtagcagcacatcagacgacgactctggctgcgcactggaagagtatgcttgggtgccacctggtcttcggcctgagcagatccaactctatttcgcctgtttgccggaggaaaaggtgccctacgtgaattcaccgggagagaagcacaggatcaagcagctgctctaccaactgcctccccacgacaacgaagtcaggtactgccagtctttgtcggaggaagaaaagaaggagttgcaggtgttcagcgcccagagaaaaaaggaggctctgggacgcggtaccattaagctgctttcccgcgccgtgatgcacgccgtctgtgagcaatgtggactgaaaatcaacggtggagaggtagccgtgttcgcatctcgcgccggcccgggggtgtgttggcacccctcgtgcttcgtgtgttttacctgcaatgaactcctcgtcgatctgatctacttttaccaggatgggaagatccactgtggcaggcatcacgctgaactgttgaagcctaggtgttctgcctgtgacgaaatcatcttcgccgacgaatgcaccgaggccgaaggaagacattggcatatgaagcatttttgttgcctcgaatgtgaaaccgtgctgggggggcagcggtatattatgaaggacgggcgacctttttgttgtgggtgttttgaatccctttacgccgaatattgcgagacgtgtggtgaacacattggtgtggaccacgcccagatgacctacgatggacagcactggcacgctaccgaagcatgcttcagttgtgcccagtgtaaggcttccttactcgggtgcccctttttgcccaagcagggtcagatctattgctccaagacatgctccctcggcgaggacgtccacgcctcagacagtagtgactcagcatttcagtcagcccggtctagggacagccgtcgaagcgtgaggatgggcaaatcgagtcgaagtgccgatcagtgcaggcagtcgcttctcctctctccagcgttgaattacaaatttccagggctgagcgggaacgccgacgatacattgagtcggaagctcgacgacctgtccctcagtcgccagggcacttcatttgccagcgaggaattttggaagggccgggtcgaacaggaaactcccgaggatccagaggagtgggctgatcacgaagattacatgacccaattgctgcttaaatttggcgacaagtccctgtttcagccacagcctaatgagatggacatccgagcctccgagcattggatttctgataacatggttaaaagtaaaacggagctgaaacagaataaccagtcactggcatcaaagaaataccaatcagacatgtattgggcacagtcgcaggacggtctgggggacagcgcctatggttcccatccaggccctgcatcctcgaggcggctgcaggagttggaactggaccatggcgcttccggctataatcacgacgagacccaatggtatgaggactccctggagtgtcttagtgatttaaaacccgagcagagcgtgagagacagcatggatagcttagcgctgtctaacatcaccggcgcctcagtggatggagaaaacaagccccgtccctctctgtactccctgcagaacttcgaagaaatggagaccgaggattgcgagaaaatgagcaacatgggaacccttaattcttcaatgctccacaggtccgctgaatcactgaaatctctttcttccgagctctgtcctgaaaaaattctccctgaagagaagcccgtgcaccttcctgtcctgagacggtccaagtctcagagtagacctcagcaggttaagttctccgatgatgtgatcgacaacggaaactacgacattgaaatccggcaaccccctatgagtgagcgtacacggaggcgcgtgtacaactttgaagagcgcggaagccggtcacaccaccatcggagacgtaggtctcggaaatccaggagcgataacgctctcaacctggtgaccgagagaaaatactcccccaaagaccggttgcggctatacactcccgataactatgaaaagtttatacagaataaatctgcgagggaaattcaggcctacatccaaaacgcagacctgtacggccagtatgcacatgccacaagtgattacggcctgcagaacccaggcatgaataggttcctggggttatatggtgaagatgatgactcctggtgctcatcgtcctcctcttcatcagacagcgaggaggaaggttattttctggggcaaccaatcccgcagccccgtccacagcggttcgcatactacacagatgatctatcgtcccccccctctgccttgcccactcctcagtttggacaaagaaccaccaaatcgaaaaagaagaaaggccacaagggcaagaactgcatcattagctag

SEQ ID NO: 56292 - DNA, 360 bp, Artificial Sequence
  derived and/or modified sequence
atgcccctggagatggagcccaagatgagcaagctggccttcggctgccagcgctcctccacaagtgacgacgactccggctgtgctctagaggagtatgcctgggtccctccgggactgaggcccgagcagattcagctatactttgcttgtctccccgaggaaaaagtcccctacgtgaatagccccggagaaaaacatcgcatcaaacagttgctgtatcagctgcccccacacgacaatgaagtccgttattgccagtccttaagtgaagaggaaaaaaaagaactgcaggtcttctctgcacagcgaaagaaggaggccctgggccggggcaccattaagctgctgagcaggtag

SEQ ID NO: 56293 - DNA, 480 bp, Artificial Sequence
  derived and/or modified sequence
atgcccctggagatggagcccaagatgagcaagctggccttcggctgtcaacgaagttccacgagcgacgatgattccggttgtgctctggaggagtacgcctgggtaccccccgggctgcgtcccgaacaaattcagctctatttcgcctgtctccctgaagagaaggtaccttacgtcaactcgcctggcgagaagcaccgcatcaagcagctgctataccagctcccaccacacgacaacgaagtacgttactgccagagccttagcgaggaggagaaaaaggaactgcaagtattctccgcccaaagaaagaaggaagccctggggagaggaactatcaaacttctgagccgagctgttatgcatgcagtgtgtgagcagtgtgggctgaaaattaacggaggggaggtggccgtgttcgcctcccgagctggaccgggagtatgctggcatccttcttgttttgtgtgcttttag

SEQ ID NO: 56294 - DNA, 2496 bp, Artificial Sequence
  derived and/or modified sequence
atgcccctggagatggagcccaagatgagcaagctggccttcggctgccaacgttccagcacctctgacgatgactcagggtgcgcacttgaggagtacgcctgggtgcctcctggcctacggcccgagcagatccaattgtactttgcatgtctgcctgaggagaaggtgccctatgtcaattcccccggtgagaaacatcggatcaagcagctcctgtaccagctgcctccacacgacaacgaggtgagatactgccagagcctgtcagaggaggagaaaaaagagctgcaagtcttcagcgcccagcggaagaaagaagccttaggccgagggactataaaattactttctcgcgcagtcatgcatgccgtgtgtgagcagtgtggcctcaaaatcaatgggggcgaagttgccgtattcgcaagcagggctggacctggggtgtgctggcatccgtcttgttttgtgtgttttacttgtaatgaacttctggtggacctcatctacttctatcaggatggaaagatccactgcggaagacatcatgccgagctgctgaagcctcggtgctcagcctgtgatgagatcatttttgctgatgagtgcacagaggctgaagggcgtcactggcacatgaagcatttctgctgtctggaatgcgagaccgttcttggaggccaaaggtacataatgaaggacgggaggcccttttgttgtgggtgttttgagtcgctgtacgcggaatactgtgaaacttgtggcgaacacataggcgtcgatcacgcgcagatgacctatgatggccagcattggcatgccacagaggcctgtttttcatgcgcccagtgtaaagcatccctgctcggctgtccttttctccccaaacagggccagatatattgttccaagacctgttccctgggcgaagacgtccacgcatccgactcatccgactccgctttccagtcagccaggtctagagactcccggcggagcgtgcgcatgggaaagtcctcaagaagcgcggatcaatgtcggcagagtctcctgctgtctccggctctcaattataagttcccgggactgtctggaaacgcagacgacaccttaagtcgcaaactggatgatttgtctctgagtcgccagggtacttcctttgcttccgaggaattctggaaggggcgggtggaacaagagacgcctgaggacccggaagagtgggcagaccacgaggattacatgacccagctgctgctcaagttcggcgacaagtcacttttccaaccacaaccgaacgaaatggacatcagggcatctgaacattggatcagtgataatatggtgaagagcaaaaccgagctcaaacagaataatcagagtctggcctccaagaaatatcaaagtgacatgtattgggctcagtcgcaggacggactgggcgacagcgcctacgggtctcaccctggaccggctagctctcgaaggctgcaggagctcgagttggaccatggagctagtggatacaaccatgacgaaactcaatggtacgaggacagcctcgaatgcctgagcgacttgaagcccgaacagtccgtgcgcgattctatggactcactcgctctgtccaatatcactggggctagtgtggatggcgagaacaaacctagaccttctctttactctctgcagaactttgaagaaatggaaaccgaggattgcgagaagatgagcaatatggggacactcaacagcagcatgctgcacagatctgccgagagtctgaagtccctcagctctgagctctgtccggaaaaaatactgcccgaggagaaacccgtccatttacctgtgttgagaaggtctaagagtcagtctagaccacagcaggttaagttcagtgacgatgtgattgataacggcaattacgatatagaaatccgccagccacccatgagcgagcgcacgagaagacgtgtttataactttgaggaaagggggagccgttcccatcatcaccgtagacggcgatcccgtaaatctcggagcgataacgccctaaacctcgtcacagagcgaaaatattcccccaaagatcggctgcgtttgtacacccctgataattatgagaagtttattcaaaacaagagcgcccgggagatacaagcttatattcagaacgcggatctgtacggccaatacgcacacgccacttccgactacggcctgcaaaatcctgggatgaacagatttctcggcctctatggggaggatgacgactcctggtgttcctcgagctccagcagtagcgatagcgaagaagaaggctactttctaggacagccaatcccccagcctcggcctcagaggtttgcctactatactgacgacctgtcctccccgcccagtgcgcttccaacaccgcagtttggacaacgcactactaagtccaaaaagaagaaaggacataaaggcaagaattgtattattagctag

SEQ ID NO: 56295 - DNA, 3315 bp, Artificial Sequence
  derived and/or modified sequence
catgccagcctcgcgcagcctgcgctgacttccccgagacgcgccgcggtcggcacggagactttctgggctctggatggttcgtgcgctgctcaccctcgcccacccctgacgccgcggaccgcagctcctcagccccgcagccccgcagcccagcagccccgcagcggcgccgaggacagtgcagccgagttgcgtctccctcgcgcgagcagccattgtttgatgtcctgtgactgagaaaccaggctttaaactttatgcctttggagatggagcccaagatgagcaaactggcctttggctgtcagagaagttccacatcagatgatgactctggctgtgcattggaggagtacgcctgggtccccccgggcctgagaccagagcagatccagctctattttgcttgcttaccagaggaaaaagttccttacgttaacagccccggagagaagcatcggattaaacagcttttgtaccagttaccaccacatgataatgaggtacggtattgccagtctttgagtgaagaggagaaaaaagagttgcaggtgttcagtgctcagcggaagaaagaagcactgggaagaggaacaattaagcttctgtccagagcagtcatgcatgctgtgtgtgagcagtgtggtttgaagataaatggaggtgaagttgcagtgttcgcctcccgtgcgggccctggtgtgtgctggcacccatcctgttttgtctgtttcacgtgtaatgagctgctggtcgacctcatctatttttatcaggatggaaaaattcactgtggcaggcaccatgcagaactgctcaaaccacggtgctcagcatgtgacgagataatttttgctgatgagtgcacagaagctgagggtcgccattggcacatgaaacacttctgctgccttgagtgtgaaacggtcctgggaggacagaggtatatcatgaaggacggccgccccttctgctgtggctgttttgagtctctctatgcggagtactgtgaaacctgtggggaacatattggtgtggaccatgcacagatgacctatgacgggcagcactggcacgccacggaagcctgcttttcttgtgcccagtgtaaagcctctttgttgggatgtcccttccttcccaaacagggtcagatttactgctcaaaaacgtgcagtcttggtgaagacgtccatgcctctgattcttccgactctgcatttcagtcagctcgatcaagagactcccgaagaagtgtccgaatgggcaagagcagccggtcagcagatcagtgtagacagtctctcctcttatcgcctgctctgaactacaagtttcctggcctctcaggcaatgctgatgacaccctttctcgaaaattggatgatctgagtctctccagacaaggaacaagttttgccagtgaagaattttggaaaggcagagtagagcaggaaactccagaagaccctgaagaatgggctgatcatgaagattatatgacgcagctcctcctcaagtttggtgataaaagcctctttcagccacagcccaatgagatggatattcgagccagtgagcactggatatctgataacatggttaaaagtaagaccgagttaaagcaaaataaccagagccttgcaagtaaaaaataccagtctgatatgtactgggcacagtcacaagatggactgggcgattctgcttatggcagccacccaggccctgcaagcagtagaaggcttcaggaattggaactggaccatggggcttcagggtataatcatgatgaaacacagtggtatgaagattccctggagtgtctgtcagacctgaaaccagagcaaagtgttcgggattcgatggattctttggcattgtccaatatcacaggggcttcggtggatggagaaaacaagccaaggccatcattgtattctctgcaaaattttgaggagatggaaacagaagattgtgagaagatgagcaatatgggaactttgaactcttccatgctgcacaggagtgcagagtccttaaagagtctaagttcagagttgtgtccagagaaaatcctgcctgaagagaagccagtacatctgccagtgctcagaaggtccaagtctcaatccagaccccagcaggtcaagttttctgatgatgtcattgacaatgggaactatgacattgaaatccggcagcctccgatgagtgaaaggactcggagacgcgtctacaattttgaagagaggggatccaggtctcatcaccaccgccgccggagaagtagaaagtcccgctccgacaatgccctgaatcttgttacagaaagaaaatactctcccaaggacagactgcggctgtacacccccgataactatgagaaatttatacagaataaaagtgcccgggagatccaagcatacatccagaatgctgatctctacggacagtacgcccatgccacttccgattatggcctgcagaacccaggaatgaatcggtttctgggactctacggcgaggatgatgattcctggtgttcttcctcctcctcctcttccgactcggaagaagaaggatattttcttggacaaccaatccctcaaccccggccacagagatttgcctactatacagatgacctttctagtccaccatctgcacttcccacccctcagtttggtcagaggacaacaaaatccaagaagaaaaagggacacaagggcaaaaattgtattatttcttaaccaagtagtgatgcagagcatttgtttaaaacttagccattaaccgtctgaatcgtttccttttcttccgtaggaaagttgtgaaaatagtttaaagtgctttctttgcccatgtaaatgagaactcaactgctgtttacagtgtcagattaacatttgaaaggtgtgatttctccaatttaccctctttggatggtgccaggtggacgtgacatctcgtgcctgtccggtgcgggtgcgttacagatggacgtagctgctttggttttccagtcctcaagggaatactgaagatgctgactgaaggggattggatgttgattttagaagatggagaactccagccacctttgtaaagcactagtgtttgtcatttatgtaagtcaggtcggctcaggtcttgatagtccgtcttggtgtgaggcatgcctgtcacgatgacctagctaacactgtgcatcttattgtgaggccagcttgtcccctcgaaccctctttggccaggtaaacattgtattgtatcagcgccagctacagattgaaaaaaaaaaacaaaaaa

SEQ ID NO: 56296 - DNA, 4080 bp, Artificial Sequence
  derived and/or modified sequence
agaccagcctgtgggattacacgagacaggatcgagtccaaacgggtccccagctcggcaaggcgcgccggaaggaatctaacagccattgtttgatgtcctgtgactgagaaaccaggctttaaactttatgcctttggagatggagcccaagatgagcaaactggcctttggctgtcagagaagttccacatcagatgatgactctggctgtgcattggaggagtacgcctgggtccccccgggcctgagaccagagcagatccagctctattttgcttgcttaccagaggaaaaagttccttacgttaacagccccggagagaagcatcggattaaacagcttttgtaccagttaccaccacatgataatgaggtacggtattgccagtctttgagtgaagaggagaaaaaagagttgcaggtgttcagtgctcagcggaagaaagaagcactgggaagaggaacaattaagcttctgtccagagcagtcatgcatgctgtgtgtgagcagtgtggtttgaagataaatggaggtgaagttgcagtgttcgcctcccgtgcgggccctggtgtgtgctggcacccatcctgttttgtctgtttcacgtgtaatgagctgctggtcgacctcatctatttttatcaggatggaaaaattcactgtggcaggcaccatgcagaactgctcaaaccacggtgctcagcatgtgacgagataatttttgctgatgagtgcacagaagctgagggtcgccattggcacatgaaacacttctgctgccttgagtgtgaaacggtcctgggaggacagaggtatatcatgaaggacggccgccccttctgctgtggctgttttgagtctctctatgcggagtactgtgaaacctgtggggaacatattggtgtggaccatgcacagatgacctatgacgggcagcactggcacgccacggaagcctgcttttcttgtgcccagtgtaaagcctctttgttgggatgtcccttccttcccaaacagggtcagatttactgctcaaaaacgtgcagtcttggtgaagacgtccatgcctctgattcttccgactctgcatttcagtcagctcgatcaagagactcccgaagaagtgtccgaatgggcaagagcagccggtcagcagatcagtgtagacagtctctcctcttatcgcctgctctgaactacaagtttcctggcctctcaggcaatgctgatgacaccctttctcgaaaattggatgatctgagtctctccagacaaggaacaagttttgccagtgaagaattttggaaaggcagagtagagcaggaaactccagaagaccctgaagaatgggctgatcatgaagattatatgacgcagctcctcctcaagtttggtgataaaagcctctttcagccacagcccaatgagatggatattcgagccagtgagcactggatatctgataacatggttaaaagtaagaccgagttaaagcaaaataaccagagccttgcaagtaaaaaataccagtctgatatgtactgggcacagtcacaagatggactgggcgattctgcttatggcagccacccaggccctgcaagcagtagaaggcttcaggaattggaactggaccatggggcttcagggtataatcatgatgaaacacagtggtatgaagattccctggagtgtctgtcagacctgaaaccagagcaaagtgttcgggattcgatggattctttggcattgtccaatatcacaggggcttcggtggatggagaaaacaagccaaggccatcattgtattctctgcaaaattttgaggagatggaaacagaagattgtgagaagatgagcaatatgggaactttgaactcttccatgctgcacaggagtgcagagtccttaaagagtctaagttcagagttgtgtccagagaaaatcctgcctgaagagaagccagtacatctgccagtgctcagaaggtccaagtctcaatccagaccccagcaggtcaagttttctgatgatgtcattgacaatgggaactatgacattgaaatccggcagcctccgatgagtgaaaggactcggagacgcgtctacaattttgaagagaggggatccaggtctcatcaccaccgccgccggagaagtagaaagtcccgctccgacaatgccctgaatcttgttacagaaagaaaatactctcccaaggacagactgcggctgtacacccccgataactatgagaaatttatacagaataaaagtgcccgggagatccaagcatacatccagaatgctgatctctacggacagtacgcccatgccacttccgattatggcctgcagaacccaggaatgaatcggtttctgggactctacggcgaggatgatgattcctggtgttcttcctcctcctcctcttccgactcggaagaagaaggatattttcttggacaaccaatccctcaaccccggccacagagatttgcctactatacagatgacctttctagtccaccatctgcacttcccacccctcagtttggtcagaggacaacaaaatccaagaagaaaaagggacacaagggcaaaaattgtattatttcttaaccaagtagtgatgcagagcatttgtttaaaacttagccattaaccgtctgaatcgtttccttttcttccgtaggaaagttgtgaaaatagtttaaagtgctttctttgcccatgtaaatgagaactcaactgctgtttacagtgtcagattaacatttgaaaggtgtgatttctccaatttaccctctttggatggtgccaggtggacgtgacatctcgtgcctgtccggtgcgggtgcgttacagatggacgtagctgctttggttttccagtcctcaagggaatactgaagatgctgactgaaggggattggatgttgattttagaagatggagaactccagccacctttgtaaagcactagtgtttgtcatttatgtaagtcaggtcggctcaggtcttgatagtccgtcttggtgtgaggcatgcctgtcacgatgacctagctaacactgtgcatcttattgtgaggccagcttgtcccctcgaaccctctttggccaggtaaacattgtattgtatcagcgccagctacagattgaaaaaaaaaaacaaaaaacattgctatttataacttagtatttcatagacttaagtgtattcctaatttaacggtgcaaatattaatgtatatactgtacagttcagattttaaagctgatatttttatatccctgaattgtaagccgtttgttacgctgcagtgctagatttgccagggaaccagaatttatggatgaactgattgcttatattttagtcagggtttataaatgtagatggtcaaatttacattgcctagtgatggaaaattcaactttttttgatttttttttccaatattaaaaaaggctctgtatgcatggtggggctatgtaagtactctttaaaactatggccctattaatcttacaagtgttacttatgggtcaagcaatgtaaactgtataaatgtaaaaacaacccctccacacacataacccctggaatatatggtaaaaacaagtagaagctgtttcagcgagtgggttttttccccctgcctgcggggggtgcctttctcattttcagcaaggtgatgattatctcatgggaaatgacaaagatctgcttttgtggcagaggactttgtagatttgttattttaagagaggttattcctttttattccttccctcccactaatttgttggcctttaacagcaattttgaaaactgggtcttctggttatgtttttgttttaaaatctttaaattagaggatgctgtgccattgagtactgtaagttaatatgaggttctggttcaaggaaaacttacgttggatctgaaccaatgagcagatattttgatatgtgccactcttgcatatacatctcagtcctaactaaaggttctagtggcatccaggacctttagggaggcatttaataaacacttaataaataacaaaa

SEQ ID NO: 56297 - DNA, 4253 bp, Artificial Sequence
  derived and/or modified sequence
acttttgaagatcgccggccccaggcgggctcccggcgctgagcggagacgagtttttctccccgcagaggaggatcctggaaggacgcggagctggggcttgggggatgcagtggcctggacgaggtgactccaacccgggggagcagagtccgtcacgccggcagggaccgagggtctctgcggagctggaggaccttttgtgggatgcctcacggctgctgaggggctgcagcggcagccattgtttgatgtcctgtgactgagaaaccaggctttaaactttatgcctttggagatggagcccaagatgagcaaactggcctttggctgtcagagaagttccacatcagatgatgactctggctgtgcattggaggagtacgcctgggtccccccgggcctgagaccagagcagatccagctctattttgcttgcttaccagaggaaaaagttccttacgttaacagccccggagagaagcatcggattaaacagcttttgtaccagttaccaccacatgataatgaggtacggtattgccagtctttgagtgaagaggagaaaaaagagttgcaggtgttcagtgctcagcggaagaaagaagcactgggaagaggaacaattaagcttctgtccagagcagtcatgcatgctgtgtgtgagcagtgtggtttgaagataaatggaggtgaagttgcagtgttcgcctcccgtgcgggccctggtgtgtgctggcacccatcctgttttgtctgtttcacgtgtaatgagctgctggtcgacctcatctatttttatcaggatggaaaaattcactgtggcaggcaccatgcagaactgctcaaaccacggtgctcagcatgtgacgagataatttttgctgatgagtgcacagaagctgagggtcgccattggcacatgaaacacttctgctgccttgagtgtgaaacggtcctgggaggacagaggtatatcatgaaggacggccgccccttctgctgtggctgttttgagtctctctatgcggagtactgtgaaacctgtggggaacatattggtgtggaccatgcacagatgacctatgacgggcagcactggcacgccacggaagcctgcttttcttgtgcccagtgtaaagcctctttgttgggatgtcccttccttcccaaacagggtcagatttactgctcaaaaacgtgcagtcttggtgaagacgtccatgcctctgattcttccgactctgcatttcagtcagctcgatcaagagactcccgaagaagtgtccgaatgggcaagagcagccggtcagcagatcagtgtagacagtctctcctcttatcgcctgctctgaactacaagtttcctggcctctcaggcaatgctgatgacaccctttctcgaaaattggatgatctgagtctctccagacaaggaacaagttttgccagtgaagaattttggaaaggcagagtagagcaggaaactccagaagaccctgaagaatgggctgatcatgaagattatatgacgcagctcctcctcaagtttggtgataaaagcctctttcagccacagcccaatgagatggatattcgagccagtgagcactggatatctgataacatggttaaaagtaagaccgagttaaagcaaaataaccagagccttgcaagtaaaaaataccagtctgatatgtactgggcacagtcacaagatggactgggcgattctgcttatggcagccacccaggccctgcaagcagtagaaggcttcaggaattggaactggaccatggggcttcagggtataatcatgatgaaacacagtggtatgaagattccctggagtgtctgtcagacctgaaaccagagcaaagtgttcgggattcgatggattctttggcattgtccaatatcacaggggcttcggtggatggagaaaacaagccaaggccatcattgtattctctgcaaaattttgaggagatggaaacagaagattgtgagaagatgagcaatatgggaactttgaactcttccatgctgcacaggagtgcagagtccttaaagagtctaagttcagagttgtgtccagagaaaatcctgcctgaagagaagccagtacatctgccagtgctcagaaggtccaagtctcaatccagaccccagcaggtcaagttttctgatgatgtcattgacaatgggaactatgacattgaaatccggcagcctccgatgagtgaaaggactcggagacgcgtctacaattttgaagagaggggatccaggtctcatcaccaccgccgccggagaagtagaaagtcccgctccgacaatgccctgaatcttgttacagaaagaaaatactctcccaaggacagactgcggctgtacacccccgataactatgagaaatttatacagaataaaagtgcccgggagatccaagcatacatccagaatgctgatctctacggacagtacgcccatgccacttccgattatggcctgcagaacccaggaatgaatcggtttctgggactctacggcgaggatgatgattcctggtgttcttcctcctcctcctcttccgactcggaagaagaaggatattttcttggacaaccaatccctcaaccccggccacagagatttgcctactatacagatgacctttctagtccaccatctgcacttcccacccctcagtttggtcagaggacaacaaaatccaagaagaaaaagggacacaagggcaaaaattgtattatttcttaaccaagtagtgatgcagagcatttgtttaaaacttagccattaaccgtctgaatcgtttccttttcttccgtaggaaagttgtgaaaatagtttaaagtgctttctttgcccatgtaaatgagaactcaactgctgtttacagtgtcagattaacatttgaaaggtgtgatttctccaatttaccctctttggatggtgccaggtggacgtgacatctcgtgcctgtccggtgcgggtgcgttacagatggacgtagctgctttggttttccagtcctcaagggaatactgaagatgctgactgaaggggattggatgttgattttagaagatggagaactccagccacctttgtaaagcactagtgtttgtcatttatgtaagtcaggtcggctcaggtcttgatagtccgtcttggtgtgaggcatgcctgtcacgatgacctagctaacactgtgcatcttattgtgaggccagcttgtcccctcgaaccctctttggccaggtaaacattgtattgtatcagcgccagctacagattgaaaaaaaaaaacaaaaaacattgctatttataacttagtatttcatagacttaagtgtattcctaatttaacggtgcaaatattaatgtatatactgtacagttcagattttaaagctgatatttttatatccctgaattgtaagccgtttgttacgctgcagtgctagatttgccagggaaccagaatttatggatgaactgattgcttatattttagtcagggtttataaatgtagatggtcaaatttacattgcctagtgatggaaaattcaactttttttgatttttttttccaatattaaaaaaggctctgtatgcatggtggggctatgtaagtactctttaaaactatggccctattaatcttacaagtgttacttatgggtcaagcaatgtaaactgtataaatgtaaaaacaacccctccacacacataacccctggaatatatggtaaaaacaagtagaagctgtttcagcgagtgggttttttccccctgcctgcggggggtgcctttctcattttcagcaaggtgatgattatctcatgggaaatgacaaagatctgcttttgtggcagaggactttgtagatttgttattttaagagaggttattcctttttattccttccctcccactaatttgttggcctttaacagcaattttgaaaactgggtcttctggttatgtttttgttttaaaatctttaaattagaggatgctgtgccattgagtactgtaagttaatatgaggttctggttcaaggaaaacttacgttggatctgaaccaatgagcagatattttgatatgtgccactcttgcatatacatctcagtcctaactaaaggttctagtggcatccaggacctttagggaggcatttaataaacacttaataaataacaaaactacctttctgaatata

SEQ ID NO: 56298 - DNA, 456 bp, Artificial Sequence
  derived and/or modified sequence
catgccagcctcgcgcagcctgcgctgacttccccgagacgcgccgcggtcggcacggagactttctgggctctggatgcagccattgtttgatgtcctgtgactgagaaaccaggctttaaactttatgcctttggagatggagcccaagatgagcaaactggcctttggctgtcagagaagttccacatcagatgatgactctggctgtgcattggaggagtacgcctgggtccccccgggcctgagaccagagcagatccagctctattttgcttgcttaccagaggaaaaagttccttacgttaacagccccggagagaagcatcggattaaacagcttttgtaccagttaccaccacatgataatgaggtacggtattgccagtctttgagtgaagaggagaaaaaagagttgcaggtgttcagtgctcagcggaagaaagaagcactggg

SEQ ID NO: 56299 - DNA, 3584 bp, Artificial Sequence
  derived and/or modified sequence
tttttctccccgcagaggaggatcctggaaggacgcggagctggggcttgggggatgcagtggcctggacgaggtgactccaacccgggggagcagagtccgtcacgccggcagggaccgagggtctctgcggagctggaggaccttttgtgggatgcctcacggctgctgaggggctgcagcggccattgtttgatgtcctgtgactgagaaaccaggctttaaactttatgcctttggagatggagcccaagatgagcaaactggcctttggctgtcagagaagttccacatcagatgatgactctggctgtgcattggaggagtacgcctgggtccccccgggcctgagaccagagcagatccagctctattttgcttgcttaccagaggaaaaagttccttacgttaacagccccggagagaagcatcggattaaacagcttttgtaccagttaccaccacatgataatgaggtacggtattgccagtctttgagtgaagaggagaaaaaagagttgcaggtgttcagtgctcagcggaagaaagaagcactgggaagaggaacaattaagcttctgtccagagcagtcatgcatgctgtgtgtgagcagtgtggtttgaagataaatggaggtgaagttgcagtgttcgcctcccgtgcgggccctggtgtgtgctggcacccatcctgttttgtctgtttcacgtgtaatgagctgctggtcgacctcatctatttttatcaggatggaaaaattcactgtggcaggcaccatgcagaactgctcaaaccacggtgctcagcatgtgacgagataatttttgctgatgagtgcacagaagctgagggtcgccattggcacatgaaacacttctgctgccttgagtgtgaaacggtcctgggaggacagaggtatatcatgaaggacggccgccccttctgctgtggctgttttgagtctctctatgcggagtactgtgaaacctgtggggaacatattggtgtggaccatgcacagatgacctatgacgggcagcactggcacgccacggaagcctgcttttcttgtgcccagtgtaaagcctctttgttgggatgtcccttccttcccaaacagggtcagatttactgctcaaaaacgtgcagtcttggtgaagacgtccatgcctctgattcttccgactctgcatttcagtcagctcgatcaagagactcccgaagaagtgtccgaatgggcaagagcagccggtcagcagatcagtgtagacagtctctcctcttatcgcctgctctgaactacaagtttcctggcctctcaggcaatgctgatgacaccctttctcgaaaattggatgatctgagtctctccagacaaggaacaagttttgccagtgaagaattttggaaaggcagagtagagcaggaaactccagaagaccctgaagaatgggctgatcatgaagattatatgacgcagctcctcctcaagtttggtgataaaagcctctttcagccacagcccaatgagatggatattcgagccagtgagcactggatatctgataacatggttaaaagtaagaccgagttaaagcaaaataaccagagccttgcaagtaaaaaataccagtctgatatgtactgggcacagtcacaagatggactgggcgattctgcttatggcagccacccaggccctgcaagcagtagaaggcttcaggaattggaactggaccatggggcttcagggtataatcatgatgaaacacagtggtatgaagattccctggagtgtctgtcagacctgaaaccagagcaaagtgttcgggattcgatggattctttggcattgtccaatatcacaggggcttcggtggatggagaaaacaagccaaggccatcattgtattctctgcaaaattttgaggagatggaaacagaagattgtgagaagatgagcaatatgggaactttgaactcttccatgctgcacaggagtgcagagtccttaaagagtctaagttcagagttgtgtccagagaaaatcctgcctgaagagaagccagtacatctgccagtgctcagaaggtccaagtctcaatccagaccccagcaggtcaagttttctgatgatgtcattgacaatgggaactatgacattgaaatccggcagcctccgatgagtgaaaggactcggagacgcgtctacaattttgaagagaggggatccaggtctcatcaccaccgccgccggagaagtagaaagtcccgctccgacaatgccctgaatcttgttacagaaagaaaatactctcccaaggacagactgcggctgtacacccccgataactatgagaaatttatacagaataaaagtgcccgggagatccaagcatacatccagaatgctgatctctacggacagtacgcccatgccacttccgattatggcctgcagaacccaggaatgaatcggtttctgggactctacggcgaggatgatgattcctggtgttcttcctcctcctcctcttccgactcggaagaagaaggatattttcttggacaaccaatccctcaaccccggccacagagatttgcctactatacagatgacctttctagtccaccatctgcacttcccacccctcagtttggtcagaggacaacaaaatccaagaagaaaaagggacacaagggcaaaaattgtattatttcttaaccaagtagtgatgcagagcatttgtttaaaacttagccattaaccgtctgaatcgtttccttttcttccgtaggaaagttgtgaaaatagtttaaagtgctttctttgcccatgtaaatgagaactcaactgctgtttacagtgtcagattaacatttgaaaggtgtgatttctccaatttaccctctttggatggtgccaggtggacgtgacatctcgtgcctgtccggtgcgggtgcgttacagatggacgtagctgctttggttttccagtcctcaagggaatactgaagatgctgactgaaggggattggatgttgattttagaagatggagaactccagccacctttgtaaagcactagtgtttgtcatttatgtaagtcaggtcggctcaggtcttgatagtccgtcttggtgtgaggcatgcctgtcacgatgacctagctaacactgtgcatcttattgtgaggccagcttgtcccctcgaaccctctttggccaggtaaacattgtattgtatcagcgccagctacagattgaaaaaaaaaaacaaaaaacattgctatttataacttagtatttcatagacttaagtgtattcctaatttaacggtgcaaatattaatgtatatactgtacagttcagattttaaagctgatatttttatatccctgaattgtaagccgtttgttacgctgcagtgctagatttgccagggaaccagaatttatggatgaactgattgcttatattttagtcagggtttataaatgtagatggtcaaatttacattgcctagtgatggaaaattcaactttttttgatttttttttccaatattaaaaaaggctctgt

SEQ ID NO: 56300 - DNA, 693 bp, Artificial Sequence
  derived and/or modified sequence
gaggaggggttcgctcgctgcctctgcgtcctgagctcggcctctggctcctggggccggggacgcagagaggggctggagccggtcgacccacggcccagggcgccccctcgcggcctaagcagcggccgccgcctggagcgcagagtttgcggggcccagggggcgccgacgcccgctctgaggcgtctctgctgctgcggcggcggggatggggacgacccaggggaccccctgcagccatcactggcagccccatcaagaattggccggctgagttttcccaaacagccattgtttgatgtcctgtgactgagaaaccaggctttaaactttatgcctttggagatggagcccaagatgagcaaactggcctttggctgtcagagaagttccacatcagatgatgactctggctgtgcattggaggagtacgcctgggtccccccgggcctgagaccagagcagatccagctctattttgcttgcttaccagaggaaaaagttccttacgttaacagccccggagagaagcatcggattaaacagcttttgtaccagttaccaccacatgataatgaggtacggtattgccagtctttgagtgaagaggagaaaaaagagttgcaggtgttcagtgctcagcggaagaaagaagcactgggaagaggaacaattaagcttctgtccaga

SEQ ID NO: 56301 - DNA, 585 bp, Artificial Sequence
  derived and/or modified sequence
tatttgcatcttagcggcttcactcactgggctcgggagaatggagcgggcgggcggcgcagccattgtttgatgtcctgtgactgagaaaccaggctttaaactttatgcctttggagatggagcccaagatgagcaaactggcctttggctgtcagagaagttccacatcagatgatgactctggctgtgcattggaggagtacgcctgggtccccccgggcctgagaccagagcagatccagctctattttgcttgcttaccagaggaaaaagttccttacgttaacagccccggagagaagcatcggattaaacagcttttgtaccagttaccaccacatgataatgaggtacggtattgccagtctttgagtgaagaggagaaaaaagagttgcaggtgttcagtgctcagcggaagaaagaagcactgggaagaggaacaattaagcttctgtccagagcagtcatgcatgctgtgtgtgagcagtgtggtttgaagataaatggaggtgaagttgcagtgttcgcctcccgtgcgggccctggtgtgtgctggcacccatcctgttttgtctgtttca

SEQ ID NO: 56302 - DNA, 3324 bp, Artificial Sequence
  derived and/or modified sequence
atgtagtggggacccggtgcttgctgccccaccctgctggggtctcctccggaaatgagtgggtgcgggtgactcgtagggcacccagccctctgttccttcgggagtcctccgctcccgctccgggccgccagcctccttcagacgcagagcgggcgggcggctagtgcgcgccgagggctcaggggccggcgccgcgaggggctgcaggccgcgctcggccgctgtccgggccgcagcagccattgtttgatgtcctgtgactgagaaaccaggctttaaactttatgcctttggagatggagcccaagatgagcaaactggcctttggctgtcagagaagttccacatcagatgatgactctggctgtgcattggaggagtacgcctgggtccccccgggcctgagaccagagcagatccagctctattttgcttgcttaccagaggaaaaagttccttacgttaacagccccggagagaagcatcggattaaacagcttttgtaccagttaccaccacatgataatgaggtacggtattgccagtctttgagtgaagaggagaaaaaagagttgcaggtgttcagtgctcagcggaagaaagaagcactgggaagaggaacaattaagcttctgtccagagcagtcatgcatgctgtgtgtgagcagtgtggtttgaagataaatggaggtgaagttgcagtgttcgcctcccgtgcgggccctggtgtgtgctggcacccatcctgttttgtctgtttcacgtgtaatgagctgctggtcgacctcatctatttttatcaggatggaaaaattcactgtggcaggcaccatgcagaactgctcaaaccacggtgctcagcatgtgacgagataatttttgctgatgagtgcacagaagctgagggtcgccattggcacatgaaacacttctgctgccttgagtgtgaaacggtcctgggaggacagaggtatatcatgaaggacggccgccccttctgctgtggctgttttgagtctctctatgcggagtactgtgaaacctgtggggaacatattggtgtggaccatgcacagatgacctatgacgggcagcactggcacgccacggaagcctgcttttcttgtgcccagtgtaaagcctctttgttgggatgtcccttccttcccaaacagggtcagatttactgctcaaaaacgtgcagtcttggtgaagacgtccatgcctctgattcttccgactctgcatttcagtcagctcgatcaagagactcccgaagaagtgtccgaatgggcaagagcagccggtcagcagatcagtgtagacagtctctcctcttatcgcctgctctgaactacaagtttcctggcctctcaggcaatgctgatgacaccctttctcgaaaattggatgatctgagtctctccagacaaggaacaagttttgccagtgaagaattttggaaaggcagagtagagcaggaaactccagaagaccctgaagaatgggctgatcatgaagattatatgacgcagctcctcctcaagtttggtgataaaagcctctttcagccacagcccaatgagatggatattcgagccagtgagcactggatatctgataacatggttaaaagtaagaccgagttaaagcaaaataaccagagccttgcaagtaaaaaataccagtctgatatgtactgggcacagtcacaagatggactgggcgattctgcttatggcagccacccaggccctgcaagcagtagaaggcttcaggaattggaactggaccatggggcttcagggtataatcatgatgaaacacagtggtatgaagattccctggagtgtctgtcagacctgaaaccagagcaaagtgttcgggattcgatggattctttggcattgtccaatatcacaggggcttcggtggatggagaaaacaagccaaggccatcattgtattctctgcaaaattttgaggagatggaaacagaagattgtgagaagatgagcaatatgggaactttgaactcttccatgctgcacaggagtgcagagtccttaaagagtctaagttcagagttgtgtccagagaaaatcctgcctgaagagaagccagtacatctgccagtgctcagaaggtccaagtctcaatccagaccccagcaggtcaagttttctgatgatgtcattgacaatgggaactatgacattgaaatccggcagcctccgatgagtgaaaggactcggagacgcgtctacaattttgaagagaggggatccaggtctcatcaccaccgccgccggagaagtagaaagtcccgctccgacaatgccctgaatcttgttacagaaagaaaatactctcccaaggacagactgcggctgtacacccccgataactatgagaaatttatacagaataaaagtgcccgggagatccaagcatacatccagaatgctgatctctacggacagtacgcccatgccacttccgattatggcctgcagaacccaggaatgaatcggtttctgggactctacggcgaggatgatgattcctggtgttcttcctcctcctcctcttccgactcggaagaagaaggatattttcttggacaaccaatccctcaaccccggccacagagatttgcctactatacagatgacctttctagtccaccatctgcacttcccacccctcagtttggtcagaggacaacaaaatccaagaagaaaaagggacacaagggcaaaaattgtattatttcttaaccaagtagtgatgcagagcatttgtttaaaacttagccattaaccgtctgaatcgtttccttttcttccgtaggaaagttgtgaaaatagtttaaagtgctttctttgcccatgtaaatgagaactcaactgctgtttacagtgtcagattaacatttgaaaggtgtgatttctccaatttaccctctttggatggtgccaggtggacgtgacatctcgtgcctgtccggtgcgggtgcgttacagatggacgtagctgctttggttttccagtcctcaagggaatactgaagatgctgactgaaggggattggatgttgattttagaagatggagaactccagccacctttgtaaagcactagtgtttgtcatttatgtaagtcaggtcggctcaggtcttgatagtccgtcttggtgtgaggcatgcctgtcacgatgacctagctaacactgtgcatcttattgtgaggccagcttgtcccctcgaaccctctttggccaggtaaacattgtattgtatcagcgccagctacagattg

SEQ ID NO: 56303 - DNA, 2496 bp, Artificial Sequence
  derived and/or modified sequence
atgccactggaaatggaacctaagatgtctaaactggcgttcggctgtcaacggtcaagcacctcagacgatgacagcggatgcgcacttgaggaatatgcctgggtgccacctggcttgcggcctgaacagatccaactgtattttgcctgtttgcccgaggagaaagttccatatgtgaactcgcctggtgagaagcatcgaatcaagcagctgttgtaccaacttccacctcacgataacgaggtgaggtactgccaaagcctatctgaagaggaaaagaaggaactccaggtgttcagcgctcagcgcaagaaagaagcactcggcagaggcacgattaaactgctttcaagagcggtaatgcacgccgtttgtgaacagtgtggactgaaaatcaacgggggagaggtggctgtttttgcaagtagggccggaccaggagtgtgctggcacccatcctgctttgtctgctttacatgtaacgagttgctcgtagatctcatctacttttatcaggatggtaagatccactgcgggcgacatcacgccgagcttctcaagcctagatgttctgcctgtgatgagattatcttcgctgatgagtgcacagaggccgaaggacgtcattggcacatgaagcacttttgttgcctcgagtgcgaaaccgtgctgggaggacagcgctatattatgaaagatggtagacctttttgttgtggatgcttcgagtccctctacgccgaatactgcgagacatgtggcgagcacatcggagtggatcacgcgcaaatgacttatgacggccagcactggcacgcaaccgaggcttgcttctcctgcgcccagtgcaaagcaagcttactggggtgcccctttctgccaaagcaaggccagatctattgcagcaagacctgctcgctgggggaggacgtgcatgcatctgactctagcgactctgcctttcagtccgctcgaagccgtgatagccgcagatccgttcggatgggaaaaagttcaagatcggccgaccaatgtcggcagtccttactcctgagccctgcgctcaattataagttcccagggctgtccggaaatgcggacgatacactctctaggaagctggacgatctgtccctgtcccggcagggcacgagttttgcttccgaagaattttggaagggaagggtagagcaagagactccagaagatcccgaagagtgggcagatcatgaagactatatgactcaactgctcctgaaatttggggataagtctctgtttcaaccacagcccaatgagatggatatccgcgcatcagagcattggatcagtgataatatggttaagagtaagaccgaactgaaacagaacaatcagtccttagcctcaaaaaaatatcagagtgatatgtattgggcccaatcccaggatggactcggggacagcgcttatggtagccatccgggaccagcttcttcgcgccgattgcaggaacttgagctggaccatggtgcttcagggtataatcacgatgagactcaatggtatgaggactcactcgaatgtctgtccgatcttaaaccagaacagagcgtccgtgattccatggacagtctggctctcagtaatattaccggagcctctgtggacggggaaaataaacccaggccttccctttactccctccagaatttcgaggagatggagactgaggactgtgagaagatgtccaatatggggactcttaactcttccatgctccatcggtcagctgaatccctgaaatcactctcgagcgaactctgtcccgaaaaaattttgcccgaggagaagccggtacacctacccgtcctccggaggtctaaatcgcaatcacgcccacagcaggtgaagttttcggatgatgtcattgataacgggaactacgatatcgaaatcagacagcctccaatgtccgagaggacccggaggcgcgtctacaactttgaagagcgcggatccagaagccaccatcacaggagacgacgtagccggaagtcgagaagcgataacgcccttaatctggtgaccgagagaaaatattcgccaaaagatcgactgcggttgtatacccctgataattatgagaagttcattcagaataaatctgccagggagatccaagcctacatccaaaatgccgacctttacggtcagtacgcccacgcgacttccgactatggactgcagaatcccggtatgaatcggtttctcggactgtacggcgaggacgacgacagttggtgttcaagctcatccagttcctccgactctgaggaggagggttatttcctggggcagccaatcccgcagccacggccacagcggtttgcatattatacggatgatctgtcgtcacctccctcagctttgcccacccctcagtttggccagaggactaccaagtccaagaaaaagaaaggacacaagggcaagaactgcatcatcagttag

SEQ ID NO: 56304 - DNA, 2496 bp, Artificial Sequence
  derived and/or modified sequence
atgccgctcgaaatggaacctaagatgtctaaactggctttcgggtgccaacgatccagtacatctgacgacgactcgggatgtgcccttgaggaatacgcatgggtgccacctgggctaaggccggaacagattcagctgtactttgcatgcttgccagaagagaaagtgccttatgtcaactcgccaggagagaagcaccgaatcaagcagctcctgtatcaactccccccacatgacaatgaagtcagatactgtcaaagtctgagcgaggaagagaaaaaggagctgcaggtattctctgctcagcggaaaaaggaggctctgggacgcggaacaatcaaactgttatcgcgcgctgttatgcacgcggtgtgcgaacagtgtggactgaagatcaatggtggggaggtcgccgtgtttgctagccgggctgggcctggcgtgtgctggcacccatcttgtttcgtttgctttacatgtaatgagctgttggttgacctgatctatttctaccaggacggcaaaatccattgcggaaggcatcacgccgagttactgaagccgaggtgctccgcttgtgacgagataatcttcgctgatgagtgcacggaggccgaaggacggcattggcatatgaagcacttctgttgtctagagtgcgaaaccgtgctgggaggccagcgctacataatgaaggatgggcgacccttttgctgcggttgttttgaatccttatacgctgagtactgtgagacatgcggcgaacacatcggcgtcgaccacgctcagatgacctatgacgggcagcactggcatgcaacagaagcctgttttagctgcgcccaatgtaaggcaagcctccttgggtgcccctttctccccaaacagggtcagatttattgtagtaagacatgttcactgggtgaagacgtgcatgcttccgatagcagtgattccgctttccagtctgcacgtagtagagacagtcggagatctgtgcgcatgggaaagtcttccagatcagccgatcagtgcaggcagtcactcttattgtcccctgcactaaactataaattccccggactcagcggtaacgccgatgataccctgtctcgcaaactggacgatctatctctgtcaagacagggcacctccttcgcgagtgaggaattttggaagggtagggtcgaacaggagacgccggaggacccagaggagtgggccgaccatgaggactacatgacgcagcttctactcaaattcggcgataaatctctttttcagccccagccaaacgaaatggacattagagcatctgagcactggatcagcgataatatggtaaaaagtaagacagaactcaagcagaacaatcagagcttggccagcaaaaaataccagagtgatatgtattgggcacagagccaggatggcctgggagacagtgcttatggatctcatcctgggccagcatcttcccgtcgcctccaagagctggaactggaccacggcgcatctgggtacaaccacgatgaaactcaatggtacgaagatagtctggagtgcctgtcggacttgaagcctgagcaaagtgtcagagattctatggacagccttgcactgtccaatatcaccggcgcttccgttgacggtgaaaacaagccacggccttccctatacagtctgcaaaatttcgaagaaatggaaaccgaggactgcgagaagatgtcaaacatgggcacgctcaacagctcaatgctgcatagatctgcagaatctctgaagagtcttagctcagagctttgcccagagaaaatcctgccggaggagaagccagtacatctgccagtgctgagacggtcaaaatcgcaaagtaggccacagcaggtaaaattttccgacgatgtcatcgataatgggaactatgacatcgaaataagacaaccacccatgtctgaaaggacgcgacggagagtctataacttcgaggaaagaggaagcaggagtcatcatcatcggaggaggagatcacgtaaaagccggtcagacaatgcgctgaacctggtgaccgaacgcaaatattccccgaaggatcgattgcggctttacacccccgataattacgagaagttcattcaaaacaagagcgccagggagatccaggcgtatatccagaatgccgatctctacggacagtatgcccatgctactagcgattatggattgcagaacccaggcatgaatcgtttcctaggactgtatggggaggacgatgactcctggtgttcttcatcctcttcaagctcagattcagaggaagagggctatttcctcggtcaaccaataccgcagcctcgcccacagagattcgcgtactatacggacgatctgagcagccccccatctgctctgcccaccccacagtttggacaaagaacgaccaagtctaaaaaaaagaagggacacaaaggaaaaaactgcatcatcagttag

SEQ ID NO: 56305 - DNA, 2496 bp, Artificial Sequence
  derived and/or modified sequence
atgccactggagatggaaccaaagatgagtaaactcgcctttggatgtcagagatcctctacttcagatgatgactctgggtgcgcccttgaggaatatgcatgggtgccaccaggactgaggcccgaacagattcaactctatttcgcctgccttcccgaagaaaaagtgccctacgtcaatagccccggtgaaaagcacagaataaagcaactgctctaccagctgccaccccatgataacgaggttagatattgccagtctctctcagaggaagaaaaaaaggaactgcaggtcttcagtgctcaacgcaaaaaggaggccctgggcaggggcaccattaaactcctgtctcgggctgtgatgcacgctgtgtgtgagcagtgcgggcttaagatcaacgggggtgaagtggcagtttttgccagccgcgctggcccaggcgtgtgttggcacccaagctgctttgtctgttttacatgcaatgagctgctggtagatctgatttacttctaccaagacggaaagattcactgtggccgacatcatgctgaactcttgaagcctcgctgctcagcctgtgacgaaatcattttcgccgatgaatgcactgaagcagaaggcagacattggcacatgaagcacttttgctgcctggagtgtgagacagtcttaggtggacaaagatacataatgaaagacggcaggcccttctgctgcggatgtttcgaatcactttatgctgagtactgcgagacctgcggtgagcacatcggagtggatcatgcccaaatgacctatgatggacagcactggcacgcgacagaagcttgcttctcgtgcgcccagtgtaaggccagcctcttgggatgccccttcttgcctaaacagggccaaatctattgttccaagacatgtagtttgggagaggatgttcatgcctccgactcttccgacagcgcttttcagagcgcacggagccgagacagcaggcgttcggtgcgcatggggaagtcatctcgatcagccgatcagtgccggcagtccctccttctttctcctgccttgaattataaatttcctggcctgtccggcaacgctgacgacaccctatcccggaagttggacgacctgagcctttccagacagggcacatctttcgcctccgaggaattttggaaagggagggtggaacaggagactcccgaggatcccgaagaatgggccgaccacgaagattacatgacccagctcctgcttaagttcggcgataaatcactgtttcagccacagcctaacgagatggacatacgcgcatctgaacattggatctccgacaatatggttaagtccaagacggagctgaagcagaacaaccagagcctggcctccaagaagtaccagtctgacatgtattgggcacaatcccaagatggactcggggatagtgcctacggcagccaccccggacctgcctcttcacgcagactgcaggagctggagctggaccatggcgctagtggttataatcatgacgagactcagtggtatgaggactccttagagtgcctgagcgatctaaagcccgagcagagcgtgcgcgatagcatggatagcctggctctgtccaatattaccggtgccagcgtagatggcgaaaacaaaccacggccatctttatacagcctgcagaacttcgaggagatggagaccgaggattgcgaaaagatgtccaatatgggaaccctcaatagttcaatgctacatcgatctgccgagagtttgaagagtctctctagtgagctctgtcccgagaagatcctgccggaggagaagccagttcatttacctgtgctgcgccgttcaaagagtcaatcgcgacctcaacaggttaagttcagcgacgacgtcatcgataacggaaattatgacatagagattagacagccacctatgtctgagagaacccggcgaagagtgtacaacttcgaagaacggggtagtcgttcgcaccatcaccgacgcaggagatctagaaagtcccgcagcgataacgccctgaacttggttactgagcgcaaatattcacccaaggaccgtctgcgcctctacactcccgacaattatgaaaagtttatacaaaacaagtctgcccgagagattcaggcctatattcagaatgccgatctgtacggccagtacgcgcatgcgaccagcgactatggattgcagaatccaggtatgaacagattcctcgggctgtacggagaggatgacgattcgtggtgttcctctagctccagttcctctgacagcgaggaggagggatactttctggggcagcccatcccccagcccagaccgcagcgctttgcctactataccgatgatctgtccagcccaccctccgcactcccaactccacagttcggccagagaaccactaagtccaaaaaaaagaaaggtcacaagggcaaaaactgtatcatcagctag

SEQ ID NO: 56306 - DNA, 333 bp, Artificial Sequence
  derived and/or modified sequence
atgcctctggaaatggagccaaaaatgtcaaagctagcgttcggctgccagcgctcttctacctctgacgatgatagcgggtgtgcgcttgaggagtacgcctgggttccccctggccttagacccgaacagattcagctttacttcgcctgtttgccagaagagaaggttccttacgttaactcaccgggagagaaacacagaatcaaacaactgttataccagctcccgcctcatgacaatgaggtgcggtactgtcaaagcctgtcagaagaagagaagaaggagctgcaggtgttcagcgcacaaagaaaaaaggaggcactgggatag

SEQ ID NO: 56307 - DNA, 2496 bp, Artificial Sequence
  derived and/or modified sequence
atgccgttggagatggaacccaagatgtccaaactggcattcggatgtcagcgtagttctacttccgacgacgacagtggctgtgcccttgaggaatatgcctgggtcccacccggacttcgccctgaacagattcagctttacttcgcgtgcttgcccgaggagaaagtgccttatgtcaattcccctggcgagaaacatcgaattaaacaattgctgtaccaactgcccccacacgataatgaggtgcgctattgtcagtcattgagcgaggaggagaaaaaagaactgcaggtgttctccgcccaacgtaaaaaagaagctcttggaagaggcactattaaactgctatctcgagcggtgatgcatgccgtgtgcgaacagtgcggtctgaagatcaatggcggagaggtcgcagtcttcgcgagccgcgctggcccaggtgtgtgttggcatccctcctgctttgtatgttttacctgtaacgagctgttggtagacttgatttacttttatcaagatggtaaaatccattgtggacgccaccacgccgaactgcttaaacctaggtgcagtgcgtgcgacgagatcatatttgctgatgaatgtaccgaagcagaagggagacattggcatatgaaacacttttgttgcctggagtgcgaaaccgtactcggtggccagaggtatattatgaaggatggcaggcctttctgttgtggttgctttgaatcgctttatgccgagtactgcgagacgtgcggcgagcacattggcgtggaccatgcgcaaatgacctatgacgggcaacattggcatgcgacagaagcttgcttcagctgcgcccagtgtaaagcctcgctgctgggctgtcccttcctacccaaacaggggcagatttattgtagcaaaacatgttcgttgggggaggacgttcatgcatccgactcctctgattccgcttttcaatccgccaggagcagagactcacgtagaagcgttcgcatgggtaagtcctcgcgaagcgcggatcaatgccgacaatccctgctcttatccccagcactcaactacaaattccctggcctgtccgggaacgcggacgacacccttagcaggaagctggacgacttaagcttaagccgacagggcacatcctttgcctccgaagagttctggaaaggacgggttgagcaggagaccccagaggatcccgaggagtgggcagaccacgaggactacatgactcagctgctgctcaaatttggtgacaaatccctgtttcagcctcagcccaatgaaatggacattagagcttctgagcactggattagcgataatatggttaagagcaagacagaactgaaacagaacaaccaaagcctggcctccaaaaagtaccagtcagacatgtattgggctcaatctcaggatgggctgggagattcggcctacggtagtcaccccggacctgcatcgtcccggcgacttcaggaactcgaattagaccatggagcatcaggatataaccacgacgagacccagtggtacgaagactccttggaatgtttgagcgatctaaagcctgagcaatcagttcgcgactcgatggactcacttgcgttatccaacattactggcgcttctgtcgacggtgagaataaaccgaggcccagtttatacagccttcagaacttcgaggagatggaaactgaggactgtgagaaaatgtctaacatgggcactcttaactcctccatgctccacaggtcagccgagtccctgaagagtctctcaagtgagttgtgtcctgagaaaatcctgccggaggagaagcccgtccacctccccgtgcttaggcgcagcaagtcccaatccagaccccaacaggtgaaattttctgacgatgtaattgacaatggcaattatgatatcgaaatcaggcagccaccaatgagtgaacgcacccggcgtagagtgtataacttcgaggagcgtgggtccaggagtcaccaccacaggcgcagacgatcacgtaaaagcaggagcgacaacgcccttaatttggttacagagcggaagtacagccccaaggataggttgcggttatacaccccagacaactacgagaagtttatacagaacaagtcagctcgcgaaatccaggcgtacattcagaacgctgacctttacggccagtacgcccacgccactagcgattacggtctgcaaaatccagggatgaaccggtttctgggactatacggtgaggacgacgactcgtggtgcagctcatcctcttccagcagcgacagcgaggaagaaggctatttcctcggccagcccattccacaaccgcgtccacaacggtttgcctactacaccgacgatctgagctctcctcccagcgctctgccgacgcctcaattcggtcagagaacaacaaagagtaagaagaaaaaaggccacaagggaaaaaactgcattattagctag

SEQ ID NO: 56308 - DNA, 360 bp, Artificial Sequence
  derived and/or modified sequence
atgccactggaaatggagcctaagatgtcaaaactggctttcgggtgtcagaggtctagcacatccgatgatgatagcgggtgcgcattagaagaatacgcttgggtcccaccgggattacgccctgagcagatccaactttacttcgcgtgtctgcctgaagagaaggtgccctacgtgaattctcccggtgagaagcacaggattaagcagctgctgtatcagctgcctccccatgacaatgaagtgaggtattgtcaatctctgtccgaggaggagaagaaggagctgcaggtgttcagtgcccagaggaaaaaggaagcactgggcagagggaccatcaagctgttgagccggtag

SEQ ID NO: 56309 - DNA, 480 bp, Artificial Sequence
  derived and/or modified sequence
atgccattggagatggaacctaaaatgtctaagcttgctttcgggtgtcagagatcttcaacaagtgatgatgactccggctgcgccctcgaggagtatgcttgggtgccaccaggtcttaggcccgagcagattcagctgtactttgcatgtcttcctgaggagaaagtcccatacgttaatagccccggagagaagcatcggatcaagcagctcctttatcagctccctccccacgacaacgaggtgcgatactgccagtctttgtcagaggaagagaaaaaggaattgcaggtgttcagtgctcagcgcaagaaagaggctctcgggagaggcactattaagttattgtcccgagccgtgatgcacgctgtttgcgaacagtgcggcctgaaaattaatggcggtgaggtcgccgtcttcgcaagccgcgctggtcctggagtgtgttggcacccatcttgcttcgtctgcttctag

SEQ ID NO: 56310 - DNA, 2496 bp, Artificial Sequence
  derived and/or modified sequence
atgccactagaaatggaacctaaaatgtcgaaactggccttcggctgtcagcggagctccactagcgacgatgactctggttgtgctctggaggaatatgcatgggtaccacccggactcagaccagagcagattcagctttactttgcctgcctcccagaggagaaggtgccgtatgtgaactcacccggagagaaacatcgcatcaaacaactgctctaccaattaccaccacacgataacgaggtcagatactgtcagagcctgtccgaagaggaaaagaaagagctccaggtcttctccgcccaaagaaaaaaagaggccctgggccgaggaaccattaaactgctcagccgggctgtgatgcacgcagtgtgcgaacagtgtggacttaagatcaacgggggagaggtggcggtctttgcgagcagggcaggacctggagtatgttggcatccaagctgcttcgtctgctttacatgcaacgagttgttagtcgatcttatttatttctatcaagatggaaaaattcactgcggcaggcatcatgccgagctacttaaaccacggtgcagcgcatgcgacgagattattttcgccgacgaatgtaccgaagcggaggggcgacactggcatatgaaacacttctgctgtttggagtgtgagaccgttctgggcggtcagcggtatattatgaaggatggcaggcccttttgctgtggttgctttgagtccctgtacgccgagtactgtgaaacatgtggagaacacattggcgtggatcatgcgcaaatgacttacgacggccagcactggcacgcaaccgaagcctgctttagctgcgcccagtgcaaagcctctcttcttggatgtccatttctccctaagcagggacagatctattgctcaaagacatgttcattgggcgaggatgtgcacgcgagcgattcctcggactccgcctttcagagtgctagatcaagagacagcagacggtcagtccggatgggaaagtcatctcggtcggcagatcagtgccgccagagcctcctcctgagccccgcactaaactacaaatttcccggactctctggcaatgcagatgatacgctgagtagaaagctcgatgacttgagcctgagtcgccagggcacgtcatttgcctccgaggagttttggaagggccgtgtggaacaggagacccctgaagatccggaggagtgggcagatcacgaagattacatgactcagctgctcttgaaattcggggataagtctctcttccaaccccagccgaatgaaatggatattagggcctcagagcactggatctccgataatatggtgaagtccaagacagagctaaagcagaataatcagagtttggcctctaaaaaatatcagagcgacatgtactgggcacaatctcaggatgggctgggtgacagcgcttatggttctcacccaggcccagccagctccaggaggctccaggagctcgaactggaccacggtgccagcggctacaaccatgacgagacacagtggtacgaggatagcctggaatgtcttagcgatctcaaaccagaacaatctgttagggattcgatggactctctcgcgctgtcaaacattaccggagctagcgtggacggcgagaacaaacctagacctagcctgtacagcctccagaattttgaggaaatggagaccgaagattgcgagaagatgagtaacatgggcactctaaatagcagcatgttacacagaagcgcagagagcctgaaaagcctatccagtgaactgtgtcctgaaaagattctgccagaggaaaagccggtgcatcttccggtcctgaggcggtctaaatcccagtcgcgaccgcagcaggtgaaattcagcgatgatgtcattgacaatggtaattacgacattgaaattcggcagcccccaatgagcgaaaggacgcgccgtcgggtgtataacttcgaagaacgcggatcgcggtcacaccatcataggaggagacggagtcgcaaaagccggtcagataatgctctgaacctcgttaccgagagaaaatattctcccaaggacaggctacggctctatactcccgataattacgagaagttcattcagaataaatccgcgagagagattcaggcatacattcagaatgcagacttgtacggacagtatgcccacgctacaagcgattatgggctgcagaaccctggtatgaacagatttctggggctttacggggaagatgatgactcttggtgtagctctagctcttcctcctccgattctgaggaagagggttatttcctgggccaaccgatcccgcagcctcggcctcaaaggttcgcatattacactgatgacctctccagtcctcctagtgcacttcctactccccagttcggccagcgcacaactaaatctaagaaaaagaaagggcacaagggaaaaaactgcataatctcctag
